United States Patent Application Publication US 2006/0134663 A1 - sequence listing, part 139

SEQ ID NO: 475022 - DNA, 881 bp, Homo Sapiens
ttttttttttttttttttttttttttttttttttttggggtgaacataaacaggtttaccacagtacataagggactgactacttgggtttttggaacatcatcaatcatggattaggctcttgcttcttctctagctccagctcggcagccctttgtactgctgcatcgactagcagcaggaagctgctgaagtcggcgtgctcctctggagacacaagttctggagaagacggggatgtgacagaaaccttgacctttttcttcggctgggctattccggtgagcttctggctaggggccgactccggatctggttgcttctctcttgacatctggccctttggcaagggccacaggggcaggctttgtacattgtctggaccactgggccctgacttggccggcacagacgcctcggtgctctgcaggtgggtggcatgggcatctttgcccgttttgtggccaatgatggggtcgtttctacgctgttgaagcatatccgggagaatgcgtctgcgagcattgataaaccagttagaaatctgcaacaaagacaaattggtcttctctgacagcatttgcttctcttcttctgaagggtaggccttaaaccgatgcttatacatccagtcgcggaggatcttaacggactcggctggcaagtttcccttgcgcttcttcttgtgctctggtaaggcaagaactctgcctgtatctgcgttatttctcgacatgattgaggtgtcttgggctgggctttgggtcttcgccgggctgtctttttccaccgggctttgggtctcagccgggccgtccgcagcggcctccatattccaagaggcttatcgttactgttgtttccgagaaagacaaacagcg

SEQ ID NO: 475023 - DNA, 1000 bp, Homo Sapiens; identical to SEQ ID NO: 343751

SEQ ID NO: 475024 - DNA, 1000 bp, Homo Sapiens; identical to SEQ ID NO: 343752

SEQ ID NO: 475025 - DNA, 1000 bp, Homo Sapiens; identical to SEQ ID NO: 343753

SEQ ID NO: 475026 - DNA, 1000 bp, Homo Sapiens; identical to SEQ ID NO: 343753

SEQ ID NO: 475027 - DNA, 1000 bp, Homo Sapiens
tttttttttttttttaaaaaatcagactttaaatgttttattttgttgattctgtacaccgtcaggaaacaaggttagaagtaaaataaagtgccagttaaattcggctactaccaacaaccaaaaccttaaacatagaaaatcaaagtaaactgcggaaaggtcatagcataaccttgggtaaaggaatttgttaacgtctgtaacaaatcgaaactgactacgtatgtagctcttcaactgcaagacggcgagaaggaagacctgcgggccgcgctggtcaagggcccggcccgctgaggaacagcggaaagcgccttcccgccgtcgccaccgcagctgggatccgccgagcagcgggcggttcagggctcccggtactcctgcgtgttaatgagaacgttcattagcgctcttgacaggacggcgactgtgagacgcctggttacctattttagtaaatcgggaacactggatgcaaggcggttggttttcgtttttaagcaagcttaaatgttggttacgctacttttggggaaagggaaacgaaaggtgaatctcgagttctaagttgctttctaagaaacccccaggatttaagagcgaaaactctctgcgacaaaacactggatacgcgagtcttaaatacagctctccaaacagctggtctacaaaagtggacccacgtcccaacccagcgcaccctgcgttgtcctcgcccctacccaccgcaccccgacgccgaccacctgtccgccgagggtccgtccgtctgccacgtcccagaccgtctgcaccgcctaactggtctttttctgcctcttgagttccggcagcctcctttgataggacctggccggcgggaacaagggcgcccgtggcctctggcggaggagaaggaaaagaaccacccctccgcccccgccactgctcgagcgcagcccctagtactgggagccggcgtgctccgctccggggagatagcgctcggggatggcct

SEQ ID NO: 475028 - DNA, 1000 bp, Homo Sapiens
tagaatagttttttctcatcaaaacatgatttattaattttaagcaagagtaagcatatgtgatagtggccagcttggggatagaactcttcctggttgatgcacagttcagcacctgttgggtcttggctgttgggatgataattcttttgggtgaggggaacagccgtggtcaaggctgcctgcacccccatccaggcacaggaccctgggcaaagtctcaaaagaggtagtgtttttactttcgcaccaacaatacaacataagtattgggtacaaaagaggagatttccttcccctctacctcaacgggcaaaaggccttccatcttcagaagaggcttgtgaggaccatcggttgatgacctcctagtgaattctggctcccattcagagcacagagaaacccacaaaaggggcctgtggctctggttccaggtctcaagggtacagcttggttacatccccaggccccaggctgattctcctgccatcatactgcaagccttcctgtaccactttgacccaggttgaggtctggcggaaaataacctcaaaggcaattaatacaaaaagcttcctgtaagctaagaggggttatcaactatatgtacttatttttccagagattgaagagagaagagaacgagccaaggcttggttttgttttatgttggtggcacatgtagacactttggcataacgaaccccatagagcctgcagcccaatccactctgttttggtttagaatgaagttttttttttaattatttttcttggaagtagggaggatttgaaagcttgaaaatcaagaatcaaaagacagtgaatctagaaggcatctgggagcagaacagagattgaagacgggtgggcacaggagaaagcgccaccatcgatcccggctgctgccctggaaatgtgattttcttaatagctgagttcatggttgcttgaggtcaggcctggctattcatttccagcgatgtctgaccagaga

SEQ ID NO: 475029 - DNA, 1000 bp, Homo Sapiens
tttttttttttttttccataataacaagtttattctcatacaatctctagcttctcaacagtggcgcctggaaaggggaggtgaagctgcatgcgggcggctccgggtgggcggctctggcacgtggtggttaccggctctgctcgatgtatgtggagatgtcgatttcctctggaagttctgccacattaacttcaaaccggtcctggacgtcattgaggattttggcatcattctcgtcagacacaaaagtgatggctaggcctttggtgccaaagcgacccgcccgggccacccggtgcaggtaggtgtccgagtcctcaggcatgtcgtagttaaagacgatgttgactcgctcgatgtccatcccccggccaaacagattggtggccaccaggatccgccgctggaaatccttgaactgctgatagcgtgacaggctggggtgcaggagaaacaagtggaggccgtcagacactgggctcctggtggtgctccctgcagccttggcgggcggctcgcactcaccgctcctcctgggccatgccccggtggatggcgatggccgggaagttctgctccacgaggagctgggccagggccatgcagcgctgcactgacttgacgaagattatcacctggttaaactccagcacatccaagagatcaaagagcttgcggttcttctcactgtctttgagtttgacgtagtactgctgcaggccgtgcagcgtgagcttggtctcgtcgtccacaaacacctccatgggctgtgtgggaagggaggtgggaggggcgggcagggatcacctctgggcatctcgcctgcccagaaccttccagtgggcgactcctttgtgcgacacttcccagaggacctgctgcaccagacctcagtaaacatcgctcaaaagctggatgtaagctctggcccgactcaggtgtggaccaagcttgactcccagtttgacaagaccgaggggaggaaaggaggctccgc

SEQ ID NO: 475030 - DNA, 1000 bp, Homo Sapiens
gtgcccggcctacttcactttcttcatttaaaaaagaaatggggataatagtacctatctcatagaattattgtaagaagtgcatgcagtaatgcatgtaagtaggtgctcagaagagtcggacacgaagtaagtgcttttatcatccttatcataattttcattatcagaacaaggagagaccaggtagaaaattattgtgattcttcaggtctggaatactagagtagcatcccaaatgaaggcaccattaaactttgcaaatctgtatgacaccttcatgccaattagaaaaaacacctcttcacaacccctttcaagatatttgcctcctacctgctaaaaacacccatcatactacccacagatagccatgatgctttttctgggacaggtgcctcttccattcgtgcagtgtacagccttcatagctgtgcaactcacatcacaatcagatggaagaatccccaaggcttggtgacagatgagttactgggtaacacagagagaggattcaaaggaaaagttgaacgggtccagaaaatgcatagatacatgtgtaaaaatctggtaaggttatgactagccacgtcccagggttcaaagcttttctcagatgttaaaatgaatcatgtaagtcccccaaatttaaggagtcctcttccaaaaataggaaatgaaatgacataggtgtatgtctctgaggtgacggaggaaatgaaggaagcctctagatgcagcttgaggttcatgagagacagttccaggggagaggtcacagctagggatcaccggcatgcaggaactcagaaacctaaatggggaaatctttttgaggaaatgaacagagaaggctaaaatcaaggagttcgtcaggcaatttctatgtttaggttcaactctctcctgaaacatgaagagctcataaatgcactccctctttgagtctctagttttgtctccttcccacagtgagtctgcaggctgcgtgtcactcacg

SEQ ID NO: 475031 - DNA, 1000 bp, Homo Sapiens
taatgcctaaagaagaaacttctgagctgtatatggtatcctgaagcacctgcccttcaagacagaatgcttgtaccacatttatgcagccaagtgcatgtagtaacataaagtaaacacatgccatctggatatatatattaagactcttttgacggctgggcagggtggctcacacctgtaatctcagcactttgggggtacagccaaggttatccagccctggtaggtcccatccccattgggcaatacgtctttaggttcgaactccttggcatccattggctgcttatccttcagccacttcatggtgatgttctgggggtagtagttcaaggcccgacaccgtagagtggtcactgaagaggtcacatgatgtgtcaccttcaccaaaggaggcacttgttggtccaaaacacctctccccagctccagcaactgctgcagctgtgcagggcagtccctctccaggtaggccctgttctgcctggcccgaatcttgtgcctttcccactccagcttggtgggccaggccctgggttctgctgctctccaatccagtgtgtcagggcagaattcaaggtggtcctgcccatcatacccgtacttccagtagccctcggtactgttgtcttcttgcatttcacagcccaggatgacctgcagggtgtgggactccttgctgtggttgtgattttccataatagtccagaagtcaacagtgaacatgtgatcccaccctttcagactctgactcagctgcagccacatctggcttgaaattctactggaaacccatggagttcggggctccacacggcgactctcatgatcatagaacacgaacagctggtcatccacgtagcccaaagcttcaaacaaggaaagaccaaggtcctgctctgaggcacccatgaagaggtagtgcagagagtgtgaacgcagcaagcgcccctgcaggaccgcggtctgcaaaagcatcaggaggagaagcgccggc

SEQ ID NO: 475032 - DNA, 1000 bp, Homo Sapiens
ttttttttttttttttttttttttttttttacaaaggagtcatttattaaaaacaaaaccccagaaacccctcagcaggaattgatgacaacaacagaggaatccaacaccctgactgcttcagactctgttgacaacaggatgggtgccccctgtgagctcgatccacagtgacttcaagccacagtgacacagcacactaattcattacacaggtcaagacagaggcagccactggggcggggacccttggggagaggctggaactcagggcccttctccagcctttgttgtcaggcatcctcatgccaaccgcaggcttctctttgcctctgaacaatgggcaccttcttaccaggcaggggctgcttaggtaaaggtcagcagacctaacactagttactcccagaaatctgggcttgcagcagagaccacagcacagggccaggctctcaggacacagcagctggttctttccccagttactggaatttagggcccatctcagaggggcatttgacatgtgtccccaacacccggttgtcaccacaggtaaaccaagactataatcacaacagcaaggacaggattgtgttgcttttttcctttttttttttcttaaaggagtgagggcatggaaaatatacagcacaccaatgaaacaaaatgtcaaaaaaaaaaatacaaaaaaatagaaaatagaaaaatgtatttacaagtagtacgttactatgatgagaaagcacaaagacacctgctgctataatacatgcattggctcgagaagaaactacggaacaccctgcgagggagaagcctagaaaagaaagaaagggccaaaaggtttgaactcttcatccctaatttgctacactgatcaaaaccaagtaagggctcctgaagtccatgagtctatcatcaatcagcacaaatgctatactagtttgtaactgcggggtcagttgtgaaggggaaggacagcagcttatccatatacaag

SEQ ID NO: 475033 - DNA, 1000 bp, Homo Sapiens; identical to SEQ ID NO: 160695

SEQ ID NO: 475034 - DNA, 1000 bp, Homo Sapiens
ttagacttctcccttggtgtgctctggaagtttttcagacacaagaaattccctggctgtcactgaatttttcaaatatggatttggggctccttcctcacacagatgatctggtactaaactttgaccagaaaagagaagctgctctttggcttctgggcgggtcccctctggcatcctcgaacgtaggtattgggattttctgggcggaatctcaggtgaaactgggagctcctcaaaacttttccccaggggacaatcaggcctgaaggggcaggtcacatacccattcttttcccctcctaaattgttttcctgacccgttctggcttcatctgtgaaaatttcttgcagaacattcccaaagttcaccaccaacttgtcaatcaccaacttgtcactgggggtggaacatggttttaagatcctgtcttctgtgttcacagagtcatcagactccttcaggtttagcttatccttgaaatcatctccatgccatgtggctatactactttcagcagggttgggaacggtgggccaacacagatgagtcaatttgttgggttttttgagaccatatgccactgtcaggataatgagaataagaaggcctccaccaatcagagaagttatgaggataatctcaaagacactgaatgacaatgtcttgaaatttatgctggtcccgttggttcccccagcactggtgctggccatgacctgaacaatgtaagaggtctttcgtttcagggactccaggccgtactgcaagatgctggaattgactgtcttggagaatccttttccaccttcagcttggtaaaagatggtgtagttgcagatgatcccctttctctcactcttgggaatctctttccatgtgatcgtgaccgtcttcacgccaatgttctccaccttggtctcaggaccttctgatggaacgccttctttggcataagcctggatggaatatggctcgccaactttgtcatgcaacatt

SEQ ID NO: 475035 - DNA, 1000 bp, Homo Sapiens
ttttttttttttttttttttttttttttttttttttggctcattaaaaacaacacaaatttattctcctgcaattctggaggccaggagctcaagatcagtttcaatgggctcaagtcaaggcgtgggcagggctggtttcttttggaggctccaggcaggggaatccattcctttccctttctggcatctgaaggctgcggcattcatggcccctgctcacgtcacacccacgtccacttccatcatcactttgtctctacctctttgaccttctggcctctttcttatgaggacccttgtggtgatattttgggcccacctgaatcagcaagaataacctctctatctcaaagtccttaacttacatacatctgcactgtccctttctgccacagaaggtaacagtcacaggttctgaggattaggacacagatatctttgggggccattattcagcccataacatgtggtaggcaataaataaaggttcattgtattacgataatggtacttcatgataataatgataacatttttctcattatcatcttcatcattcccatgaaagccccagagcatatccctagccccctcctcaactatgtaggagaggaggggacgtttagaaaaccccaactcctagaagccccctgagacttggccccaagcccaacccagagctaggggcaatgctggctgatcaggcagaggcaccagtccccgggttggtcctgatgaggggagcagggggcagacggtcgatgaggcaggagtgtgctcacagcctggggtccaagaaggagcctggagtgcaggctaaggcctgctgatggtgctgtattccgtgggctcctcagggcccctgccggggaggtggctactgaggtggcccatgttgcagtaggtcggttcctgatcctcagcacccaaggtcagagatgcataggaaatgtcctccttcggcaaggaagccatggtgacatattccacttccacct

SEQ ID NO: 475036 - DNA, 1000 bp, Homo Sapiens; identical to SEQ ID NO: 343758

SEQ ID NO: 475037 - DNA, 1000 bp, Homo Sapiens
cagggctccaggctgcaggcctcctggggttccgggcgaggcagcccctggcactgggtgtccaacaggatctcctcaccatcgtcctccccatgggcccgggcacaatacaggatcctccgcacgacccctctcccacagctcacgctgcaggccgccagcttgtactgccaccgagcagggcacgggacagcctggcagacctcccgccggctcccaggcttgcttgccaggccacacagctcttcctggacaggcaccctgagggcagagtccatgcacaggaaacgcagctccatcagacctcgcccgcaggagacggagcacgaccctgccgcaggggtccacacgtgtgcagcttgagcccccgtcctgatgctgccccatggggagggagccttctcccctgcagaggtggcatccagatggccccagcctggaggacatgacatcccgacacagggctcaggggcaggcagcttctcatctacggagccaggcccctcagtcactggagcctccaggccatctgcccctggcacacaggtctcgttctccaaggccaggcctgctccaccagctgatgtgcatgagctgggctctgacacctcccacctggatgtcagcatcttcctggaggggtccccagatgcggatctcctccaggcggggcagccggtcctcggtgagggccactctgtactcgacacgaccatcctccaggagggaggggtaggtggtgttaggggagatgctcatcttcccagccacgacatagcgccctccgatcctcaccgccaagtgtgtgaagagaggcctgtggttggcaatgtagacactggtcaggttgggggtaactgtcagaaatgtgacatattctctcgctctgccagctgtgaaagagcccttccgtgggctgcacgtgctgttgtccccaccacacacctggcacctgtcccatacctgctgggagtccatcctaccatcacagccaaatgtc

SEQ ID NO: 475038 - DNA, 1000 bp, Homo Sapiens; identical to SEQ ID NO: 343759

SEQ ID NO: 475039 - DNA, 1000 bp, Homo Sapiens; identical to SEQ ID NO: 158113

SEQ ID NO: 475040 - DNA, 1000 bp, Homo Sapiens
ccccagtagatcagactacaggcgcctgccaccttgcctggctaattttttgtatttttagtagagacagggtttcactgtgttagccaggatggtctcaatctcctgacccagcagtgacttctaatccatacctcgctccacgaagaagcgacccactgtagccggctgttcttggggcatcgtccaagcacacagccctcctgcagctcaggtctggggagactggtacactggctctcggggagggtttctgcggcagagcccttgcagaggagttcacgcttcctcacccctcgtccacaggtcttggaacactgagaccagggtccaaggctccattgtggagggcaggcatggctgttgcaggcttggacctgagtgggtgtgctcactggacagagagaatgcaacactgcttcctccttttggaagggcttcttttgcacacactggatctttcggctctgctggcctccagcacaggccttgctgcatgtactccattcacctggcatccagtaagccgggcaggagaaagcgttgcagattttgggctcagttactggcttggtttttgcactgcagaatgaggaattgacttgagtattttgatctcgcaagcaaatggcctttacatttatgtaacctccaccacaggagacggagcactctgactgcacgatactccaggtataggcaggtctttttgtggctggtggagttccattcatgaccttgggaagtgcatacttccaagctatccctggatttttgccttgcatcagaatttcaaagaccagcgtctcatttgtgggccctggcgcgtacagacgttccgggcggttgaaagagcgctggtattcaaacgtggtcccagcgaaggggaactccccaggccagtcgatgctccagcccccggtgaggtaatacttttgactgaggcttcgaactgcgaggtaactggaggaaacctgcagctcctggatttcgatgcttc

SEQ ID NO: 475041 - DNA, 1000 bp, Homo Sapiens
agagctagtcaacctcgctcccgcgagaccagtgcacctacctgggaccaggcggacaccagccactgcagcttcttgggcttgtggcagcgctgaagcagacaggcttcatgcatcctgggcttgggctcggaggtgcagacagcgtcgggcagcagctgcgctctggccgaggggttggtgctcttacaggccactgcccgcttcctccaccccttcccacaggtgtgtgagcactctgcccagggcccggcgctccatgcaggtgggcagctctgagagttgcaggcctgcctgctggagggagcaggctgagggcacaggctggccgggactggctccgagtcatagtgcacccgccgtgtgcactgcacggggcggctctgggcacccccgccacacgtccgactgcaggcactccagttccccacggaccagctgggaggacaggcagatactttgcaaggcaccagccccgtgacaggtcgtgtcttgggattgcagaaggacatatttacttgaaacttcaggtctctgtagcagccctctctcacggtcatctgtccccctccgcaggacacggagcactcagagcgcacgatggcccaagtgtagctgggctgggcagggggctgcttctcggtccccaagcgaggcatggagtattcccaggcaacacccgggttccttccctgaaacagcagctccacaatcagtgtctcgttggttggtccagtagcgattaagttctcgggctcattataggaccgtctgtagtcgaaagtagtgcccgaaaatttgtaccggccgggccagtccacggtccagtgcccattcaggtagtaccttctgagggcattgcgcacagaaatgtaggaggtagagacgttcatttcatagatgcggatactccgggctccagaaggaatggtgaccatgtgataatactggttggtgtggtggtgcttggtgtagagacccctgtgaatcgtgcaggctg

SEQ ID NO: 475042 - DNA, 1000 bp, Homo Sapiens
ttttttttttttttttttttttccaagtccacgctcatgttctatgcagttggattcttgtggcagccgggtgggggcgtggccacaaggctggtaggcttgcgggtgggtgggtttcagacctgagtctgagctttgagcgacccttgggactgcgtgtcacgagctcggcggtggctggcgcatcttgtttgcatagaagtccctgcaggtctggcagcagcgctggtaccaccgcatgtcctggcagaggttcttttctcggatgacccggcaatataccgtccactggtctcgtgtgcatttgtaggtcagagcagcaaggcggggggaggtgatggtgttggcgttgatcctgtcgttgcagacctcctggtagcactgtctgtagggggcaggcttcgagagggcggggcactcgctgccgtggcgccctgtgaccttgtgcatgcactgcaccacccgggactgcaggcccttcccgcaggtcgacgagcacgtagaccagtccccagttttccactcgtagcagcctgagtagtcctcgcaggcctcctcggctctcggcctcgtggatgcgtcgcatttcccttgtgagttggtgcacgccacggtccgtttccacacccctttaccacagctggcagagcactgtgaccactcagacgcctcccagatggacaggcagtcctggccttcacagctctgcactgccgccggccgggggcccgggcagtagaggggccgcgtagcgacgtgtgtgccgttctgcagctggtacacgcaggtcacctcccggtgctggaagcctttctcacaggtcgccgagcaggggctccacgggcctgccacccaccgtgactggcaggggtgcaagttgcaccttcggacctggggctctgggcggcttgcttgagggcagtcactgtcgttcaccagagttgtggtcttgttgacaatccgtgtacacgagacgatggttctgcgctcccctccgccg

SEQ ID NO: 475043 - DNA, 1000 bp, Homo Sapiens; identical to SEQ ID NO: 160698

SEQ ID NO: 475044 - DNA, 1000 bp, Homo Sapiens; identical to SEQ ID NO: 343763

SEQ ID NO: 475045 - DNA, 1000 bp, Homo Sapiens
ttttttttttttttttttaaagctatatatttttatttattaaatagatttaattatatgtcttctgaaatacaaaagatagaataaatcatagcataaaagggaataagatatgataacatcatgatggccaattaatacacataaatcgactttttctggacagacaccaaattacttaagaggattaagagataacttcagaagcagcactacctggaagattatttggcatttaaatactgatttccaaagtgctagatgggcaagtccaagcaagcatttgtggtcacatgcacatacatctcaacagttacagatgatgagaaactgtcactagtacaatttgaaacaaattcacctactctaactgctcacctgaaatgatcttgaacaaaatctctagaagtgtggcttgcaatttttttcttcagacatattctgcctcattttatcatctaagcaggcaatcctatcaggtctgaatagggcaaggcattgtgtttcttacatgcagaacatggagtttttctatttggttccatcaactcccaagcatttcaggcccacggaggtgagagttccttcaatgctgacaggtttgctatttctaacctatcatcgacagccttcaaggggtcccgtcgaggcatcaagactgctgtctgtgtctgaggccagcgtctgctcagtggacatggatgaaatgtcattgatcgatgaagactgagaaggagtggcgttgctacttactgctgcatctgaaggctgatcttttacaacaccattcttgcttctttcttcccaatccatgacttctttgtaaattagctctttccattcttcaattgcatgttctctttcttccaactgggcatcataaatttgaggtggtggggcttctgcttcggcggggtcataccaaacagtgatgtatgggtgacgcagagcttcgtctacagagatccgcttgtcaggatcaatcactaacatttttgat

SEQ ID NO: 475046 - DNA, 1000 bp, Homo Sapiens; identical to SEQ ID NO: 160699

SEQ ID NO: 475047 - DNA, 1000 bp, Homo Sapiens; identical to SEQ ID NO: 343764

SEQ ID NO: 475048 - DNA, 1000 bp, Homo Sapiens; identical to SEQ ID NO: 160700

SEQ ID NO: 475049 - DNA, 1000 bp, Homo Sapiens; identical to SEQ ID NO: 343765

SEQ ID NO: 475050 - DNA, 1000 bp, Homo Sapiens
tttttttttttttttttttttttttttttttttttttttttttttttttttttcacaccaagcagagagtttattgaggccatgggcagggcccaggaacacagcacggggcgtgcgtggggtggatgcacgctggactgcaggggtgcgctagcagcggcaagcggaggggtattgggggcccaggagggccccccctcctagcagcgtctaggggcttcaggtgagcatcaagaaccactcctagcctccgcagggctcttttgggaacccctccctgcttccccctgagctccatgtggggtggggctggggcgagggggcccctcttgtccctgtggtcaaggatgggatgatcccttgagattcactataaaaattaaaattcccttataaatcgcaggggagtggcaggagggcatcacttggaagccgacattacctgtccctagagccgcacctcctccacacccccgaagttctgaccccaaagtgaagaatagaggataaggtttgcaggcacagagaggggcagagacaccaggagagagaaaagggagactgggaagggaaggaggaggacaacacagagaaagaacggatctgaggaaaagcaggggcacgggggctccactcccccgcagccccaacagctgcgccctggggaccgaggacgagagttcccagcccgcagacccccacaagcgtaaggtcccatgtccccccaatccagtccttgccaaagccatggtggcctcttgagacatcctcagccccagctgcgcctggagcagacggccaggagacagagcggtgggcaggctactccaggtagatgtcctccgtggggcaggcgtacgccaggtgctcttggtagtactccaggaaggcgcggcccacactctgcgccaccggcctcatggactcctgggagacaaagacgtggcaggcgaagcggctcagcagggggtgtttggtgatgaagccgaaatagcagctg

SEQ ID NO: 475051 - DNA, 1000 bp, Homo Sapiens; identical to SEQ ID NO: 343766

SEQ ID NO: 475052 - DNA, 1000 bp, Homo Sapiens; identical to SEQ ID NO: 343767

SEQ ID NO: 475053 - DNA, 1000 bp, Homo Sapiens; identical to SEQ ID NO: 160703

SEQ ID NO: 475054 - DNA, 1000 bp, Homo Sapiens; identical to SEQ ID NO: 341167

SEQ ID NO: 475055 - DNA, 1000 bp, Homo Sapiens; identical to SEQ ID NO: 343769

SEQ ID NO: 475056 - DNA, 1000 bp, Homo Sapiens
ctgcttagacttagtttatgtccagtttttttaaatcaatcacttaaattctatgcaaatgacaatagcaataaccttccactgaattttcttccactattatgtactattgccttgaacaccatatttaaactattccaggtcataggtgaggacataaagccccttgttcagtatggagttagatttgaagcttcttagtaagctgaagcaaatgaaaaccgaaactgcagaaatacagccctggaagaaccttggtgatctcgccctttcttttcaccagcatttgctaaactgggctgggtggtgacctttctggtaggaggccaaaaggtcacacatttctggctttagcctcactcctgaaactgtaaacaaagactcctcatcaggaagctggtacagctgagatggcagggcgctgaaataatcatgaacaagtgcttcctgggcggagacgcggtctctgggaaagccttttagcatctgggaggccaggtcttcagcttcaggaaccctgcccagcctgttccagacaacatgaaggcttcgaggcgtaggcagtgggaaccattctggattgtagttaggtagcttggagactcccggccaagtatcctctgtagggactcccagcacctcccagattttctccagctgttcaaggatgttggaaaccccaggaaacaaaggttgaccctggaacatttcaataaagatgcagcctgcaccccatatgtccagctcagaggaatattcagtggctcccagcaaagcatcagggggccggtaccagagggtcacgacttctgaagagtatgtctggctgggaatggacttggcccgggcaagaccaaaatcagccagtttgagctctcccaggtgactgatgagtaagttctgaggtttcaggtccctgtgaagaacgtgttggtggtggatgtacgccaggccccgcaaaagttgaaacatgaaaagtctgacattatgaggatgaagc

SEQ ID NO: 475057 - DNA, 1000 bp, Homo Sapiens; identical to SEQ ID NO: 160704

SEQ ID NO: 475058 - DNA, 1000 bp, Homo Sapiens; identical to SEQ ID NO: 160705

SEQ ID NO: 475059 - DNA, 1000 bp, Homo Sapiens; identical to SEQ ID NO: 343772

SEQ ID NO: 475060 - DNA, 885 bp, Homo Sapiens
cccatgattcacctctcttgagtccttaccagactaagacgtcctcaagggccagagaccagcctgccactcaccattttgccaccagacacagatgagaacaattcccattaaaactaacaggatgaatgcccccaggatgatccatctatctggtagactagaagaagaccagtggatatctgaagcatttactggtgacactgtcggttctggcattgcctcccagtgccctaagaattccctgagccagtgatcgcagtctccctttgagagcttcctgaaatacttttccagccctctgtctttcttccatgtctccttgatcttactggcttcatgattaattactgtccaggtcatgttcattgcgtcaaagaggagggatttctctccattggtggcgaactgccaggatgcaccagtgcaccgttctgcttcacgttgacaaaacatctcgacttgcagagtggaaggatcactggtctttatctggggtttgatgtcacaaaggagcatcctgaggtctcgccccacttctcccagcgtttgggtcaattctccccaagtgctggtggcatataccttcttccccaggaggcccagaggtttgaccatgttgttgtcactgttgtactgaaggaaaagatttttattcaagaagacctgcgcttcacaccagggctgtccaggtctggacaatgattttatagtgaagttgaagcaaagagagtgaccaccaaccatgatctccaaggctattagtagcaacagcagaaacaaaagaaggcgcacagggctagaagtcagggatattcttcgcatactgtggagagtaacaggcaggaagctgggcgtgtacacattcaccctcactggtatggt

SEQ ID NO: 475061 - DNA, 1000 bp, Homo Sapiens; identical to SEQ ID NO: 343773

SEQ ID NO: 475062 - DNA, 1000 bp, Homo Sapiens; identical to SEQ ID NO: 160706

SEQ ID NO: 475063 - DNA, 1000 bp, Homo Sapiens; identical to SEQ ID NO: 160707

SEQ ID NO: 475064 - DNA, 1000 bp, Homo Sapiens
ttttttttttttgaacttggaacagagtttattttccatcactgtaaaacattctcagtgaggttactggcattaaaaaggtgggagaaatggaagaaaatggggttgaagaaaaaaaaagcctttgctcttgacagctaggcagccacagcggaggccgccaggctgcgagggcagcgtatgggggcagagcccggttctggcggcacaggccccggagtggagggggcaggggagggtctctgtaggtgggagagggcctgggggctgggaggcagcctggccttgtgccctacaggagggacctcctgggactttatggaagcctgtcttgcctttgacttgcaatgaaaatgcccctcatcattgggagtggggtcgggtgggggtccccagtggccagatcacgtggggtccagagagcagacatctgtagccctgatcttggcggccagtgaccacggccaagcagggcctgtcttttgcctggtacaaggcttgatgagaagagacccctgcccatcctcagtggcctggcagccaggggtgaaccccaggggaagctgggacactgtcccaaaggcccggcgccctactgtgctgcctgagcccgtggcaccgtggggcccaaggtggtgatgatttctctgctcttcccacggggcagacagcaggacacatcctgaggcagctatagttgctccagaggaggcatcagggcctccctggctgcccctggctcaggaacatcccccagggctctgggcctgcctcttgggagtcgagcctgggcgctctgccccttggcacagagcttcatgtgttgcttcctcccagttcgtgatccagctgtgtcttcaggggcctgagccctcccacccgcgggccccttgctggcaggcagctcgggctgggctgtccccttctgaaaggccctgagctgctggagaagctggcttttcccggtacaggtccgtagccccagggaggaaggagatgc

SEQ ID NO: 475065 - DNA, 1000 bp, Homo Sapiens
ttccatttaatattatttttattaaattaactttggagtaaaaagtccaagaaaagccctgtactgaaatcacatgtttactaaatcctggattctctgtacagtccccacatatttctactttaaaattcttctgtcatgtgaaataattcattaaaagaagcaggcagatgatgacaggtaaactttttaatgatgttctaatgttgacaactgcagttttattttgcttggatcataatggcgtgtaagcattttaggccccagaatgcccataagtagagctccatttggagctgtgatcaagatggctaaaaatgctactgtcatcacatccttcgcatatggttccaagtggggtgcggagactcttgctgtttctagagccagaggacctaacacagcctgtactgtagctttgggcatccatgctaaagcaataaatattttctccttaaaactaaaaccagcaaagcacatcaatagatatgtggttaaaattcgaacacataatgccaaacttagagtggcaacagatatgccaacaatatttgattcaagcgatgaaacagatacttctgctccaactaaaccaaaaagaagtggttgaaaaatatcccatacagtcgtaataatcttttggactttcatcttttcttgggaccattttgtccctgcaatgaaactcaacactagtgtgcataatcctccagatccatgtaaaccaatacgttggctgcctaagacggcagaaacacacatagtcaaaacaaggaatcctctcttcaatgtaagttttttctggtcttcacttggaaaatatcgaacaaaaaatcccaaaacaattcctgccagcagactaatacatacgttccttatagaggctatggcgttattaagtataccacctgaggaaaagactatgctcaagcatgtattgaatccagtgatagccagaatgtcatccatactgctagcagccattaataaggttggaatg

SEQ ID NO: 475066 - DNA, 1000 bp, Homo Sapiens
tgcaacgagagtgctctaactttattatccctgtgagaaagtacatagcgtcatgtgaagggggtgcgtgactcgtgcagaatctcccaaaaatagtgagaaaaccagtgtcaaatcctacctctcgacagactctagtgttaacatgtgaccctctgacctgcattcataagacatcttagagacccgaatcccgcttcctgtgtaattcgtagagcgatcccaggctgctcagcaaaaaaagtcacagcacggaggtgccgttgccccggaagcattgcaatcaatagtcagcttgggattcttttctttcacttcctccaacagcttcttgatttccaaattagtttcataggtcttcaacctgagtatcttcaaggatccagttctttgtcttagaaccccaaagagcttaattatgccactcttccacaaatgattctggcccaggtccagagtttcaagcttctgattgctgaggagagcagatccaagatgctgacaatagaaaggcatgagggagcagctccagaggcgtaggtgttttaggttacagtttggattctctaatgcctgacagagaatccacaatccacgagctatctggttgatactcaagtccaggtttgtgaggctgcaggcttcttggagcgcctctgagagatatctacagccaagcttggttatgctgcattgctgtaacaccaaggtctgcagtttacaatcagggtaactcaagccctcacacagaaacttcacccctgtatccccaatggggttcttggccaagcacaggtgtgtcagcttcttgctgacaaccaagacagcagcaaggtccttgcaactggcttctgtaagacgacagttttccaacgacaacatctgcaggaagtgttttgggcgtgtcatggtcttgtacagcaacatggcaccctcatccaggagcacattggctgagagacgcaggtgcttcagggactggttggctttgaggacatag

SEQ ID NO: 475067 - DNA, 1000 bp, Homo Sapiens; identical to SEQ ID NO: 343777

SEQ ID NO: 475068 - DNA, 1000 bp, Homo Sapiens; identical to SEQ ID NO: 343778

SEQ ID NO: 475069 - DNA, 1000 bp, Homo Sapiens; identical to SEQ ID NO: 340081

SEQ ID NO: 475070 - DNA, 1000 bp, Homo Sapiens; identical to SEQ ID NO: 343780

SEQ ID NO: 475071 - DNA, 1000 bp, Homo Sapiens
ttttttttttttttttcacgtctgcaagtcagcgtttattgctcaagcgtattaaacaaaaatgtagactgaaagagacagttcttttaaaccccatttttccggattttttaagcgctctaaaataagaaaataagaaagtgcaagccagcaaaaacgctccaagtgcctaattctgactctgaaacttgagctctctggtctgcccccaagaagacatcagcccgccccgggtcgtccctgtggctcccaccccattcccaggagcagaccccgccagcctcaaagctgcagggaggtgggggtggcctgcagacagggtggggtctgcatccggtaccagtgacagcagcctctcctctcccacggtggcgcttgtttggggctgtggccaaagtgtttgcccggcccctgactgtgtccttccggagctgccgaggactgcagagagggcctggcttgtcccctctaggagcagctgggaaggtgtcttgcctgcatcccccttcaatggttgaaaataatgattccacttgtcatgaacaccatgaaggtatcttggcagccagagtcactcctgttccgcagtgggaaacctgggagggtcctcaaaccccctggcagggtctgcaggccgccccatccagctgcatctcccaggcctcctggttctttgatcttgatggccccaggccacagatgcatctccgggcctttccagcagcccatgggggaccagtcaatacaccccacggcggtgaagagaaaacgttcatgtcttctcagatcagaaggaaagaaacaaaaccattgtgaaggaaaacacctgctggaaagtaattatcaaagtaacagcattccagtttcacagtcgccccaactcactgtggatttactgccgtcagctgggaggacccaggcgccctcgggacgaggagacgcagggaaacccactcctggccatggcactacccaaagccagtgttattctcacacccaa

SEQ ID NO: 475072 - DNA, 1000 bp, Homo Sapiens
ttttttcaacaaaaagttaaggttttatttagaatatcattttagagacaaaaagcagttcactttatttagcaaaataaacttaaccaatgcatttaaatatagtaaattcaagaactttggtggttttttttcttagatgcttgcttttttgccagttggagtttctgtcttctggcccaacaggcttctttccaagttaatgcagctatattccaaggaagtgttttatgaaatctgaatactcaaacaccccttctgtattttcactcaaccatcattgtattagatgatacataaggaaagtgacttagggaagtaagttcagaaggaaatgtgttcccttctccctcatattatcttttcaacagaggcctggattgctaaatggattatgaaagcaaattgctactgggaggtgatggtcaaaagcaaacttagatggttttcacaccatctgtcatcatgactcaaagggaaatgctagccacaccatttttccagtgaagccactgctttacacagaagatacacatagcttcctattgttattttcttttctaattatgtacatttagaaaaaaaatacaacactgtgttaaacagcaggacagctagcaatggaacatacaacactatgctgaaaaaccacaacagcttggttaagcggaggagagaaacagagatggccttcatggagtgaagctgtcaatgcctgccatctccttagtctgtgacggatctgcactctgagggcaggccttctgagcgccgccactttgccaggcgctgcttaaaccatttctgggtctcctcctcggaaaggcctgcctcggccgcgatgaggcacagcgtggtggaatccgggtgcttgtcgaccttgttgaagttgtactccaggatttccacctggtcctctgtggggccgctcgcggtctccgccgacatggtccctgcgcctccggctctaaggaaggagtgaaggaagcgcgggggtgat

SEQ ID NO: 475073 - DNA, 1000 bp, Homo Sapiens
ccacaaaaacaagcagcctttattgcagtattacaaaacacttttcattttggcaatattttacaacgcatttagctccaagggttggggagaaggttggaaactaaagggggaaatctcaacagacatttctagaagaaaaactgtcccagccctcccacccaaataaaaatccaaatgtcacttaatttcactacccaagaagaggccacgaggaaagcagcaggcaaaactctggcaatttcactatggatcatgtcagagacaaaggaacattcaaaacagtcatcagtatggtcggttgcgctgatcatttctgtagtcgtttcttcctcccattttgcctccatagccacctcggtctcctccgtagcccccacctcggtctcctccatagccgccaccactcctgtctcctccatagcctccacttcggtctccaccgtagccactgccaccaccacggtctcctccatagcccccccggcttctgtctcctccatagcctcctcgatctcctccataacctcctcgatctcctccgtaacctcctcgatctcctccatagcctcctcggtctccaccatagcctccacctcggtctcctccatagccacctcgatctcctccatagccacctcctcggtctcctccatagccgcctcctctgtccccaccatagccgccgcctctgtccccaccatagccacccccacttctgtctccaccatagccgcccccacttctatctccgctgtagccaccaccgctgcttctgtctccaccatagccacccccacttctgtctccaccatagccgcctcggtctccacctctgcccccacgacctctgtagcccctctctccaccgtagcctctcccccggaaatctcctcctgagggacgagagtcctctggtctaggctcattgcactgattgcaggaattccttcgagcaaagttcatatttccgcatgacggattagggcaaacccaatcc

SEQ ID NO: 475074 - DNA, 1000 bp, Homo Sapiens; identical to SEQ ID NO: 160710

SEQ ID NO: 475075 - DNA, 1000 bp, Homo Sapiens
acacagcagcaggagtagctgtttaatgcttctgcctacaaaataaagaatcatgggacatgtgagcaagtcatgggatctcagatcatcaggtacaaccagttcactttgcagatgtggaaacataaagggcagacacctcgccctaggccacagagctagttggtgacagcaggatgagaagccaggcctcttggttgcctaacaaagaacgttgcaggcgttccatgctgagtcgatactgcttcttgctgggcagggatccaaattgcaggacttcaggagctgtgggggccggcggctggtcacgcacaggttctcctcagcaggctcccgagtctgtttgttcaagcagctcaccacagcctcctggacacctcctccacaggactcggagcacttggtgaacccctcatactcccagtcatacagctcgtcgaaatcctgcaggccaccaaagagcccatctgtctcgtctgggttgaactcaggaatttccccgctgcatgggcctgcataacaggcacgctgggatgctggcttgggcccttcacactcgtcaataggcaggtcagccacggactgagagaaagacaggagcacctggcacctgactattcgcacctgggtccccacaccacaggtgactgtgcaggccgaccaggcctctgggatgaacgagggctcctctgacacagcagctccttcttctagctcttgagcttgtttgaaccatggcaacttggcctcgactggaagtttctctttgggtttatagcagggagtgggtacgatgcattcctcttttatgtggggctttgtttttgggctacagcctcctgtgtgcattcctcgatggtcgatgcagaggaccacacggtatctgaggccctggccacatgtcactgtgcacggagaccactcctgtgccagccatttagggcagtcaaaaatgttgcagggctgcgcgatgggcatcttaggggtgtacatgcatttc

SEQ ID NO: 475076 - DNA, 1000 bp, Homo Sapiens; identical to SEQ ID NO: 343782

SEQ ID NO: 475077 - DNA, 1000 bp, Homo Sapiens
tttttttttttttttttttttttttttttttttttttttttttttttttttttttttttttttttttttttcattttcataaacagatctttataatcatgtaaattaaacaattttgtctttaggagacgtgagaaagaacatagaggtaagagctagaataccagcaatcttaggaaggcaaaattaaatcatcttttgggagaagagagaaaattgtgaggagaaggtgccagtgtcaaagattggcttggcgaggttattttctctctgggagtctgggaggtgatgagctcctaccgctcactgcctcgttgtcttgcctattggttcctttctgggcaaggaagaacgttgtctctcttttagagttttgtaggcctctgtcagtaatccgtggaagacagctgtcctggggcccagaatgggcagtctgtagtgaatgttttctgttgggatgtcatcatggaaaggctcaggtgtagtctggaatttgggttgatgaagactcattctataactcatacaattctcaaaggatgcttttggatcatctgggattttcattgttcttggttgtaccattttcatttcttgacatgtggagcacagctgttggtttctgagcagcatggagtcacactggttcctcctggccttagataaaacatctggaacttgaaacaaaattggcaaattcatattcttcttggatgaagtcagaaaagtcgcagaggtatgaggatatcttctgggaaggctgagcactaatggcttgtttacaaggctggcctcactaagccaaggaatcttgtcaaattttggaacagaagcctttagttctcttttttccatctttcagatctttagatgttctgagtttttctagctggagactggggaaacctagctcccctcactgtggccagtggaagactgctgtggagaacctgaatccaaagtgttttttgttaggagacgaagtaaacaggccagttta

SEQ ID NO: 475078 - DNA, 1000 bp, Homo Sapiens; identical to SEQ ID NO: 160711

SEQ ID NO: 475079 - DNA, 1000 bp, Homo Sapiens; identical to SEQ ID NO: 343784

SEQ ID NO: 475080 - DNA, 1000 bp, Homo Sapiens; identical to SEQ ID NO: 343785

SEQ ID NO: 475081 - DNA, 1000 bp, Homo Sapiens; identical to SEQ ID NO: 343787

SEQ ID NO: 475082 - DNA, 1000 bp, Homo Sapiens; identical to SEQ ID NO: 343788

SEQ ID NO: 475083 - DNA, 1000 bp, Homo Sapiens; identical to SEQ ID NO: 160712

SEQ ID NO: 475084 - DNA, 1000 bp, Homo Sapiens
ttcaacttttgctcattttatttatactttttcaaagggtatcagttttgggaaaatttatataccttaaatacaaatttggtttttggcttttttttttttttttaaagtagtaaaatgctgataggcagtaacacggggatctcaacaagttcagctgtgatggcgatagcaattacaatggaaaagtaaaatacaagcatcttcaacaggccccagccaggagcaaggctggcttgaggtttgtaaacatgtcactcttctgtgttcacttacacttcagacacagaaatcaactcagtcttgatatatccagttcctttagggccatcaagttccattggctctggtgcttcctttggcctggagtaatactttccaaaggcatggtctttgtcaatatttggatacagatacttcaggggattctcaggaatattctcagcagccatgactttgtaattgcgaatgatgtcagggaaagtaacagcagaaagttctttcttcgtgtagggttcaaccgcatggaagtcaggttcgcctccgttctgggaccgctccacccatgtgaatgtgatggccccttcccgggagctctcactgaaccgcagcaggaaggtccccggctgctggtccttcaacagggcacgctctcgctccttgctgatgaagcccatgatgcacccatcattccagagagggagcaggtgttttttaatgagttctaggatgctttcaatccaaagccagaagggaaaatttttatcatttatattttccttacaaaacctcgtccacggaatgagaccatcggggctggcgttaggaccaagaagcttctctcccaacatgttcagctggtccacattgagacctcttttggtgacagaagaaaactgccaactcagcacttctgaaagctgagcccatcgtgcacatggtggagtcaggaagaaggacagattcctgggttccgccaccagcatgttgtaccaaagga

SEQ ID NO: 475085 - DNA, 1000 bp, Homo Sapiens
tttttttttttttttttttttttgtaccaatctttatgtatttattcacacatttgataaaaatgtcacagttaggagtgaaatcattacaatgacatgagtaactgtacagacagaccccaagtgcagaatcaaattgccctaagtcagaacatggagcaaccgcaactccttcgcacttgtgcatgtgtgtgcgctcgcagacgcacacacacacacacatattctctctctctcttatgcacacatccatccacatcccaacaattgcaggtgctaagtttggacataacccagggactcttccctgacttctgtcaggtcctggaaagaagaagtaataaatgaaaagcagctgggactgctcgatgcatctctcctcttccaacaatgacgcggagaaggcaagacatacactggggcagctacttccttggcacaaaaatgaacaggcaacaagaaggtcaaggaagtgtttaagttagtctcaggtttaaaccacttttcaacaccacaaaacagtagcaagcaggaaaacaaaaacaaaaacaaaaacaaaaactctggccctcaagactccagaaaaaagggaaggaggaggatttaaaacttgatccctattattctaacaaattgcagcatgaccataagcaaaaccagctcggtcaaactgacagcatcagattgtgaccttatctgaacagtgtagttcacttttattttggctctgaagagaggaagaaaaactttttagaggaacttaatggtaacataaaccaaatctccactgtattagtatttgagacaagattacatctatgcattcacacagcttgtctgtagatctgagagctccaagggagtggcccagcccccattcctctgactttagccttctgaaaagaacaagtcaaacctgaaatatgaaaaataatacctgaatcaaaatggtgttttctatacaatcggactagggtagaatcctgctcaattcctcaac

SEQ ID NO: 475086 - DNA, 1000 bp, Homo Sapiens; identical to SEQ ID NO: 158189

SEQ ID NO: 475087 - DNA, 1000 bp, Homo Sapiens; identical to SEQ ID NO: 468260

SEQ ID NO: 475088 - DNA, 1000 bp, Homo Sapiens
tttttttttttttttttttttatggggcgggaactttttatttgaagcaagttaatcatagcattgccccccagtaccctggtatcctgctacaaggagcatcacaccatttgggcacatggtgtgccctctccactagcctggcatctcagcagacagcagagggcagcagaagctcagctagtggggcccctcccaccagcccccacccggtccactgaaaggcagtgctcctgggggcctctgtggactggtggggccagggctgcaacacgccctcaggccaagctccactctgggcaccctcgcaggtaactcaggtgcttgcagctcggccagctctctaatccacccaaggagcccgcccagctcaagggccacatcccaaagacagggtgaaccaggggacagtccaagcctgagaaagcgacagctacaggaaggaaggcagaaaggctttcagatgaggggaggtcttctgtccatgggtgagctgggattcacggccatgaaggaaacgccaaggagaacagagacagacacccctggcagctccccgggattgcttctgctgctgttgttattgcttcgggcagaggggctttgcccccaggaggccaagcaggccctcagaagctggcaccaccattctcatccttatcagttccggggggggcacgctgggggtgagcagagggggccccctccaagcagagaggcaaggtaacaggagagcctggtaggcagtgctgaatctgcttgtatgcacacgtgccctgacatgtttatagatggacaccgggtgcagtcggggcgtgtgagtgtgtaatgagtgtgtccgtccgcgtccatgtgagcatgcagacggggtggggcaggggtgagtggccccggggaagcatgacagatatggctgtgggctacagcggggagcaagagcaggtaaacaatgcctggagcaccaacaggaaagaccagaggggcagaaggagaagcacaa

SEQ ID NO: 475089 - DNA, 1000 bp, Homo Sapiens; identical to SEQ ID NO: 343791

SEQ ID NO: 475090 - DNA, 1000 bp, Homo Sapiens; identical to SEQ ID NO: 343793

SEQ ID NO: 475091 - DNA, 1000 bp, Homo Sapiens; identical to SEQ ID NO: 343794

SEQ ID NO: 475092 - DNA, 885 bp, Homo Sapiens; identical to SEQ ID NO: 343795

SEQ ID NO: 475093 - DNA, 1000 bp, Homo Sapiens
ttttttttttttttttttttttttattatttttttttattttatttcccagtttgttgacacctcttacattcacaggcaactgctcaagtgtattgggaaatacagttgtgtattgtgcagttgactggcctgatggtgggggtgctctggctgggatggaatgctgctaggggggctaagatgaagaggagtcaaggatcagctcacaggttagcgagcagccagtccagcaactgtttcctggccacctttcccacagcttcatctggttgccgttccttggcaaacttcatgacctcttgaagaagacctcctacactgtaccccttctctgctgctttagctgaaacctgaggaagcttttccagttgtccatccttatctcccatgaagtagagcatgggcacgttaaactgggaggctgcaatccactgcaggacagcctggagctgcttctgcaagctatttgtagagcactgattattgacaattacttcatgtccaagagagtcttgatagttctgtggcattgcaccactgtgaatgcatctggtgcccctgaaattgggcttatttgccgaggctgcttgttcttccaactcagcaagggctgccccatcgttgctatacttagccatgataaggcagagcttcatcacagattctactagtttatctataaattgcccgttcgcttgcttcatcccactggtacagtcaagttcttgatgctcctggcattgttcttccgctttgtcagatctgttggacatggaagctgctttgcttgccctgggctcagaacacttgttctcaccttcgcatggatcctcacatttgaaggggttctcattaagcagtttctgaatcagcattagaacgatgtttgacatatccattttctgggagtccaggtgttggttctccttttgacaggtggatggtccaggggctctgtgagattctagttgtttcactgaaagtgctttggcactttg

SEQ ID NO: 475094 - DNA, 1000 bp, Homo Sapiens
tttttttttttttttttttttttttttttttgttttcaatcctgatagttctttattttttcaaaatatatttgccatgggatgctaatttgcaataggtgtcataatgagaataacccaaactggataaatgtgacaaatgattgacaaagcatttcacacccttcaattacaccacatcaagaatgagttttcaagatatgttttgctcgttcatatgagtcccttagaaggattcttatttcttgttcgatggcagattgggtttctggacttagtttccctgtatcactgtaggtcataactccaagcttttcactcattccaaatttggtaaccatccgctttgctattttagtggcattatcaaaatcactggaagcacctgttgtaatatggtcggttccaaatataagctcctctgccactcttcctcccatactaacatccatttgtgcaagcagctgggctctagtttcattccatctgtcattctcaggtaacagggacacatgtccaagtgttggcccccgtggcatgattgtagctttgttgataggcattgcatcttttgtgtaatatgcaataatggcatgaccagattcatgatatgctgtgatggttttgtttttgttatcaatttccacacttcttctttcaggccccattagaattttgtctttggaaaactccagctccttcatggtaaccatttcttttccatcaacagctgcttttaatgcagcctggttcacaagattctccaactctgctccggaaaagccaacagtacctcgagctataatttctggatcaacggattgatcaaactttattttattgagataccatttcaaaatttctgttcgaccttttacatctggccttggaactgtaacttgcatgtcaaaacgaccaggacgtattaaggcattatctaatgcctctgggaagtttgtggctcctattatgataactccttcattgggtttaaaaccat

SEQ ID NO: 475095 - DNA, 1000 bp, Homo Sapiens; identical to SEQ ID NO: 343796

SEQ ID NO: 475096 - DNA, 1000 bp, Homo Sapiens; identical to SEQ ID NO: 343797

SEQ ID NO: 475097 - DNA, 1000 bp, Homo Sapiens; identical to SEQ ID NO: 343798

SEQ ID NO: 475098 - DNA, 1000 bp, Homo Sapiens; identical to SEQ ID NO: 343799

SEQ ID NO: 475099 - DNA, 1000 bp, Homo Sapiens; identical to SEQ ID NO: 343801

SEQ ID NO: 475100 - DNA, 1000 bp, Homo Sapiens; identical to SEQ ID NO: 343802

SEQ ID NO: 475101 - DNA, 1000 bp, Homo Sapiens
tttttttttttttttttgagagtttttatcattttttttttgtttcattttgttttgaacactaagatttattttcaaacagcacacagaccgtctgcggggcagagccaggctaggctggtgtctgggccccacccacagcagctgccaggaaaagaggacccttgcccgggtggcgcggccgaagcttcaggcaagcatggtggctcggcagcccccagccccgccctgcggccaggcacacatgcgggcacaggcaggggcgccagaaactcaactagaggacacagcagcttcaggaacactggtgaattccgccggacttgccgggacgcggctctttggaaaacgacctaatctttgggagaacgcccctctgcctgggggtctcctcttgatttccctttgctcttcaaaagatgaaaaacgaaaacaaaacaaaaaaaagaaccacacatttttcgggaggaggtgttcttcacacgcccggaggctgcctgggccccgccgtcatgggaccctctcagtgaagttctcggggaagacgccacggcacttctccagctccttgtgctggttccagtcgctctccttcacgcccatgagccagccttcatcctgctcttcagggttctggaaggggatcaccagcaccacatcaccagccttgagctgcagctcgtctgtgtcagtggccgtgtagtcgtgctgggcctgtaccttgaacatgaaacctgggggcaggtccaagcgcccggccccactgccgccctccacggtgccattcacagttgctgggaaggtctccaccacgacagcaggaagagagctggaggctgcttcacttgccgccgtctcccctggctcctgggctccagccgcaggttgggtcccacccgccacctccgaggcctctgctggttgggcaggccccggctcggccgtctggctgggccaggacacagcaaaggtgccctcggcagcgctgggctccccggaa

SEQ ID NO: 475102 - DNA, 1000 bp, Homo Sapiens; identical to SEQ ID NO: 160716

SEQ ID NO: 475103 - DNA, 1000 bp, Homo Sapiens; identical to SEQ ID NO: 160717

SEQ ID NO: 475104 - DNA, 1000 bp, Homo Sapiens
ttttttttttttttttttttagagtccttagaatccgtctttatcgggcgatcatccttcgcaggtctggggtgtccacgggccgcccagagccccctacgtgggccagcccctgctgtgggcaccaggaggatgacttgcccgcctggaccctccttgggcctggtcagtgcccccacgccgcactctccactctctcggtcctctggggccaagggccccaccgggtggggtcagggctcctggcttcggggcgaggtggagccgtcggcgtcctgccctgagacggaggctggggcacctgcactgcgtagctcccgggccagcttctcggccagtttgcggaagggtggccggcgggcgggctctgcctcccagcagctgctcatgaggacgtgcacggggcctggacagccctcggggggttccatgcggtaccccttctccacggcctccgacacctctttcagtgacattttagggtacggagcccgtccatatgagaagacctcccagagcagcaccccaaaactccagacatccgacttgctggtgaacttcccgtgtttgagagcctcgggcgccgtccacttgacgggcagccggcttgagtctagccccttccgctcggctttggccaggccaaagtcgctgaccttggccaccaggtcctctgagaccaggatgttgcgggcggccaggtcgcggtgcacaagcttcttgctctccaggtactccatgccctcggccacgtgcagagaaaactgcaggagctgagcggtgttcacgagggctcgaccccgggtccgcagaaagttcaccaggttgcccttgctcacgtgctccatgacaatgtacagcccctggtgcaggatcacgcccaggagacgcaccaggttctcgtgttgcatcttcgtcatgacggccgtctcgtccaggaaggcctgggctgtcacatcacacttgatattcttcacggccaccttttgccccaggtact

SEQ ID NO: 475105 - DNA, 1000 bp, Homo Sapiens; identical to SEQ ID NO: 343805

SEQ ID NO: 475106 - DNA, 1000 bp, Homo Sapiens; identical to SEQ ID NO: 343806

SEQ ID NO: 475107 - DNA, 1000 bp, Homo Sapiens; identical to SEQ ID NO: 343808

SEQ ID NO: 475108 - DNA, 1000 bp, Homo Sapiens; identical to SEQ ID NO: 160719

SEQ ID NO: 475109 - DNA, 1000 bp, Homo Sapiens; identical to SEQ ID NO: 160719

SEQ ID NO: 475110 - DNA, 456 bp, Homo Sapiens
gaaccagagagttgtgagtttattaagggagatctagtgcttatcctagaatcagcccttgctgcctatgatcttcttgatccagtccaggtagcggcagatgttggtatagacgccaggtttgtcggacctcccacaggggtctgagccccaggatgtgatgccctggagtgcaccatcacacaccagggggcctccagaatcgccctgcccaggctccccccagcaagagcaggaacatccacgtcttggccgcacgaggtcgggggcgtcccatggtgaggtcttccagaatccaggggcggggtcacctactgattcggacccagtggaggaggccccagtacttcagttctctgcctggtacacgattctggagccttttaactgggaatctccacctcctgctcctcctccttctcctcctgcactagagcctggggagcttctgggaac

SEQ ID NO: 475111 - DNA, 1000 bp, Homo Sapiens; identical to SEQ ID NO: 160720

SEQ ID NO: 475112 - DNA, 1000 bp, Homo Sapiens; identical to SEQ ID NO: 343810

SEQ ID NO: 475113 - DNA, 1000 bp, Homo Sapiens; identical to SEQ ID NO: 160721

SEQ ID NO: 475114 - DNA, 1000 bp, Homo Sapiens; identical to SEQ ID NO: 343812

SEQ ID NO: 475115 - DNA, 1000 bp, Homo Sapiens; identical to SEQ ID NO: 343813

SEQ ID NO: 475116 - DNA, 1000 bp, Homo Sapiens; identical to SEQ ID NO: 343814

SEQ ID NO: 475117 - DNA, 1000 bp, Homo Sapiens
tttttttttttttttttttttttccaatctgttttttattttatttttttacacagggtcttgctctgtggtccaggctgaagtgcagtggcatgatcatcactcactacagccacaacctcctggtctcaagtgatcctcctgcctcactcagcctcccgagtagctgggactacaggcatgcaccaccacatccggctaatttagagaagtttttttttgtatagacagggtcgtagtatgttgtctaggctggtctcaaactcctgagctcaagtgatcctcccaccctggcctcccaaagacccaaagactacagacctgagccaccatgcccacctgttttcttgacaggacttgcatatgacaagctctctgcttctcctcacctatgcattgcaagccaggtcagaggcaggttaaacaccttaaggacatgttaggacaagtggcatacaagggaaaaaaacccgttcatttaagttacagaaacagaaaaaaaaaaactggcttattcccacacttactctactcaaagctttgagaagactaattttggcatcctctggctaaatacaaaacaacaaaacaaaacaaggcaaactctttcagcaagagctgtgggggaagggactataagggacacacacaactgacaggcaaaagctctgagcacgtgattgctaagtttaattcaactgttacaccccattctgccttgtaaaaataacaaaacgctcctatcaaaatgacattgtgatgtgagtacaggctttttgttttggtacagctctaaaaaatgttggcaccgaatgcacttaagaaaagtgttaaggcttaatacaaatacagagacgagtcatttctcaatgcagcttagagggtgagaacaggatgctaggtttttaaatcttccaaatacaggcagtccccaacgtacagacatacaggacacctcccaaatgtaaacgacagccacacagcagggcttgcatgcgca

SEQ ID NO: 475118 - DNA, 1000 bp, Homo Sapiens
tttttttttttttttgcttctttgaaaaaagatgtttattaaacaactttaattgtcataaaatgactaaaatgggttttaaaaattaaggctcttctctttctgtggattgccagaacaatgtaaaaataatatcaatcaaccctgctaaacgttttgttcctaaagttaaatttcatagattcctaaacattttatgattaagataaaaaattggactataaatgacaattcatggccatctgtgctgaacacacattgatcaggtgtacaatattctaattgagtagttaagcaaaaaatattccagttaaagcataaattttaatttcagcattttaaagtcattgtttccccacatggtcatgattttcctaaaattgaaatagtctaatacaggagcgctaaccttgggactctatatactcccaggaggatgactgacttggctggcaattagtttgattatatttttttaaatgctctaaggtaaattatcaaatgattcagaattacatggcatgcagtatccaaaattatggctctgatgcattgagatttacattaagaataagaagtgtcattcacattcattgtacaccccacccctcccacgaaaaagaaaaaagtcactacctattcaagttctagatctggtgcagcattaaggattaaaacttaccactttaccaggccttccccatgtgcaaataaatccctcctgacaagcagtgactatacagtcttcaagaaatattagtacagtcagtctctcatgtgctatctttttacatatcagcggctctaacaagggaacatcttccattcgaggacacaggggcgttcccagagttttagcagggtccgttttggttttggtaactagattcagtttgtcactgctcttgctagaaatgtgtcccatgctatgatttcgcttgtgatctttctcgtggtgcctctccttccggtcatgtagtgaaagtgttgcaaatttgct

SEQ ID NO: 475119 - DNA, 1000 bp, Homo Sapiens
tttttttttttatgggaaacatgttttatttttgccatttagctgtgaaatcatcaggatccagacataagatagtgtaattattctgcaaacacccagtggacagctcttgtgtcacccatagcacccgagggtggtcaaagtggctcattctggctcttccaagaaatgaatccaactggtgacaggggactcagagacaacttctcttctcctttcccacagggagacatctcctgcttccttttccagggcaacgtaggctgaatacatcccaaagtgctcagatgagctgcttggtggccacaggcttaactgggcctgggccagccaaggaccgaacccaggctgttgggagacagcttggactctgtttcatgcagggctggtttagatttatcacaaccaccatactgggcagcacagcctcttagaatgagagccagattcttgagtgatcactgggagcttgtcctgagccatgggtctgctttcctctttgcttcagttgtacatgaccaggctcatccactccatttctgtcaggtagagtccttttccatccttagagaggttgcggaaggtctttgccatggcttcaagccgcatcaggaagcagaccaggctggggaagctgaccctgccgacgctgtcgctgtacctgagggtcaccagatgcagcagctcacggctgatgaagatccctctgaggaagtctgtattctctatggccttccacaagtccgagctcaggaggactccagggcttgtctgaaccttctggaaaacatgctggtagtgaacaaggcgcttccacagtcgcgcaaactcctcttggtctagccgcccattcactttcagttccatcagagccaccaagctgcggcactcatctaaggagaacatgtcccctggaggtcctgttagaagctcctggttgagaaggccctgaagctgggtggcatcaatgtccagcctctgctgagcatatctgttgaaa

SEQ ID NO: 475120 - DNA, 1000 bp, Homo Sapiens
ctccacacatatactttatttccacagtcccattttcccatgctgaacctggcgtcttcgccctgacttttcccacacctgtcagcactggggggctcttggggagtaaggagctacagagacagggacacaggatgcgtggagagcctgggagatggagatgaggagagagagccggaaacaggaggtgggggatccacagggggccagggctcagcagacagggaaggggcagatatggagacaagacggacagacactgaccaggaagcccagagaacaggagatcaggagtcagagggaaaagcagtgtcaggagcagagagaaaggaaccgggagacacaggtgaggcggtgatgaagggcagatgaaaacagttgaaggggcaaaaagacagaggcctgccactgggagaaaaagacagagacccacaaggcaaacaggggaagtagagacacaaaaaaagaccccacagagagccagggcagggtgggggctgcgtgcccctcgtgttagccccgggagtctttgctggtggaggagcccgggccagtgctggaggcagggccggtgctggagacgtggtctctgctggacccgaggcctccgctcgaatcagacgctgtgcctccgctctccacaccaccctctgtgttttctccgcccctgctggaccccacgtatccagtggagcccaggtagctgctggcgctgacgggtctgaaggtcacgtggcccccactcgaggcactggtggagccgaaggtcacgtggccagtgttggggtcaccgtgcgtgatgtggctgggcaaatgcccagtgctggagctgaggccgccaaaagtgacgtggccaagagagccacggtctctgctagtcttgtggctcaaaatggacccggggatggcatgggggtgcctggtgggcaccaggacggtactggagccggccctctgggtgctggccaggtccacgctcagggtgccgtccagcttcgcg

SEQ ID NO: 475121 - DNA, 1000 bp, Homo Sapiens
ttttttttttttttttttttttttttaatacacaaaagcaaacaagtttatcttaaaaaataccaagtatcacatccatagcctattcctaattataattacttcttaaagcaacatttgtctttgtttacaaatacagcagcaggtgataaaacctagtatctcaaactgattgcttacaatttataatacaaacatatgtatatgtctcaaatcacattttaggcagtttaacttaaaatgcatagacaattacatacattaaatttgtcattactgtcagtgaaaaatcacaatttcaagaagaaaattacaacaaactcatagagcacacataagaagtcaagttcacttaatggcaacaagtcagtatctgctgatcagtgacaggcagtgaaagtgcctttatccaggggtaaagtgacattttaattagagcagaaataaactactaaatattttatttctaagcaaaacagagctccagcataaatcctgtttgtctgagaaattcacaatacattttagaaatccaatggatacattcaaaatgttatctaataaataacaaggtcaggtctactccaaatctaagaatctgatttaaacataaggtgccaaaaaactaccagggcttttttttttggtggttataaacaatacttgatatttaagcaacacagtcacactgctttaaacttagttgcagagatctacaatttattattattttcagtgttagagctagagggtaattttttcaaagatggcactcaactccacttatttacctgtcaacaaatacagaactgaactgttagccataagcactttacaaacagactcaggaaactatgcagtagacaatgacatagcttaaccagactctgaaaaagagatacatattttgattcacacttgtacaaagagaacagtcatgtctgcatgacttaaggttccctaaacacaactgttttatgttttagacccctggagtgtg

SEQ ID NO: 475122 - DNA, 1000 bp, Homo Sapiens; identical to SEQ ID NO: 343818

SEQ ID NO: 475123 - DNA, 1000 bp, Homo Sapiens; identical to SEQ ID NO: 343820

SEQ ID NO: 475124 - DNA, 1000 bp, Homo Sapiens; identical to SEQ ID NO: 343823

SEQ ID NO: 475125 - DNA, 1000 bp, Homo Sapiens; identical to SEQ ID NO: 343825

SEQ ID NO: 475126 - DNA, 1000 bp, Homo Sapiens; identical to SEQ ID NO: 343827

SEQ ID NO: 475127 - DNA, 785 bp, Homo Sapiens
ttttttttttttttttctgtatcaaaggtttatttggaagcttctgagtatgagggttcttgcattaaatgaggattcaaggggggaggaaaaaagtgtgcttgtcagtttggaaagtcacagggagtttactattctataattagattaggaggaaaatgagaacccactggtagaagaagaagcaacagtcttctagggtctggcatttgatgagataggtattcagttactgtgcatttccattgtttttccatggcagaacatacggcagagatttgggaactcgcatgcctgaagccaggttattcttatgttctgtaactatgttgctcgcagggctgttgttgtcagagtagtgagttgtgccccaggcaaatggggtgctggtctgctcccacaaatctttatcccagtcttcatcgcaaggagggcactgccaagtgctctcagccagagtctcttgtctaaggctcctggtttggttgacaacatcttgctcaatacaacttctgtcatcacagcttgagatatgatgactaatttcagctcgaggaacctggtggcgagcattgaagggacaagtagccaatttgcttgcaacatcaggatgattctttctgcacttgataagatgataaggaaacctgcaagccctgatttgatggtttttgtcataggggcattgcaatagcttctcagggtccagggagtcggtgtaagtttcttccatgttggaaatgaagaagctgaatccaagtgctcggtggacacacccctccgct

SEQ ID NO: 475128 - DNA, 1000 bp, Homo Sapiens; identical to SEQ ID NO: 343828

SEQ ID NO: 475129 - DNA, 1000 bp, Homo Sapiens; identical to SEQ ID NO: 343829

SEQ ID NO: 475130 - DNA, 1000 bp, Homo Sapiens; identical to SEQ ID NO: 160725

SEQ ID NO: 475131 - DNA, 1000 bp, Homo Sapiens; identical to SEQ ID NO: 343831

SEQ ID NO: 475132 - DNA, 1000 bp, Homo Sapiens; identical to SEQ ID NO: 343832

SEQ ID NO: 475133 - DNA, 1000 bp, Homo Sapiens
gttttcaaagcacagcttttcataaaaagcaaggctcacatttaatagatgctctggtacataggtgtgtgttgagagccgctggggactcaggaagcccagcagccccgggatccgccggtggtcagaactcatcatcagaatcgtcatgggcccccctgcagaccttgaaggtccggggggtggtcagctgtcctggggaggccggggccaggttcacccagccgggcccgcggggcagtaggtggctttcattgagtctgatgacgcggtagttctcatagtggatgttgtgggttatgtccttcaggtcttggaggtgggagcggataagcaggtctctcaggagaggaaattcacagtgcgccatgttctccacttcaatgatgccccacttggtcttccggcccaggacacacctcccgttcatcaggtgctcttggtcagcccctaccacggcaaaagggattcggtcccgtaacttgctgttgaggattttgtcattgatgtcctcgtcaaagcacatctgggggtagacgtcgatgcagtgggtcctcaggttctgctggatcctgcgcctgaaggcctctcgctcctccatggtcaggctgtcggccctggcaatcacgggcaccacattcacagtccggcacagccgctgcaggaactcaatgtccaggggccgcaggcagtgcccagtgggtggtacaaagtacacgcagcagtgcacccgggtgtctgggatgtggcgctggcgggtgatgaggatctcctcctgcaggtactgctcgtattgctcgttgatgtagcccaggatggggtcccagcagttgtcattgttgatctggtccccgaagccgggcgtgtccgtcaccgtcagcttcagcttcacacccttctcctctatgacatgggtcagtgaatgcagctgcagcgtctggggtgtgggcacccccaagcccggtgggtttgacttccacactttggacttgaacagcgt

SEQ ID NO: 475134 - DNA, 1000 bp, Homo Sapiens; identical to SEQ ID NO: 343835

SEQ ID NO: 475135 - DNA, 1000 bp, Homo Sapiens; identical to SEQ ID NO: 160727

SEQ ID NO: 475136 - DNA, 1000 bp, Homo Sapiens
cccatttggtcccaccaaggccatttaatttctctgtaaagggtaagatgacacaaaagagccaactatggaaacggtgaggtgggagtctgaaccgatttagctgttctcagggcgcacagggtgttgacggtggttttcatctgccacctgcctccttgagacccagctggcctgagtgtgcacgaaatgggaccttctccttgggtccaccaggctgggaggcacccctaggtacccggctcctcatcacagcggcagccctctcggttccacatctggttctcctgacgaagccgctggttttcggtccggagcctctggacctcggcagccagctcctccacctggcggcaggactgctggccggtgcacgcctgcagctgctgcagcctcctagtctcctcctccgcctgcgacagccgcttctccagctccaggtagtctcgcaccagctcctgcttgctgcggccctgcaggctctcggtgtggaagcgttcgtaagtctcagagaagtccttccgctggaactcaccgtgcgctcggccccgcccatcactgtccccggcctcactctccccactggaacctgggtgggagatcccatggggcacatccaagttgggctcctccgggtccctgtcattcatcaggaactgggtggtgttgtagggggccacgggctggcctttggcgaacatctcttcgcggacccgggaggccctctggctctgcctctcatcccgctgttgtttctcagcccagctcagctccaggtagggtcgccagtgccttttgcgcttcgatggccgccgacggtgtttcttccgggccagcacagcctccgctgagcagccccctgggctctgggtccggggactcctactgttccagcccaggccaccgacagccccagcaagatcttcatcctctgagtggctctccatccgcggtgtcaggggcagggaaccaccagagtcatgacgctcagggggtgttt

SEQ ID NO: 475137 - DNA, 1000 bp, Homo Sapiens; identical to SEQ ID NO: 343837

SEQ ID NO: 475138 - DNA, 1000 bp, Homo Sapiens; identical to SEQ ID NO: 343838

SEQ ID NO: 475139 - DNA, 1000 bp, Homo Sapiens
tttttttttttttttttttttttttttttttttttttttttttttttttttttttttttttttaagtttgaagccttgcccaagctttaatgtcatgctaaccagttaccttgttagagctgggaagccaccttttgctcaaaatgcagacttctgcctttgaaaacacaccacacctgattttaagtgcttaaaggacagaaaatgtcgttgctttaaattgttgctttgttcagagacatctggatttgctgtatccatacaagcaaaagcttttccaattccagaatcaacccacactaatttgttattgcctcgtactgtattggcccagctgtaatcaactcagcaggcttttggttgtaaattcaagtggaaattgagttggtcttatttgtgcccgttgatatctgagggctgtgaggaagatggccagtaggtcaaagggaatagtgttgaaaagctgaccagtactgggcaggtggccggctgtccctcaggcaccacaacgccgagccacggtaaggggcatgagccacatttgcagaatatagccagagtccttccagaacctcctgattcgcgccaggaggcatcccagggcacacaagtgtcaagggcctactcaggtgcttggcagagctctctgtgtgttattaacagaagaggctacggcttagagtggaaaggagcatgtgatggctagcggtgggcagcctgtgtactctgccaagtttgggtggtccaggtccccacgatttctgtgtggagggttgtccggcatctggccactaggggggccggtggttctcacacacacgcagcggggctccttagcacctggcttatacagcttcctggggacgccaatccagtctctgctcacacctccactcttctgggagcaccagagccggctgcccctggctgagctccactccgcgttgcacggcgggaatgtctgcttctcttgcagctgtagtttgttggcctccaagcc

SEQ ID NO: 475140 - DNA, 1000 bp, Homo Sapiens
atgggctgggttcatgtaatgatcctctacagtgacatttgtgctttaacaaggtccattgacaagccagaggaaccaggggaaggggtgggtggtggctggaaggaagagtgagggtctagacattttaccctctccaggaaccactccggccgactgcccaggccatcaatccggatccgcatcttggtgaatggagcaatgtctaggatctccatgatgaaggtgtcgttctgctcccgctcaaacctggctttccttttgtccagctgcatctcctctgtgctcccgttgatgccgtagagggtcatgaagatgttggagtcagtgcccccgccaaccacatcccctgtccacaccgtcatttcatagagaacctctattttcttgatgatgcccacatccaagcctgcgacgtagaactcctccacagagccacggctgaagcccctcttccctcgggggtagtccaaccagatgcgcttactacgttcatcatcctccccgatgagaaagatgaaggctcggctgtcagtggccgcgtccttgtgcttcccagtggtgactgacacatagtagggaataattgggccctcttgaacgtagtcagccatgggcccggtcactgtgctgatgtcgacatcggccatcttggagctcagggcgatctcccagaagtcagcagggctgctgcagttgctgctgcggtccccagtgtactccttctcgtaaaagagcctctcgagtctcccatcctccttcttcagggagagccagcgcccgcataggaacaggaactcgtcctcgttggtgtcattccagatctccaccttctccacgtaccagtctgcgcaccacttggagttgtcatggcggagcttgatcttgtagatgacgcctaggtcagcggcctcgatgatgaaggtgtcagccgttcctctctcgaacttgttggtccggttctctgacttgccaaggtatcgctccccagtgtccccga

SEQ ID NO: 475141 - DNA, 1000 bp, Homo Sapiens; identical to SEQ ID NO: 343839

SEQ ID NO: 475142 - DNA, 1000 bp, Homo Sapiens
tttttttttttttttttttcttcacaagcctttattaggttcttgggggaaagtgggagcgagatccatcattacagaaatgaggacggggtctcaggatggggctgacaggctcccaatcctcctgctttttgttttttttgagacggagtctcactctgtcgcccaggctggagtgcagtggcgcaatctcggctcactgcaacctccgcctcccaggttcaagccaggctggtctcaaacccctgacctcaagtgttccacccgcctcggcttcccaaactgctgggattacaggcgtgagccaccgtgtctggcctcgatccccccttttttgtgtgtacctatgggtggggtcctgttgaggtctcctgggatctctcactcctctcccactttggggaacccttttggcctcggctgctgggtggggcttggtctaggagagaccctgaccatagagacggggtggccgggcctggggctggggcagggtctcgggctggggcagggtcttgacgccaggtgcggctggcggggggccggttgcgggaaggaggttgaataaatgctctggcccctctggtccttcccctctccagagcagtcctcactcttctttgggggcccccggggccggtataggacgttgctgtagaatgcatttcctgggctgttacctgagtccctttgctggcagctgcggcggccccagaaccaggcaccccacacgatcgcagccacacccatgcttcccacccccagcagcacgaagaggaatcctgggaagcttgcgatccggtttctgttctgtgtggggtcatctgggtccacaaagagccttgttatgttgccctcagcctcctccaactcaggaatctctacggccgcccagcacacgtacgccccgctgtggttgaggctcacagggtccagctgcagggtgagatggctgggtgcctgccaggagagccgtccctggggcccgcagacccccagg

SEQ ID NO: 475143 - DNA, 1000 bp, Homo Sapiens; identical to SEQ ID NO: 343841

SEQ ID NO: 475144 - DNA, 1000 bp, Homo Sapiens
gtgtccacttttggtttatttggggggtgggtgggaaggatcaggaagagagggaggtgagagagggactgagggttctgaagctggagtgggggctcctttagtggcggaggatgtctcaggtggtctgtggggctcagggctggtgagaatgctgacaggctgatgggcttcaggtaagggctgctgcccgtgcttcctctgctgaggccccttctcctcatccaggtcactggactcggaagtggactccattgagaggctcctgccgagcacttcttggagctgttgctgcaataaccatgcctgctcagggtccttcctttgagctgcagccagccatagctgagggccctcctcatcgctggagtccagctccaggtccaggtccccctggtaggagaggggagatgcacacacggagcaggtattgtccaggaggcggaagcaagtgaggcagtagagacctggatgaaccatccttgtcaaggggtgcacactagggagctgctgcaatgccacttgcatataaatccttggcagccgggggtactgcaggacacagtgttctccatgtctccctcatcctggggctgcccacagcccaggcagtaggcctgatgcagccaaaagtggctgacaaatggacctaggcaggggcaccgactggccagcactaggaaggcacttctgtggccctggtcagccgcccgccgcctcactgatcggtgcagggcagccaacagattggttcggcggctcagaagtacattgtacaggtaggagatcctctcctgctcccgggatgggtagtaggaggcacagatgactcgccgcagccggctgacatagctgccaaacagggtgatgaagaagcataggccatacatgacgccaatgactatgtagccagtgctgtcaggctccgagggacgaaggagacaacgccgggacaaaatactgatgttgccttgctgcaggacatcaaatgctgacacca

SEQ ID NO: 475145 - DNA, 1000 bp, Homo Sapiens
cgggttatagcagagcatattgaactcgagattctcatcccagtgccgcagaagcacaaacagctggcgggcagcggccttgagtgtgccctgcgtgcggccctcgggtacttcctgctgctccagccatgagttggccttggcagccaccaactcccactcagtgaagtaggaggccgaactgtgctccagccatgccagccccaccaccgtggcccacagcttcccagtgtgctccaccactgccctcggctccaggcccagcttgcccttggccagaggctccagggagaagctgtcacaggacgggtgcctaggcggggagctggtgcacagctggggactcggggtcttggactcagacgggcgggtggtgagggacactcgatggcaggtgaagggggacgtccacttgagcttctccatggggatgtgcgtggcctcacagaaggcttcgttgagcaggaaggctccggaggccagctgcagagacaccagaggtatgtagtcgaagctctggttcccggaggtcgactccacagctttgatcagtggcttgctcaggaagcccttggctgctcgcgtcagtagcctggacttgttgagatttagccaggatccaaagagattctctgaggccttcatggaagaaagagtatttgtagccaggctgcgctggggaccttcagaagcaccgtgcttctcgcggccgggggacctggcctcgctgaagagagcagtgggacttgcctccatgtcagcaatttcctgaagactggaagttcagcttggctcaggggtggagctggttctcctgggttttggaggccaatgggaccaagaagttgagagaacactttgattctgaagagctcctctgggtttccaccccctcacactgtgttctgtttctgtttttgttttaaaacccatcaatgtctgtgagcactttctaggaccatttcctggtgccgaatcttctccaagcatcgtctgcggc

SEQ ID NO: 475146 - DNA, 1000 bp, Homo Sapiens; identical to SEQ ID NO: 160728

SEQ ID NO: 475147 - DNA, 1000 bp, Homo Sapiens
ttttttttttttttttttttttttttatgtttaccagtttattacaaacattattagaaaaggatacaaataagtaaacagccagatgaagatacacacagggtgaggtctggacgggtcctgggcaaatgctggagcttctgtccccatggagtgggggtgcgccaccctcttggcacatggacaagttctcgttcccctccctccacatgttcagctcttcagaagctcccgtgttcctgggccttttatggagacgtcattggataggcatggctgaagcatggcagctgtgttgagatgaaactggacaaaaagcataaggtctaaacccagcaaggcctgtctgtccagatgcttcttggcctctctgtgcagcgttcctccttccgggtatggggcagcaccctctctggaatgagggtcttatgagctacagtcagattaaagtctggtgttgagcaagtgaaatggggcaggagaaggtcacagacagagattccgttttctgaggcagggaagctgtcccagaaggactgagtgatgcctcttgttccctaaggtctggagagtctttgcaagtttccaacgacatttccaaccaggtgggagagaccagcagttgacgagtcaagtcagacccaaaaaacgacgccaaggtagtgagtgggtgccttaatgtgatgtaagaggaaggtcttctctggctttcagggaaacagctgcagctgaaacttaggggcccattccagggcacttttcaccacagccagtgcagccgctccaagtgccactgtcagccccatcactgccaatttcacaaagcggttggtccttggcttggtcaggacatcttttgttcgatcttcaggccgcagaagtccccgaaaccgctgccgcagcaccatatcaggcctctgctgggctgatgccagctcaaagtctttgaaagtagaggctgccgtcctctcagcttgctgttgggcagcggcctcccgag

SEQ ID NO: 475148 - DNA, 1000 bp, Homo Sapiens; identical to SEQ ID NO: 343844

SEQ ID NO: 475149 - DNA, 1000 bp, Homo Sapiens
tttttttttttttttgttagtgtttcctttattataaagcactgaaataagttaaataaacaggtgggaggctgggcagtcccccagccggtttgtccacagcccctgggggcagtggaggtgaatacagggcccttctcactgagctcgtgaagtgcctcagtcaaggcaaggtcccctggtccatatgggcccccccgcccatggggttgggctggtccttatagtgcctacgttagtctgtgtggagcccctggccagcgggggagaaaaaggtggcttctggtccgtctgtataaaacatggggaagaaggacctagttcaggatgagtctgtgtggacagcccggctgccagcagtccccagggctggtgggccccgagagctcaaaacagagggtgggctatgaggtggggcccagccctcagaggcagagagaccaggccctcctgccccaccgtggccatgcaccttctggtggcgcttgtagttgtcccagtggcccgtggtataggcgcaggtggcacagcggaagggcttctcgcctgtgtgccgcagcatgtgacgtttgaggttcatgctctggttgcagctgtagttgcaaaggctacaccgaaaaggtttgtcaccagagtggatgcgaccatgacgcttgaggttggccagattgccacaggcataagggcagagggggcacttgtagggcttctctcctgtatggacgcgctggtgccgtttcaggttatccagatgagcagaggcataaggacagcgggcgcagcggaagggcttctcaccactgtgtgtcttcatgtgccgggccaggtggttgggatagtgagtggcaaaggggcagaggctacaggcaaagcctttgtcactggggccctggggccccccactggcaccccctccagcctctcctcgcatgcagcgcccacacatggcagctcccagccgactaccctcaccctcctccagctcttgtccacagccccg

SEQ ID NO: 475150 - DNA, 1000 bp, Homo Sapiens; identical to SEQ ID NO: 160729

SEQ ID NO: 475151 - DNA, 1000 bp, Homo Sapiens
tttttttttttttttttttttttttttttttttttttttttttgtgtgtttagatacttttaatgatacaattctcagattattttttgtggtggaaaataaagagaactccagaatgtgaacccaatatatcttcccaaaatgtccaagacaattagactgtaactgttctaaaacataaaataagactttagtgaaggtgcttaaatcattgccaatcccagcatctgaatttgcctgttagtgtgagatgtagggagcattatggattctagactgtgtcagcatcctaactgtgtaatctctgaggcttcccctgagatttattaaaaataggaatggaaacaactgcgctgtatagcattgttgggagccttaaagaaaaaaggtaaagtgctgacccattgcaagctggtattactcccacaagttatagctcagaagtcttggctccatttggggatttccactagtctactacctcttgtaaaagaaaagcactgggaaaggacacacccaggttttctccctcactttgagccccaaattgccctatgtccacagacccattttggattcttgagcaacaaaatacgatacctagaggagagacatttctgctggcacaacgaccttaaatcatgtcattgacatgagttggcagagcctagatggagcctctctatccccatgccaaagctcatgtagttgacactcagtccatgtttttatttcattaacaaaatatgacttcacttttcttttataatccagaagcatgagaatacatttgttgcaaactgcatgcagaaaaaatgggggattcctttggaaactacatcctcttagtaataaataatttttgatctactatacacaacagtagtgcatttcttgttaaaacagcaagctttttttttaccaaaatgaaaagaaaacattcatttctttataaatatttaaatagtttaaatacatatttcataccaaggatataaaa

SEQ ID NO: 475152 - DNA, 886 bp, Homo Sapiens; identical to SEQ ID NO: 343846

SEQ ID NO: 475153 - DNA, 1000 bp, Homo Sapiens
ttttagagatttacaaagatttttatattaatttaataaaacaaattcttaaatagaacaaaataaacacctaatgagccacttatatatagaatgcttgtgcccgttggctctcgttcttaccttgggccctcttacctgccaaagcctacaaggcccttaattctaaagccacccacccttcccacaaccataaaaacgtacagtccagtgaccttggaatgcaggatctgccagaggcctccactacgtgggcattaacaccctggctggggcggggccctgtactgtagccttggcctttcattcagacagaaaggctctaccttctttcctccccaagaagagacactccctcatgactgtcactcactggcacaattcctgcctctcagcaggcatcagctgacaactcccggccacccctgtggccctcttgtggccctctctagaagaacatgaagtcccagctctgtggcaaccagagccatcctttcttccacctcccgctcagagagctctgcgtgaatgggcagcccggctggctgtgaggcgccagcacactgcccgcacatcctaggaggggttgggaaagggcccaggccccattagggggccaggaaaagggtggagggtacatgctttcatcattccaaagcctcccagagaagagaagatccgactgaaaaaacagaccaaaaaccttctgtctttaggaaaaaagaggaagatttagagacgatggagaggtgaatgaagcacagcacgagcccagctgggcaggggcccttgagggacggctcaacccataggctccgggagggcaggagccagcccctccaggtgggggtgattctatcaagcactgcacatggactcggaagtgagaagaaaagcagagaagagagaggcatggggagggtggggggttgctgggccccctcccaccccaccctcacacagcccagtcacaacccccttagtggttcacattatccga

SEQ ID NO: 475154 - DNA, 1000 bp, Homo Sapiens
ttttttttttttttttgagaggcaggcaagagtatttaatgggcattgagggtcttggcagtcccaccaggggagtgggcaaagggcaaggcacagaaaggcttccactcagggctcaggaagtgggaggtaaggaggcaggttcaggaggcgggttcaggaggcgggttcggaggtgagctcaggtgctggtgctgtgggcatctccgggtgcacaggggcgagaggaaggccgaacctcgcctgggggctcctgcagcagcaggggcagcactgggcccgtgtggaactggggagcagcaggccagatgcaggggccaccgtcctccctggtccggctcccctgcccgcctcagcttgggaagcacacggcccagggcttagctctgcaggaagctgaggccagcctcatccaggatgcagcagccttgggtcccagtggtgcacaaattgttaaataccagttgctggcacagccctggtcgaaggggttgtatccctgaaggtgtctgcacttgcccttgtaggtgcggtcggccgagctcacggacagtgcctggatcagcagcaggagggacagcggcaccaggaggcccgcggcggacacggccaccacgatggcgatggccttgtcggtggagaagggcaggtgggttgtgcgcaccaggaagatgagacaggtgaccagcatggcgcccgagtagaggcacagggacaggacaagcagcatgaagaagcggaagttgcggtgaccgatgcagttattgacccacttgcagtggtggtcaaagtcctccacacagatgttgcaccaggggcagtggtaagtccggggcgggcggtggaagcagcactttggacaccattgcaggcggaaggccccgtggttcacccacaccacgtgcaccgtcaaggggccctgctcagcggagccttgatgtaagatgccagggtctgagaagttgagtgaaacaagactgaagaaggtaaggacaaagag

SEQ ID NO: 475155 - DNA, 1000 bp, Homo Sapiens; identical to SEQ ID NO: 343848

SEQ ID NO: 475156 - DNA, 1000 bp, Homo Sapiens; identical to SEQ ID NO: 343849

SEQ ID NO: 475157 - DNA, 1000 bp, Homo Sapiens
atttatttaattttgtattttcaacaatgcctggcataggagtttaataaacaaattgaatggaaaagaaatgttctttaacacaattatggaaaagacaccactctatttattattgaaatacatccaatactaggtgattctgtttctttattatggctagagatggtggcatcacttcttcaaagccatttgacaggtgcttttcaaggtttcttgtccatgtttctgataggtttcatagcagagtaataagaatgttgtccagcttgcttcacatgtatttctctatgtgaactgccaccactacctatatttggtaaaacagggacaactcttcctcttttaacttttaaattatatctgcgcccagaggcttgggcaggaaggtgattgagagtaacttctcccactgttggtttcacatcaaaccattctggattcaattttctgcctaattttctttgcaacatatgtaaaaggatgaggaactccgctttaagttcattggtcagcatgttgggattgcttagtaattctgataacctaatgttatctttaatagacttcgaaactgtagacctggaaaccaggggtaaacgcatctggtagctatagtccgtgaaattcacaaagtcatcctggatacttttaatttctcgatgtgttaataaagtgtaaacctcttctatcaatatttcaggcactccagctttacaatgaattgttccatggattagttctttaggtaatttaaatttttttcttgccaggaacttctccaactgtgcccagttatccaacttgacttttaaagaggtcccgttttcaaaggatgataattcaagttcccaggggtaatatatacagaatatttctgcaattaggaagccatttgaaaaatctctgttgatgttcctggggaagaagctgagatccagaccctgaagccaacgcagaacggaacgagacaagcgggagctcttcggcgcatgcggat

SEQ ID NO: 475158 - DNA, 948 bp, Homo Sapiens
ttttttttttttttttgactactcaatgtcttttatttctgcctgttttttggccccagaaaatgcaatattttgacacagaaaaaaacattaggatgagtgtgaaatcaaatacgattctggtttttgagctgacatttagtcatttggagccacatggctgtcccagggcctggtccccaggtcatgtgcttaaagcttccaggcggttctcatcatgatgatgaagtacacatcagtgtcaatggatgcgctcacacctgcatagtagttcatgaactcctcaggggtcaccaatccatctttgtcatagggtgaatcaaagttatccagaaatttcctaaatacttgttcctcactccattccccattctggtactttgggtggtgttttgcattatatacttcacgaaggtcttcgattgttataacaccatctccagtcttgtctaactttctaaaagcttgcatgattacctcttttctggctctggacattggaggtcttaatgtgagaagaaattcattgaagtctattgttccatttccatctttatcaaacctccggaaaagttcttccacctcttctttttccatgaccacagcataatcatttaaccctttcataaattctttaaaatcaagggttcgattattatcgtcatccataattctaaacactctgccaagtcctttgatcccagcagagcccctggccaggcactgcagtcggagtctttcaatggggttggtggccgtggtgagctttttcttggcctggatcgccatctctcggtcatggcgcgctgtccctgccatctgtcttcctcaggggccctggtccactctcttagtattaattggaggacctgggatcactgctgcagattcacagcctgattggctcagctcactgtcaatctctactctggttctgccttttctcca

SEQ ID NO: 475159 - DNA, 1000 bp, Homo Sapiens
aagaaacaattttttaattaaaaaactaaaagacaccagccaaagaatcacaagagaaactggctgatagaattaaggcaggtagaacattcttccgtgggtaatgggttgagtgagaaacagctggacccatggccaggtaaggcaaggaattcgacatcagcagagcaggttttccatgttaggatcagacatcaagtgctagtctacctgcggccctgagggattggagggagggtgggtttgacgttggaacctgggcgactgatgactgggaccgagtgttgtctgtgttggtgagactctttttcatgtgaaaatgattgtataggtagtgctttccgggtctcttcggtctcactgtcactggctcctgatcctaggtgtgaagaaatgctcccctccggaggctggaaaggcaattcttttgaccacggacagaaccgaaacaatgaacatttcatggaaaccaaggaatccttcccactcttttcaggatatggtccaaatggaggtttaaaatagtcttcacaaagatcaaaacttttccagagttcttctaaagttgtataatagtgtagaccactggtgagaggtgctggtactggacccctttgaaataggagtgtgtgatcagggcgtatccttcccattagagcttgccgggctgcctcgtgctgtctgtgtatagaatctctttccgctggtgtttttttggctgaaagtttggcccaaaatttaatgaggtagtttctgtctgtagaatgcaggaaatcacccatattcgaagaaatatactttgtaggatgcgcttcaggtttcaggtgggatgtcttaacatctgcagttgtagccaaactcttggcaggttcctcagtcaatccaaggtattctctaatgagctgactcagtttttggtaggcaacatccagatcatctgcattgattacctcatcaaaatatcccggaaaattctgattaattttaatataaaggtcca

SEQ ID NO: 475160 - DNA, 1000 bp, Homo Sapiens; identical to SEQ ID NO: 160731

SEQ ID NO: 475161 - DNA, 1000 bp, Homo Sapiens; identical to SEQ ID NO: 343852

SEQ ID NO: 475162 - DNA, 1000 bp, Homo Sapiens; identical to SEQ ID NO: 343853

SEQ ID NO: 475163 - DNA, 1000 bp, Homo Sapiens; identical to SEQ ID NO: 343855

SEQ ID NO: 475164 - DNA, 1000 bp, Homo Sapiens; identical to SEQ ID NO: 343856

SEQ ID NO: 475165 - DNA, 1000 bp, Homo Sapiens; identical to SEQ ID NO: 343857

SEQ ID NO: 475166 - DNA, 1000 bp, Homo Sapiens; identical to SEQ ID NO: 343858

SEQ ID NO: 475167 - DNA, 1000 bp, Homo Sapiens; identical to SEQ ID NO: 343859

SEQ ID NO: 475168 - DNA, 1000 bp, Homo Sapiens; identical to SEQ ID NO: 343860

SEQ ID NO: 475169 - DNA, 1000 bp, Homo Sapiens
ttttcttttccatttttatttttttagccaatttccaaagccctaaatcacattttcccttagactgaaactctagaaaaacattattattattattatttattattttttgagacagggtcttgcctcattgcccaggctggagtgcagtggcacaatctcagctcactgcaacctccacctccagtgttgaggcgattctcctgccttggccttccaaggggctgcgattacaggcccgtgccaccacaccaggctaatctttgtattgttagtagagacgggttttaccatgttggccaggctggtcttgaactcctgacctcaagtgatccgcccacctcgcaatcccaaagtgctgggattacaggcgtgagccaccgcatccggcctaggaagacattcttatcttctctagttcaccctctaccaccgtctcctctctggagagccccctgaatggctaaataaaacagctaaaccacctttcttccccctatgaccctgcccatgcaacgcctcctctgagtgattgttcctatcccatctccttgcaaaggtagtagaaagtattatagctgaggttcagacatattcatttgttacccatatactagtcagagaaattaaattatttgattgaatgagttctgcttcaagcgacagaagaatgttccaccctccagtaaatgtcacagaggactaattgagtttccagctcctatcctcattcacagggatcagaatactgaattgttgcctgttcatctggtaggtagtagtcatagaccttgatggttgctggtttcaagttggtgaccagcacactttggctgatggtgaaggtgtaagtctgagtgttcttaatgagctcatccaagtaaatgttaagtgtgtcagttccaaattcaaccttcttcaccaggggttgctggagaagtaactgattggtgccctccatgggactgaacccagatagcatcttcacttccacaatagc

SEQ ID NO: 475170 - DNA, 1000 bp, Homo Sapiens; identical to SEQ ID NO: 160733

SEQ ID NO: 475171 - DNA, 1000 bp, Homo Sapiens
caaacaaaatactgttttactttgtttctcagccttttccaattttacgccagcgcggaatgaggcgccagggcggtgctcaggtgtggcccaccaggcgcggggtgcaggggaaggtcttacgcatgcccatgcacttctccttgtcgatgcagagggtgttggccttgatggcgagctcgtgctccagccggcacttggtcatgaccagcagctgcagcgtgtcctgtgtctcccgcagccgcagcttgagggtctgcagggtgtcgtcgatggtgaacacctcgttcaccagcttcaactgcgggatgtccctgcacagctccatgttggggcgccgggtccggcactccagccttgtctgggccaccttcagcgggccctccttggccatgatggacctttccagcagcatgatggtgttctcggcctggaagatctcctgcagcgtcttcgccagctgcgtctgcagcttattcttcacatccgtcacctcagagatgcgggcgttgaaggccaggttggtgtctgtgaactgcctccacatctgatccgacaaggtctcaaagaggtgctccgcctcctcccgcagctggatggagttggcccgcatgttctgagagtgtttgatgttgtcgttactgaacttggcccaggtctcaggtacggagatcgtgccgtcaattttctccatgccgtggaagaagctgatgcagtctgacgtatttctcaggttaaagcacttctcatcgatacactgggccgagcttttgtcttcgaggtccctctccagcacgtgctgagcatcccggttatcccgcatctggatatcaattctttgagctaattttctcatctgttcttggcaacattttagcaaatccacttcccggataaggtttttctccacgttgtcatggaccaaatcaatcccaatcctcttctctcgatggtacagacactccaaggccacctgcaatgggcagttcacctcattggc

SEQ ID NO: 475172 - DNA, 937 bp, Homo Sapiens
ttttttttttttttttttttttttttttttgctgttatgattttattgccattttgcttttttagatgtgtgcagcagactaaaacattaatgagataattgatttttgtcccataacattacaaagctgattcgactaagccccagaagaaaacagccagggtgctatagtcaccttagcttagcatcttggcttctttgtatctgtagttgttggaacattgaagagacgcttcaagaaatacagttgcaggatcccagaaagaataataacaaggctctgggctgtcgaccaccagttcacgtagttatagtttgattggataaggaaaaagtcagccattttcctcatccgggcaaagttgtagtatcgccacatgtgaaagatattgttctgcaccttttgtgtgccgtcctcaattgcatccagagtatcattcagttgttttctttccttctgtttgtgatcagtctcaggcccctcatagaagaccccaaagttgaggtacacttgcacagaaccgaagtgattatgctgattacttagacaaagctgataaaaacctgtctcttgggtagagaagttaatctggccccgaacaccctgggaggtgtctatgagaaatccctgtgggttatgtgccgtggcagcaacatgccggtcatgtgacatccccactgtccgctgaacctcgcaactgaaatagaagtatccagtctggtgggcaaattgccaaaagcattccgtgcctcctggaggtatcatgatggcaaagtcatatcgatcagctccacggaagagtggctggtccccagagccacttagaggttctgtcttctggctcctggcagacgtcactagattcagaacgaccagcccagccccaaagagcaaaggggacatgccgctttctggagcctcctctgcaggtgaact

SEQ ID NO: 475173 - DNA, 1000 bp, Homo Sapiens; identical to SEQ ID NO: 343862

SEQ ID NO: 475174 - DNA, 1000 bp, Homo Sapiens; identical to SEQ ID NO: 343863

SEQ ID NO: 475175 - DNA, 1000 bp, Homo Sapiens
gaacttgagaacaaacttcatataacattcactgttttcagggatagagtgaggcccacgggggaaaataagcaggtgtccctcagcaggaaggcacagcaggcatcggtcccgagctggactgactggaccgcaggctcacgacttcttctttcacgatctctgtctcaggacattctggaacaaggctgcctccttaaatccggactcgctgttgttccttctttttcacctctgcccagatgtccgaccggtcttggataaattgctggatcatgtccagctgcttgtgggtgtcctccagtgccacctcagtcacctccttcaggtgcttgctcacgatctggaagaggttcagcgtggccatcttaatggtgccgagcaggagggtcttcttggctgcggtgttctggatgtgcgcccagcgagattcccagaagatgacattgctgcgggcacggtcaaagcgcatctgcagccttgccagctcattgttttgctgcaggatctcatcatccttttcctccatgtagcgcgccagccgggccttggcgcgctcaatcttctcctggccttcctgcgcagactgcatgaggtcgtggcgcatgctcaccagcgtcttgtagcgtgcaatcacctcatggatctcctcgaactcggagttctccaccaccttctctaggtacttgttgaagatgtagtagtccttcagcttggcgctcagccgctggtgctccagccgcagcgccaccatctcctgcttgcgcttggtcagctcctgcatgtgctggcacttgagttctcgctccttgttggctttcttcatggcgcggatccgtttctggtcgttctcctggatgaactgctcagacttctggatgtgagccttcagttgggcttccttaacgcccagttcctcccagcgcaggttcagggtttccattctgcgctgaaacatcttcttcttctgcaccatagtttgatgcatgatttctgtctc

SEQ ID NO: 475176 - DNA, 1000 bp, Homo Sapiens; identical to SEQ ID NO: 343864

SEQ ID NO: 475177 - DNA, 1000 bp, Homo Sapiens
tttttttttttttttttttttttttttttttttttttttttttttttggcggtcaacgcgctttattccgaggggcttcagatacagatgaccccagccctgcatccgcccggaaggcgtccccttactcccatggggcacctcgataccagctgccctgccctgactcacttctcagcacccatcttacggcagtcggccctggcctcagacccttgggttcagatcccaggccctcctcctactcactgtgagaccctaggcgagtcccttagctcgggagcctaattccgcttcattaacatgggggtaatttaactacctagctagacggttgcaaagggatcagttcactaattctcaatgttggcagtgcatcacattgcaaactccctgcctctgctccagagctgatcagaatcaataagggtggggcctgaaaatactacatccaaatttccgagaagcacagtgtctagcatacccctatctctccatctggggttactgtcactctcaggaagaaataatcacccattattccttcaaccaggaaaagagatgtccagggcacagcttggggccccagaaagtaaccacggaggtcaagatcacaaacccgtcagtgtccagggcatggcctcgcacacatccgaggttttcaaggaccatgaagtgccatggcaagcatcctggcctgagggttaggagagctggatctcaggctcaactttagcctgaattcggtgcgtcatcttagacaaatctggtgagctctgagggctggggtaaggttgagaaactgtgggctcctcagggtggggggtgcttagagaagatggggcctctgagtcctcagactgggggtcttcatcgggttcagcatcctccccaggcccaagccctgccagcctcttgctggcctcccatagccgatgggctgcccggtcgtctcgggcagctggaggcacctcttccacatggcagttggcaaaatatc

SEQ ID NO: 475178 - DNA, 1000 bp, Homo Sapiens; identical to SEQ ID NO: 343865

SEQ ID NO: 475179 - DNA, 1000 bp, Homo Sapiens
ttttttttttttttttgctgaacagttctatattgaaatagacagaggcagcagggccaagggcgagcgcagggccagcggggtgcagccccctttcctgctgtccttctggccaaggagcatgggccagactccaaagccctgctgtgtttaggagaggtgtgcaggcacgcaccgcaccgcagacggggaatgagaatttctggataactatctttctgtaagaataatttgtgggttcaggagatggctctgaggagcagttcaggttgggagggaatgccagcccagctagcgcagcccccagtgatgggcaggggtggaatcaccatcagtggtgcccggtgacatgctggaggaagctggtggccccccggggtggaccatgctggtgggagcggcggggtgggagcccctgagcccgtgggcccctgacgctctccagggtgcagtctggctcactcagccattctccaggacagctgctggggtcgaagagctcagggtctggcctctcagcttccatggtcatgttgtcaatgttgggcccatcctcatctcgctgcaggatggccagtggctcagcagaggccccgagatgctctccttcctcccagctgctgccccggcagggcctgtcatcctcaggcgagacctggctcagccgaatgaggttgctgaagttggagtcggacttggaacccgcaggtggcttgcgggccttgtggcggcctgccaggcggctgctgtagaaggccaggatgggctcagggcccgagtcgggcacatggtggccagtgatggctgccttgagggggaccatcatgtcggagaccgcattggtgcaggtctcaccccacagcccatgcccagcctcctgcagactcaggtcatccagctggtcgatggctctttgcatacctggtgccttctcctctcggaagaaggggctgctgccggccacactgcccatacccgcagcctccttctcctcagccag

SEQ ID NO: 475180 - DNA, 1000 bp, Homo Sapiens
ttttttttttttttttttttttttttttttttttttttttttttttttttttttttttttttttttttttttttttcagcaacctcggctgtatttattgatacaaggaagatcacccgagagtcagggacgtggcggcgaggggccctggaaatctccagataccaaagctggaagggcgtggagtcttctccagttctcctagtttacagatgttgtgacctaggcttacaatgggcctggggtctgaaagcgggacgtgggctgcgggggtcaaagagccggtttggtggaggtcagcgccacagcgcgccgtgccaggaagactttattctgcgcctccgtctgtctctgacgtttgagctcagagatgaggcgtccgtaggagttagccagagccacagtgtacgccatcaggatgctggagatcagcagaaggggcacagcaaaagcctgggtccccaggaagaagaggaaattctgggtggtctcagggaggctggaaatagactcagggatctgggcccagatggacgactgcccccggaatggaccacaaagcttagaaggcgggatcaggaagatgctgtaaagcaggggaacgctggagatggccagacccaggagaaggaccaaggggaaaaagaaattcgccgcggaggcccggaaggtgcgggcagccggggagcaggtggagaagagggtaagcttcttcaggtagaaaagcagcaggaacttgaccgtgttaagcaggggcagtaaagggcagaaaaaactccccacccagaccaccgtctgcgcgtagatgagccccagcacctcgtcgggcacctggaactcctgggtccccgccagacgacccagcgccccaggacagaggccacagaggagctttctaggaaactggatgagcagcgcgactgccaagacagtcagcagatcaaagagcagaagtttgtacatttcctggcccaggacagtctcccagcacggaagttgt

SEQ ID NO: 475181 - DNA, 1000 bp, Homo Sapiens
tttttttttttttttttttgagatggagtcccactctgtcgcccaggctggagtgcagtggcgcgatctcggctcactgcaacctccacctcccgggttcaagcgattctcctgcctcagcctcctgagtagctgggactacaggtgcccgccaccatgcctggctaatttttttttatttttagtagagacagggtttcaccatcttggccaggctaatctcaaactcctgacctcgtgatccacctgcctcggcctctcgaagtgctaggattacatacatgagccaccacgcctggccagctctgtcaaacattaatttgatcccaagcagagggacttttgatctcaatctgcatgagtctgtctctaggaaggaggctgatcattatgctgggggggtgatgagcaccctcccatcttcctctgtccagatctcaggggagagccagcagataggaccattcagcagccaatgtccaaataaggttttgttactcgaagcgctgccaacctactgtgggtcattttattcaggtccatcccaaataaccagaggactcggagtttgcagccaggatggctcagccgcttgcaaagcagtcggacacctgtgtcccctagggcgttgttggtcaggtaaaggtcggtcaaggtctggttgatccccagggtgaagtaaagattctcacaagccttggctgtgaggccacagctatccagccacagtttctggagtctgcaggcgggatgttgcagcccctcagccagcaaccacaggccccagtctcccaggtcgttgaaactcaagtccagctcccggaggttgtggttggcctggagcaccacagaaagaccctcacaggcggcagagcccagccggcagatgcccaaccgcagggtctggagcttgcacgtgggatgcctgaggccctcacacagcagcagcaccccgaggtcccccagctcattcaggctcaggtccagctctctcaggctc

SEQ ID NO: 475182 - DNA, 1000 bp, Homo Sapiens
ctgggcaggcaactgcttctcttttattatgaatatgatttgaatctacccactgcacactgaggctactgcctctctttataaaaaggaaggaagaaatttccgtttcccgcagatgtgatgtaggaagctacaactgccaactcctgagcatgagggaggggacaggagaatcactgaggccctgaccccaaggcaaccgagacttagctgtgtgcccacagctgccctcgccaggcttgttttgtgagggaataatccttagtgcttaatccattactgggggagttttgctattgttaagaaatgtcagcattaaaaaactaggagaattcacataaaaatacagggatgtggatcccctgtactctatctagggtaagcctgcgcaacagtggactaacaatggggatcccagtggagagagggccaggggatttattgagctagacactgctctgaggggcaagtagagcctctcacactggagggggctggaggtagcagagctggaggtggggccaggtgggaggtggggacgggccaagcagcaggacagagagcagcagcagcagcagcaggcccaggacaggagctgggatcagtggatgtcgagtgactctgagccgctgtgggggcaggcagagctggccccaggccctcctcctgactgggaccagctttttcatcacaggcaccagggcttgctggagttcccgccgcgcaggtctctctggagggttttctgggatgtctccagggcgaggggctcctagagggacagggagatcagccgtgacctggctctctgcatcctcctcttcctctcttctggtcaaccacatggatggctccttccttccttcttcagggtgcgctggctctccctggaagtttctctgtcccccagctggggcttcagatggaaactcagtttcctcactggtctcatggatgacttcctcccactgccacaccccacacagagggttggagagat

SEQ ID NO: 475183 - DNA, 1000 bp, Homo Sapiens; identical to SEQ ID NO: 343866

SEQ ID NO: 475184 - DNA, 1000 bp, Homo Sapiens; identical to SEQ ID NO: 160734

SEQ ID NO: 475185 - DNA, 1000 bp, Homo Sapiens; identical to SEQ ID NO: 343867

SEQ ID NO: 475186 - DNA, 1000 bp, Homo Sapiens; identical to SEQ ID NO: 160735

SEQ ID NO: 475187 - DNA, 1000 bp, Homo Sapiens
aaaattatgaaatatgttaatgtttattttagggaacagctatacacaaatgtttatattaaaagaaaaaaagactaaaaaaattaatgagccagcagtccaatctacagatgagacactgataaaggatatcccacactcaaaacagtgattatactttttgttcccagtgaaaattgtggccactcagtgaagagttcaggctgaggcatcctaacactgattacattcctaggggtttctccatgtaagttctctcatatacaagaaagagaagaatcactgaaaaattttccaatattaatatactcataggttttgcatccagggagaagttccatattttccctaacacagaggcatcactgaaggctttctcttcttctttatatttcaagtttctctgtagtgtgaatgctcacaagtttcctaacaaatgtagaaaaacagaaagctctccaatattgatgatgttcaatggggcattctctccagaattaattctcaagtcccttaaaaaccgatagaacattcaaggctttcccatagtcactgcagaataccacactatagtttgctcagtaatgtgaacacttttgctgcagggtattccgcatttctgagtgttgttccattgtgtgatttccagtgtgtcttaagggatgactgtcactgaagccttctgagaccttcacaggttttctcccttagtgtgagctgtcacatgaatccctgctgatagcactgaaggctttctacagctgttccattcttcaggattctctcagtacataatcttctgggcccatgaaggtgagaattcgagctgagagctttaccatacagattgtcctcaaaaggtttctcttcagagtgaattaataggagttactgaatgctatttcatattgattagagtagaaggatgatgtgctgagggcttttcttcattaattccatggcaaatttcccagatgcttctgagttatctgtttcctgg

SEQ ID NO: 475188 - DNA, 1000 bp, Homo Sapiens; identical to SEQ ID NO: 160736

SEQ ID NO: 475189 - DNA, 1000 bp, Homo Sapiens
ttttttttttttttttttttttttttttcaattgcacagatatttattgggtggcaccatgcaagttaaacaactctttgcaaggcactgtgaagttaaatacaacaggcaaataatgtcctttcaaagggaatgttgttccttagtacagaacaatggccaccagggtttaggcatgctctcctcccacctggaggctcccactgacatctgaattcttctttccacaggttgccttggattcagtgacctttctttggagattttgaggaattttctgctgacctgacttcttcttcttcttgttgttcttcttcttcttttacttctctttcatcttgattttctttctcttctttagactcctttcttgatgtcatgactaattcctctagatctttattttttataagggtatgatgaagtttctcatatgcatcttcaaacttctcctctgcctgtctggctctattttcaacctccagtaacttctcctgcatatgttcaattacagccattgcttcaagatatttttgggccaatgtaccttgcttagctgactctctccaggaagacaacacatctgtttcaaatagaggtttggaatgaacattttcatcttctccaatgaatcgaatgagtttttccttctctgtagatgttgaaggttgttcttctgctctctctttattttcctcctgaagtttcctatcctccttactttcttcttcatcttctttaaaagactcgtctatttcaggctcaatgaattcttttacagcctcctcttcaagtagccgctctatttcttcatatgtcaataatgtaatttttctgcctttgatattagaaaggaggcaagagcatgtgttgatccattcataacattctttcttcaacttatccacctcataaaggtcttcagtagcatttttgtgtgagttagtggatttactcagagccattgctgttaccatccctttgcaacaactgctcaaat

SEQ ID NO: 475190 - DNA, 1000 bp, Homo Sapiens; identical to SEQ ID NO: 160737

SEQ ID NO: 475191 - DNA, 1000 bp, Homo Sapiens
tttttttttttttttttttttttttttttttttttttttttggcttttccagacatttactgtctagactggctacgggattcagcaggaccatgcccctccctgcggggctccagctagatgcaggctgggcttcccttcagcccacctcatcctctgcccatgattccctcaagccagcccaggattgcccatctttctcatccaagataattcatcctagtgtctcagatgttgtgtcaaacttataatctctggccccatcccagctctcacaacacccctgtgtcacatgaagctcttcatctgctgagtttagtagtacgtctccctttccacccagccatccgggtgctgacggatgaggagttttctgatttcatcatagacgaagatgagaatactgtagggaatggcacagagccaccaggttatcttgagtgggtacattcgcagggccacgtccatgcctggagtgtaggacagaaatgcagccaagagtgtctcctccaggatcccaaatattaagactttgtttctcatgccctgctggaaaagtgagttgcggcgagtcttggagatgatgagatccgcccactgcacaaccacgatggtgacaaaaaaggccgtttggcatgtgaactccacaacttttcgttgctcataggtccactgctgtccgtagctgtcctccaggtcattcaagtatttatcttcccagtggaggcggatgcccagcagatcaacaggcctaaaaccattctcagccaggattacaaagtaggtaaagaatccagccagagcctggatcatcccaatctgtccataggccatgccaatgagacggtggttcaccagattatccgtctttgggttccttggaagcctcttcatgatgtcgctttcagctgactcataagccaaggagatggcagggaccatgtcagtgccgagatcaatgcagaggatggttatggttcccagaggcaggggtataccg

SEQ ID NO: 475192 - DNA, 1000 bp, Homo Sapiens
aaaagtatagcaacagactttgttattggtctgagatctcccccagggaggtcaccccacacagggacaggaggtgcttctgtagccccgagtcttagaggcaagcaggtgggagggggctaggggaagaatgccatggcctcatcctccctgagtttggccttgatgggatcccttggcaacatcagctcctggattatggcgtacgcaggacattgtggggcgaagcaatttttcttccttggaaatggggagacagaagctgcctgcagcagctgtctagtatgacagctgataggggcaacgtctgcttcagcaggagagagtgaaagggactcacagccagggacagccacagcagccccactggacccttggatgcactcttggccttggagaactgcatctgatactgcaccgtggcgaggaagccctccagccccacctctgtgatgcggttccggatgaggttgaggtgcaaaaggaccttgttcccaggcatgaaaactttcccatctcggtgctccacaggctccaggagagggttgaccacctcagtagcctcaacaaccagctgctcggactccaggaggatgctgcgcttctctctgctcccgatcttgatcccttttgccctgcttggcttctgttcagggatggttaccttccccttgcctgcctttgtggcatcttccttcttaggggttccttgtgtgggtgactgcccagaccccaacttctcctctttcttggccaattcccatgatttctcctttttcttgcccaggcccttaggggttttcattgtctgcgtcttgtctgtcttgtccaccaatgcactattgctgatccctaccatctgactcttctcacggtccgttttggagtccccgtgtcgagaggaggagggcgatcgcgagcgctcctgtgtccctttttccagcaggaggcgtcggcgctccaccacttcggtgtgtgtcagctcgaaggcgcgcaggac

SEQ ID NO: 475193 - DNA, 1000 bp, Homo Sapiens; identical to SEQ ID NO: 343870

SEQ ID NO: 475194 - DNA, 1000 bp, Homo Sapiens
ttttttttttttttttgaaagctaacgcgctgtttatttgggggactggggggaagcaccgtgccgctgctcactggtagccagccagctgcaggatggtggggtagcgagtacgatgggccatgcacttctggcggtcgatgaagagactgttggtcatggcggcaatgtccttctccaggctcatgtggatgtcctcgaggttgcgcagggactgctccgcttctagaagcttctctcgcagtgctgtgagggacatgttcagctcctccacctcactcaacagcctgaactgggctgcgtcacggcacagctccatgttgggccggtgcgagcgcaggtacagccgggtctgggctacgtgcagaggtgcctctttgtccttgatggcctgcttcagtgccgccacgttgtgttcctgatctgtgatttcccgcagtgtcttgtgcaggtggtgatgcagcttgtaccgcgcgtcctccagctcctcacagcggcgcccgaaggccaggttcacggcgtcgcactggagccgcaggtcctcggaggtgtcgcgaaggatgcagtccaccagcacccgcaggttggccgaggccaggcgctcgcgctgggcacggcacagattgtcctgcgtgaacttggcccgggtctccggggtggaggcgctctcttggaaggtggtggagtacggatgagcctgcacctcggtgctctggctgtggtggcgcccgcaggtctcgtcgatgttgtaggcctccatcttgtctgaccagtccatctcgcaggtctccttgtgctcccggttcagtcggatctggctcactgcttgcatgatggttctcttcagcagctcctgaatgttccggatgagctcggcttccttcagcagctccgtttccacatggtcgcgcacgaggttggggtgctcgcggcgctcacggcactgcaggttgtcagtggtgatggagaagggcacctctgtggcgtccagggcgcgctc

SEQ ID NO: 475195 - DNA, 1000 bp, Homo Sapiens; identical to SEQ ID NO: 343871

SEQ ID NO: 475196 - DNA, 1000 bp, Homo Sapiens; identical to SEQ ID NO: 343872

SEQ ID NO: 475197 - DNA, 1000 bp, Homo Sapiens; identical to SEQ ID NO: 343873

SEQ ID NO: 475198 - DNA, 1000 bp, Homo Sapiens; identical to SEQ ID NO: 160738

SEQ ID NO: 475199 - DNA, 1000 bp, Homo Sapiens; identical to SEQ ID NO: 343875

SEQ ID NO: 475200 - DNA, 1000 bp, Homo Sapiens; identical to SEQ ID NO: 160739

SEQ ID NO: 475201 - DNA, 1000 bp, Homo Sapiens; identical to SEQ ID NO: 343878

SEQ ID NO: 475202 - DNA, 874 bp, Homo Sapiens; identical to SEQ ID NO: 160740

SEQ ID NO: 475203 - DNA, 1000 bp, Homo Sapiens; identical to SEQ ID NO: 160741

SEQ ID NO: 475204 - DNA, 1000 bp, Homo Sapiens; identical to SEQ ID NO: 160742

SEQ ID NO: 475205 - DNA, 1000 bp, Homo Sapiens
tttttttttttttttggttatgaaaatacttattattattacaagtccaagggtctgcacctgaggaagtgtcctgaggagtgggctgacaaactggttgagagcatagtgccccaagtctgtgtagggtgtggacggctacagatggagccgggatgggggtgaggggatagggcagggctgagtggcatgggggatatgcccacttagggtaaccaagggctcttctgtgtgtgaagccatggggacatccagggctagtacctaggatgagggcgatgaacacctgcccgagggactgcatctgtccattcacagccgccttgccatcccagagctctcgcctctgccagtgggctgctgggcctccctgctgctgtaacccagccagcccagggtctcctgcagtgtcccaccagggcttctcttctgccttcctggcctgagacattggttttggtcatccttaaggagcctcttctggtagaagtggttgagctggctgccctgggctggcttcccggagcagatggagtcctcagacagagtcttatcctctcaagacctgaggctgcccacccggccaggccgacactgggctgtcatcctattgcttgcctgtcttctgctgccgcagggcctgcaggaagacacttttcacctggcccaggatctcatggtacatccggaagtcctcctcctttccccgcagggcactgcccagggcagcctttagcatttcattctcctccacctggatggccagcctggttgtcagctcttccatttgggattccacgggcacatcggagagctgggcaaaggatgggtccttcttctcgctcccggttgggttgtgcctgttgttagaggtgggcagacctgttttggtcctgggagctgctctctgggaggctgatgccttccctggctccaggcgtatcttctccagatgttgctccagcaccacggtgcggtgtcgctcctcctgcagcttcct

SEQ ID NO: 475206 - DNA, 1000 bp, Homo Sapiens
ttttgcaaaaacaaattattttattaagtgcaaaacaagccataggcaataaatatattagctctggtacatgtccatagacttgggtgagcacgctctccagaacacattaaggcagtgaaattattctgaacatacagatttaaaaaaaaaaagaaagaaagaaagaaagaaactataacatgtcccctttacacatgcttgaaaacatctgagagctttacatgaatttcagtttgggttcaaagagaatgtctgctccgtttgagagtttacaacagatagagtctcttacttcgagttctagcactctgaattctaacagctcgttctgatccttggcgtcttgcatttcattcttcagctggttctcttccatttccagtctgtaaatcttttccagcaagtcttggtttgttctgatgagcagctgcttctcttcaacccacttggaatcctgtcccttctcaaccagtaacttctccaaatcttcgattttggcctgacacctcagcagatcagcttgtagctgctcccgagtccgggcctccctctcagcgtccagcgtgcctcccacctgctcctggagcagggcgtaggcgcgttgcagggcctggtactcccgggtcagctggcagaagcgcaggtcagcctcctctcgggctgtggcatcgtccaagtcttcttcgggcgtggctggggtcctgtctgtcctgtctgtgttgtaggatgtttcggacaacgtttctgagtccacagactcctcatcaaatccaaaaaatgtctccacaacatgcttcttgggcggtttcagacttttccctcgatgccttttggagcgcaacagccgttctctctccagtgagaggtcgtcaatgacgtgctgctgctccagcacctgcagcctcaggaactcgatctcctgctcatccctcgtcaggctgaggtcattcaaggaggtatgccgcttcagagacgcctgcgctgacagcttttcttt

SEQ ID NO: 475207 - DNA, 1000 bp, Homo Sapiens
ttttttttttttttttttctgtcaaataaaatgacttttaatttacaatggaaagaaataccttaacacaggttgatactgtcaaagcattttcttacatggcattatactttaggtggatgtaataggtctagtatattttacaaccgtacaaaacaaacatccacatatatcttttaaggttctagtcaatccttaataataattctcttagtgctacaaatacagattcatttaattaaaatatagtatacatttaatttctcataatctcatatttttccttatcttttaaccacaaggttatcttcttgtaatatttacttgttagtgttattttgcacttttctttgttcattgtaattcattcattttattcaccctttgtcccacaaacctttgttgagtatgtactatcagtgaataattaggtcaaataatcttttcatagatttttttcatgttgcacttactgaccttccgggactcattttgtaatttttctaataaaaagcctcactcctcattccattgctgttgatccactcaaaatttctatccaaaagctatgattgttacacctttacttctaagggtgagatggagtgggatggggagagtaggatggtgaggaaagaaatggatatgtattatatgcatccaacatgaagtgcactcagctaagtgtttaactcatgttattttaaatgaagtaggtatagtagcattccctttccattaattgaaaaatggaaatctattagcccttaatgaactggtcacctaaggtcacacagttagtagttggcaatttcagtaatgtagctctagtctgtctaatctcaaaggctttacaacagttcttctaaaaatcacagttggcacccgatactttttatttcaatctttgaataaaagattgtttgaatctatgctattcataaaacccagacttcctcctctttcattttgcctgtaaaaaaagtctattatttagatt

SEQ ID NO: 475208 - DNA, 1000 bp, Homo Sapiens; identical to SEQ ID NO: 343884

SEQ ID NO: 475209 - DNA, 1000 bp, Homo Sapiens
aaagcatgacccaaattcatttactggtgaatgagcttgaatgtcatgaacttcaattacttctgtagaacaggggcaagaaggcttctcccatcttcctcccagatgtttgctttgaatgcataatgtttcaaacacatgttaatagacaagagattgagaatgctgaaggttgggtaagtccatcttcctgtcacacacagtagttttcccttctgcctgtgagcatgagacatccagttgctctatgtcctgtctggcatttggtgttggaagtcattcaaatttaaaccactctagtgtctgtatggtggttttcatttgcatttccacgatgactaatggggttaaacatcttttcatgtcttttatggtcatgtttatatctccttttttggaatatctgtttttctccattttggacaagccatttgcaaaattcttcagtggtgctcagtgtttcaaaatcctctgagcccaatgttgctcgatatgcattgatacttcttatgaaatatatctcaacagcatccctgtgctgggcctctccagacatggcataagctttggccagtaacgcactcatttctgcagttttggggctgacttcagtgaacaaaggaacacagacagaatgagcctgctgcaagtactggatggcctggttgtggttcctcctcagctgctctatctgagcagcttcctcgtacaggctgatcagatctgacgtcctatcacccttggcagcaataacatcgccaattgccttttcaaagtatgccagagctaggttcagtctgtggatggccaaggaggctctgcccaaagcaagtgttaggtcgttctcagagacttgtaattcacaaacacctcctttatataattctttcagctccttcatgtttctctctgccttctgcaggttgaaataggcttctctgccacggttctgcaggagccaggccacggccagagtgtagtacagcttgaccagagcttc

SEQ ID NO: 475210 - DNA, 1000 bp, Homo Sapiens
atcttcaaatttaaatttattaagacattcagctatgtctgtcagtctacatccaaatttgctactaaaaataaaataaagtcacatcccacattaggaataccgaggtctgaaaaacactttttgagccaagcctattgtataaataaatgactagtttcttttcatatcaaaattcccataaaaaattacattcccccctccccagttctacctgtagccatgatgaatgtaaaaatttaaatatgacacatccttgtcaaagaaaaggtgcaaagtctattaacagctttaaaagtggcatttgcagagtgtgatcatacagttatgtactcattcccaaagtgcaaatattgccataatttaacactgttttgattcagttgcaagaattaaacattacacaggattgaaaagtacacccagggcctctatcagtgccctaaagcccttcccactttggtctccttcactaaagcagactccaaagtgttcatcagagttttagtttacttcacacagccagcgaagtatacaacatatttaacaaaagtttcatatacatcaaaatattgaagactccgtcataaagttcaagagtctcagattacatgaatgcacccgcaaggcccaagtgcccacccaccccttccctaaagcacatacaaagtatgagcgtgcttcaatcttcgaatacaatcaatgcttcttcatctttgatttcatttcagtgctgtacaagactcaataatcacctgactgagctccaattaactgaggagaaacggggtggaggagagggctggttgctattcagacttgataatgagattgatctgtcccatggagagtgaaagttcagttccacttctgcctccttctttccatgctgtcctcatgctctttatcctcacttcctcagtcccttcaacactcaaaatctgattttatttctctctcacacgtatcaggggcagtttctgaagttgctgaggttgaa

SEQ ID NO: 475211 - DNA, 746 bp, Homo Sapiens
ttttttttttttttttttttttttgagggcatgattttaagtaaacactctcccggctcagaaacggtgcaggtgcatttacatgtcaatcggttccaggctcagaggtttgcagtcaggaaaggtggctgggttgttgctggttttgtggtggcctcttccggtccttgatctgattgaagagagctgctcagctggaagtcctcagctccgaagcttctagggctccatgctgctccgtccccgtacaccttgatggtgttcacacagttcttgacccagcccctgctctggaggaaggggctgtcctccaggaactccaggcactggcccgtgaagttgcaaccctcgaagatttctaggcggaaatgttctccgtgcattcctacaggccgacaggagcccatgtggtcactgtggctgttccagcggaagaagtcggggtagtcgccgtgctccaagatgaactgctggccccggaagtcggggtgattgaagcagacccaggctccgctctccacgtggatggagttcactcggttcataaagccccggtcctggaagttgtcacagtccccgaagacctccagcttctgccctgtgaagtgcttgccttcatagagagtgatcttccccgagcgctgcgccatggtgcgccccgccccttccgcgggtccccgtttacaccgggcagcgccctgctggctcagcgccgccccggacaaaagatttgctgggccggcccc

SEQ ID NO: 475212 - DNA, 1000 bp, Homo Sapiens; identical to SEQ ID NO: 246477

SEQ ID NO: 475213 - DNA, 1000 bp, Homo Sapiens; identical to SEQ ID NO: 339117

SEQ ID NO: 475214 - DNA, 1000 bp, Homo Sapiens; identical to SEQ ID NO: 343888

SEQ ID NO: 475215 - DNA, 1000 bp, Homo Sapiens
tcagattttatacaaaaagctggggacatagtcaaacctgagcatggggtggctggtccctggagattcctgcatgtagtgcagcttcagcagctcagccaggtactggaccaccctaacatcctcattcaccagacccagggtcagctttaggaagctcatctggcggctggctaccagctcctctgtctccttgtcgtgggtaggcaggtgcaggtggtggcagaaggtgtagaggaaggccttggagcagagctgggtgagcatgctctggacatgcaggtagtaggtgctgccccgcttgatctgtgtgcggtggtctgccaggcggggcaccagggtgcctctgtaaagggggcagcgcagggttttgttgtcaaggtccaggatgctcgtgtagcggctgtagcggctcagggcatggagggtaccggcaccggcaggggaggccactttacctctgcaagccaataagcttccacttctgaaaatccataatgtgcaaaggggaggaggcccaatgtttcacgggcttagcgtagcagccatagctggggacaaagatagccagtgcagtcacgagtttcctgactatggcctcatcttcccccaggaccacaagtgtcctcccactgagcagggagtagatggctgggtgggcaaaggggtactggcggatgaattttaaggcgttctggccagccctctttttatgcctatcggaagacaggccagcaggataagcagaggggatcctgtctgagctggtggacgctacactgctcacgtagctggtggtgtctgagtagttgtccaggctggtcttactgatgtcccggctagccagcaggtggctcgggtccagctcataagcgggaaacccttcacaactgttgtctcgggaagaagggttggcattttccactgaaaagtctacacggaacccctggtccttctgcctgtggcgctgtggggggctgctcaccaccccatcctcgtc

SEQ ID NO: 475216 - DNA, 1000 bp, Homo Sapiens; identical to SEQ ID NO: 160745

SEQ ID NO: 475217 - DNA, 1000 bp, Homo Sapiens
tttttttttttttttttttttttttttcaccaacacaattcccctttattgatgaccttccacattaatatcatacagcagggcgggggcaggaaccaagctgagtggaaccagaggcggctcgctagcaatgttatccacaggagcacagccgcaacggaggtgaaacctcacaccctggcccctcggccccagacaatcctgtctccaggtcctgggagtttgggaagcagggtacagatggtggcctggtcatggagttggcagggagtggccggggctgagctggtgagacaaagagctcttgccagtctcctgctctggagggctggttcccttccccagaggaggcaccggtggaggacgtgccaggggcccgggcctaacgtcctgctcagcctctgcactcagccccaggtcgggccctggcaggtgctgggatgacccacggaaggcacttggctggggcctgcaggccccctggaggatgcggtccgtggctcagtagatttggggggaccagggaagagggaaccaaggaagagggaaccaaggagctgagccctggtgggtggcccatcccagggtgggcttggctgtggcattggcaggcctgagtcctaggggctcagagcttggcccgggggtggctctgcagcagggcacgcatgtccaggagcgccttctccaggtaatgcgccaggcgggcggcgttggtctccgcgcagctgttgtaggccgacagggagaagttgatgtgggcctccatggggttatagcagacaccgtagccgtcggggaccacgggcccgaagaacatgacacagtctgtcttggcagggacctggctggtggagaggtggaagtgcatggcgatggcgtaggaggtgtccatgaagatgtcgggcatgctcaccaggtcctcgatggcctgcagcttcaggcccagcaggtgtcgatcaaaggcctccccgcggatggcccggtcggtgtagcctcg

SEQ ID NO: 475218 - DNA, 1000 bp, Homo Sapiens
ttttttttttttttttcactcatttagcaaatatttattgaaaccttgatatatggccaggagctgtctttggggctggggatacaacagagaacaaaccaggtgttgtcattcccagagtcacaatatttcaaggcagaatttgaatccaggtctcactgatttcgaaccccaggttgattattaagtgacagcatctcctgtagtccaggaggcccaaagaatgttcgtagagggtcttggcttagggtttcttattaacagagtgaacaggaaccaaacaccaagtggaaatggagggtgatgggctgtggtgggtgggtccagtctaattgttcttcatcgtctcctggatccagtccacatatttgcagactttcgtgtagacaccaggctttcgggtgatcgcacacggatcctggccccaggagataatgccttgaagagactggttacagaccagagggcccccggagtcaccctggcaggagtccttgcccccttcctgcacgctggcacacaccatggtgtctgtgatgttgccggggtaggcgttctcacacttctggtgctcaatgatggtgatgttggcgcatcgcaaggtgtgaggcaggcgtaactgggggctggacgtgctgccccagccggaaatgaggcagctggtgccagcagtgacacagcgtgaggagagggtgaggggtcgcacagcccaggtgatggagactggcgatgccatcttcaccagcatgatgtcattgcggtggtctttgttggggaggctgttgttgaagccggggtgggggaaggactcagtggctgtccgggtctgctcacagccctcctccttctggaggttgtgctgccccaggtgaactatgtagcggggcttgaggcagtgggctgctgtcaggagccatctgggggcgatgagcgtcgccccacagagtagccgcgtcttctcgaacagggctgcctgccagggctgggagtgaggcttgca

SEQ ID NO: 475219 - DNA, 1000 bp, Homo Sapiens; identical to SEQ ID NO: 343892

SEQ ID NO: 475220 - DNA, 1000 bp, Homo Sapiens
ttttttttttttttttgaagaatgccctgcaaggcatcaactggaatgtgtttattaccaaacaagacagaagagaaccagggcctgacttggcagtggccccaggctgcatgggctcaggtaggctcagaccggccccaggagtgggagagcccagagaagagggaaaaagagtagcggccaggaggggtctggctgggacatgccactctgggccatcagcttctggatccactcaaagtggtggctgatattggtgtagacaccgggccgattgggccgaccacagcccactccccagctcacgactccaatctgataccacagtccattcttgttacaggccaagggtccacctgagtcacccatgtctccaaagatgtccttgcggaaactgtacttgaggaagaggtggttgcacatagagttgtttatgatggcgacctgaacttcctggagggtgtggggagatggcagtgcctcatcctctttgatgtacccccagccagtcacccagcagtctgtccggttctcaaactcaaatgtggaggcctggagacagatgggctggatgtgtttagtgtaggtgacaggtgcagacagcttcaccaaggcaatgtcatagggtgaattccccaggtagcgagggctcagatagatattcgatacgaagtaacgggtgtagtaggcctgcaggctccagaaggatggcatggaagtcagctggccaaactggaccatccacccggagggatcactaaggtcactataggtttcaaagcagtgcgccgccgtgagtgcccagcggtggctgagcaggctcactccgcatacgtgggaatcccacaggcgcaggctcccctgccacggccaacgcccgagttcggcgtcctctccacccacgatgcgcgacgtgatgacccgtcggccgcatggtcctgataacggcgccgcctcctgcgactccggcttcctgagtccagcccgagccagcagcagc

SEQ ID NO: 475221 - DNA, 1000 bp, Homo Sapiens; identical to SEQ ID NO: 343894

SEQ ID NO: 475222 - DNA, 1000 bp, Homo Sapiens
gccacttgggcctggttttagatgtttttaattttgtaaaagaaaacaagtataataaactcagctgtgggaccagaggactgttgctaagacttttaattgctctggaaggaggcagctggctgagtgccagtgtggggaggtgggtagaactcgtcccctccccagcaagaagggagggtctggatggtcccttcagacagcttcatagtaggtgaggtcctgatcaacctcagttttgctgagacttgggctgggtccccaggtggactcggccttgctggaagttgagctcatgccctggctcttgccctgggcaccctcagccttgctggacctctggccctggccttgggcatactcagttttgctgaggctccagtttgagtcatagaaagcctcagtcttggtggaacttcggagcagtcccctgcttcggccctgggtggcatcaaccttgctgggtctccagctccggccacgagcagccttgacctttctgggcctctgccttgggctccgggtggtcttggtcttgctgggctcctgccttgggccctgggtggcctcaatctcgctggagctctgcctctggccctgagtggcctcagtcttgctggagctctgcccctggccctgggtggccctggtcttgctggagttccgcctctggctttgggtggccttggtcttgctggagttcctcttgtgtatagtggccttggtcttgctggagttccgcctctggctctgggtgggctcagtcttgctaaggctctgcctctggccctgggtggccttgatttttctgggaccatggcttagtgcctccctgttgttcccagagtccgaggattgcgtcttcaacagtgacgagtcagagaatgtcacggcggtggctgaggtgctcctgtattcctggcagatagccgacatctcagtctctgaggtgcctgtggtcctgaagctcatgctggaggctgaagaggtctggtcaagg

SEQ ID NO: 475223 - DNA, 1000 bp, Homo Sapiens; identical to SEQ ID NO: 343895

SEQ ID NO: 475224 - DNA, 1000 bp, Homo Sapiens
gctgtcacaatacagatgtttattaatgattaaatgccagagaagttttaacaatcacaaatctttgagctcagcagttgttacccattaaatgatcaatttctatccctcaatacaatacagtcttcattttatggaccttagcagttgtcatccataatatcagctgtaattctggatcatatgcaacccatatctgtgtgttaccagagcatgtcccacaattttgtactgtcctgtataaaggaattacagagacgatagttaagaacatttgtaatcaagtgactttacctacttggaactatatgtccttacctaactagctgttttgctgacaagagggtgtaaacaccaattgtctttaaagcagatccaggcaataaaatctaaattttcctctaactttggatcccagaaacactaattagacctacacttgaggtttccctgttggcgtgacctgagcaaaactgtacagaattttgggagaggccatttggcaagccattggtctgaataatttggagggggaaatcctaaggtggtggagttgctgcgtggacacggctatgggttggtgtgacatgatttcgcattaattgtttgtcagctgtcagtaggctgacctaacgttctagcatgcctcttgagggcctttccaactgagctctctggaggagggtaggaaagtcagggaatcatgcaatcccatctggggaagggaaagcatctcaagatttgtgaggttccctgggaaaggtgtttaccacaaatgtcacatcaattaaaggaaagtctgcagagagagagagaaagccaagatcaggggtaaaagagaaaggcaaggtagcaccggggagcttgggcatgacacagaaacatctctgcttttaccagcagaagagaccaagcatccccagtgaaggggctggcagtgtgtttggaattctcatcctgacccgagcatcaggtggaactccttcttaccttcagatct

SEQ ID NO: 475225 - DNA, 1000 bp, Homo Sapiens; identical to SEQ ID NO: 343896

SEQ ID NO: 475226 - DNA, 1000 bp, Homo Sapiens
atgttcaataaagtttatgtcctgaatttgatcttcttgagtagctgtggtgctttcaggaacatttgtgacagaacaggttttacattgttgttcaaattccaatttgaggaccttggtcacagtgtactgattcaccctcccaaattttagatacttgatatagcgatgattcaaagtctagcaaatatttaagttgctatttagaggaaaagcataattaaacaaaggcttcaggtttttagccctgattttcacactatagcagaattttgtatagatatgctgtacgtgttcacaaatgcacacgcacacaagcagcaaatgtagtttgattcccttcaacaccaaaaaggccctatatatgtgattaataatctttgtgggggaattaaagactctaaggaaattttctgaatttccttttacctgataagatgaatgaaaagatatattttacatttaggctttcatggattgggggaggggaaatgaagaaacaaaaaaaattggcttgaattaactgctaccaaattccaaattggatttcagtcagtaaattaaataacataaagtccagaaacatttacacagcaagtatttgatggaattctttcaaattttgaagctttcaatccaacacggtgacttattttgaagattacaatgatttccaacattgaactctgtaagcctcatgggaggcagagatggtgagtcctgtctgagagatgcaggaaatgtgaaaactgctatgtttccgtttccacagcaagagatgatgagccttctggataatcttggttgtcatcctcgttgtcttcccaggtttcttcatttgctagcagtgggttctgtgactcattcatagacctcatagggaaggagtgtccatcaccagggctggaaccaataggtattaaccagaacttcttcttatctccaaacacctgctggatattcttgatgaagccaaggttgaacccatttttctctgggc

SEQ ID NO: 475227 - DNA, 1000 bp, Homo Sapiens; identical to SEQ ID NO: 343897

SEQ ID NO: 475228 - DNA, 1000 bp, Homo Sapiens; identical to SEQ ID NO: 343898

SEQ ID NO: 475229 - DNA, 1000 bp, Homo Sapiens; identical to SEQ ID NO: 343899

SEQ ID NO: 475230 - DNA, 1000 bp, Homo Sapiens; identical to SEQ ID NO: 160748

SEQ ID NO: 475231 - DNA, 1000 bp, Homo Sapiens; identical to SEQ ID NO: 343901

SEQ ID NO: 475232 - DNA, 1000 bp, Homo Sapiens; identical to SEQ ID NO: 160749

SEQ ID NO: 475233 - DNA, 1000 bp, Homo Sapiens; identical to SEQ ID NO: 343902

SEQ ID NO: 475234 - DNA, 1000 bp, Homo Sapiens; identical to SEQ ID NO: 343903

SEQ ID NO: 475235 - DNA, 1000 bp, Homo Sapiens
ttttttttttttttttagaagcatcacatatttaatgtcaaaaaatttgaattcaagtacaaaaattaacacatgatttcaacattaaaaacccataacacttgttattaacaatacaaagaatatcaaaaacacaaagcataactataaaatgcttaaatacattaacaacaaaattataatttgtgtctaacaaataacaaaaatatctatagttattttcaaggaccacaatggtagactgctttttctttagtactgcacaaaatttgtatcttaatctttttgtctcatcatttctttttacataatggttagatgcttctggtcatataattgttctaatctccagtacagatagtgatccttggtaatcaaatctactataaccattgtcttcaagtgctttaatatttgtgaaatactatttagtaaaattatgcaaaaaaaaaaaaaacataaatgactaggttctattgcccactcagaaagtagaagaaaatcctagaagtttaaaaagaatagtagtttgctgtacctttatcaagagaaaccactgaataactttttaaactttgcatttttataaattctacaactccatgttattctgaattatagctgatgtttagtactttggaataaatacctttttaaaaccaaatatgcaaacccgattctaaaataaaacaatattttaatttgcaagttttcatactacaaatttacacaaattttcatactaatgttagtattttcttcagaagaaggaggcctgattggagatacatagccgctgtccaacatggctgccattagcaagtgatattgttggtgacaaaggatagcctggataagaataaggccttgaagtataaggaagcacgctgggagtcccagaagagagggtagcactaacaggggaaagactatttattgagctgcgatggaaattgtagtccaaatgaagtaatgtaaactgggctgccagttcctttgc

SEQ ID NO: 475236 - DNA, 1000 bp, Homo Sapiens
ttttttttttttttttttttttttttttttgtataaaattttattaaatgcatatatgtaaacttgtgttggcaaataaacaaatttgagctgtattcaagcagcgctgaattccttattcttagcaaataatcaaaagtattttccaaagttgaacattattaaatgaaagtaaaacatacgttaagaactagtattgttgtaaatatgtatgcaacagaaactaatcatgtgtacgcatgtgtgtatttcagtatcctgagtaggatacatataccacattaattttactagagattaaagctgatgaaatgaaatgtatctttatgaatgtatatgcatctgcaaatatccatgctacatacatggaagttaagaatttccactggccatttgttcagccacttgagcgttatcttctgtttcctctgattttacaaattccttgataaatttccaaaggcccttttattttcttctttaaaatcatattttctgtttccaattgtatagcttcatgctctatgcttttaatcctattctcagtgatatctgaaattccagtatgaaccaaagttgttttaatttctttttccagagcttgtatctcatcccacttactgagtatttcacacctcttcttttcaaccttctcagtaagagtaagttggttttcatcaattatatgtttctcagatgattctgatcgttcctttgcagactgcagcaatgccagctccatctccagttcacttctgagtctatcattctgctccagggctgcttttgtggctgtcacgagcatcctcagctcttccctggcgagatccatgtccgccgtcttcaccggcctctgccccagcgccttgagttgagccagaagagcctcgtactgtgctgcaggctgggactccaggagcgttgccatgtagagttcatattcatccttaacttttttcaagagatcaccaaatatcaaagaactgttacaaatatcttc

SEQ ID NO: 475237 - DNA, 795 bp, Homo Sapiens; identical to SEQ ID NO: 343904

SEQ ID NO: 475238 - DNA, 1000 bp, Homo Sapiens; identical to SEQ ID NO: 343905

SEQ ID NO: 475239 - DNA, 1000 bp, Homo Sapiens
gagagcggagtgctggagtgcagtggcgggatcttggctcactgcagcctttgcctcctgggtttaagcaattcttcatctcagcctcccgagtagctgggattacaggtgcacaccaccacacctggctaatttttgtatttttgtagagatggggtttcaccatgttggccaggctggtcttgaactcttgacttcgtgatccacccacctcggcctcccaaagtgctgggattacaggcgtaagccaccatgcctggccaactcttttatgtataatatttttgacatcatcactgtgccacagcagcttgaaaaacaacggcatgaccacataatgttgtgtctacagtgctaaaaacagaagctacaagatgttgccagtgggagagcactccatgggctggcatgcccaaagaaggcattgatggaagatgaaagctggatgtggagccccaaaaaatatgtatgattgaaataggtcaagggaaagagaggtaaggcatcccagagagggtgactacatccaccaagtcacgcctacttcaaagtcatccacagcaacagttgctaatgacacttgacaaagaacattttattcattcatcaagtatctattgaggatcaactgtgtaccaggcactgttgcaggcattcattgttatcatcatcatcctcaaaaagtatatgattgtgttagtctgggatcccagagaaacagaacgaacacacccagaaataatgttttacctgctatctgggcatcgtttagcctagtcaagtcaacacataaaattaaccaacactcttatgtagaccaatccgtggggaaaaggcattttcaatgctggtggtaatataaatttgtaaactattttagaggtcaattcacttcttgaaattgtgtccatttttaatttgggtagatctttggacccggcaatcttatttccaggattttatgctaaggtcagggatattcatggagatttattgacaa

SEQ ID NO: 475240 - DNA, 711 bp, Homo Sapiens; identical to SEQ ID NO: 343906

SEQ ID NO: 475241 - DNA, 1000 bp, Homo Sapiens; identical to SEQ ID NO: 160750

SEQ ID NO: 475242 - DNA, 1000 bp, Homo Sapiens; identical to SEQ ID NO: 343907

SEQ ID NO: 475243 - DNA, 1000 bp, Homo Sapiens
ttttttttttttttttttttttagtagagatgaggtttcaccatgttggccaggctggtcttgaactcctgaccttaagtgatccaccagcctcggcctctcaaagtgctgggattacaggtgtgacccaccacacccgccctgcaatgtaatctttttgcctgacagagcttcctcagggttttctcccagttcccttttccctacagacccttcccatgatttcagtgatgacttctgtagttatgtctcccaaatctctgtctccagactctagacccacatctccaattgcttctctgatatcttcatctgggcatcttgcaggcacctgcaattcatcatgttgcagacacatctcattgtctttccatccacaccaccatctcctgtaggtaccactatctatctaccacccgaagccagggaccagagacatcctaaccccttggtatccaatcttcacacagcagtgggagagagcttttgaaaacttcaaatgtgattgtgtttctcactgctttaaatgtggctctcattgccctcagggtaaagtgcaaatccttaatatgaccctttatgcatagccccatgctcacctctctgaagagctttattatttccacccttccttctcattttatgttccagccagaatcaattttatttctccagacatagatgtctttcttcatttctaagtcttcacacgtattattgtcaccatccatgaaactcccttcatacctccaccccttgctgaattgcagctggctgattccttcagggatcacatcccccaggaagtctggggcaaacctctgaggcccagctatcccagtctcatggcccttcctccaacacacgtgtgcactccaccctgaggcctgggcaccgctgttgtttctgcttagaactcccttccccaatctcatggcttgccccacctcctttaagtccttattcatatgtcaccttccccaggagctcttcattaacc

SEQ ID NO: 475244 - DNA, 1000 bp, Homo Sapiens
ttttttttttaatggatagccagttttaatgaacagaggatactgattggtataaaaaggtgtgtttgtcactgaggtgtcctcattttctagatgaggagttgtcttctccatggtcttgaacgcctgcttcgccatggcaccagcgtctgggtgcacgctggctgtcgccacagggcaggagcttcctctgcttccctgtgggctgggttcagagctcctcagtgtcctggcctcccaggtgggatcaagcagggtgggtgcagctgcagcgttccaggcaagagctcaagctccagtaccaggaacataaggggacataagggcctcaggcaaactagggttacgggccactgccccaagagttgagtgggccacaagcaatccccagtgcccaggcgcttccccatgagagccgccagcaggcaacggtgtgccaggccggcctgagcggggccagtacacagtgggtgcgaggcttctctcaaatgcgcgctccagctcatcagtcttagggcttctgaggcaacctagtgggtcctggacttctgttgctgtggggcctcaaacctgttgagtagccacctcagatgaccagaacccacctccagagttcctatgaccaaagttgtctagagccgctccggacactgccagggttgctactgacaggaatggggtccccagagaaagccatgcccacaggcatccaccagctgcagacaggcccggcccctgcatggcctgccttggctgcaccttgtacatcctggatggcatctgccggccacgggctgagtccccacacacacagactggccctggagagagcaaggcaagccccctaacctgggacaagtggacactgaggactcccagacccagccctgggtggctccagcttgggactgctcccttaaggctcgttcttggccctcactctcctccccttcctggccctcatctggacccgcgctttctgctgccttgtggtcctctg

SEQ ID NO: 475245 - DNA, 1000 bp, Homo Sapiens
tttgggattacagcttttttttttttttaattatagagacagagtcttgttatgttgccctggatggtcttgcactcctggccttgagtgatcctttgttggatttgttgggattggatgtagaagactttattcagaatgctgctcagagaatcagccagaatgagttgtggaatctgtacattagttttccaacatctgaataaaccgaaagattttctgggtgaaataaagccctcttgcttagcacatatccagttcttcccaacaagagtctctataccagtactgtccaatagaactttccgtgttgatggaaatgttctatacctgtgctgtccaatacagcaacacctggctacatgtggctattgagcacctgtttcattcggaactgcttgcagattttaccattttcagcatgtactgactttgcctgccagtcatatcttttggaaatctttttcttaaggttcacatagctttcattctctactataacaggtgcaggaccgtcatcctcatctgactcctcagattctgatgctttttcaacttctggaatttgattagaaacaaaagaattatttggaatcactgttttatgacaggcaggattatttattctggtcctagagggtactggcagaaagttcacaggagggtcactatacttgtggtgggtattcgttagtaacttgactatttccgactcttcctctaaaagggttatcaaagaatatacgacaggttccgaagtttccgcaaatgtcaaggccttgtcataaagaaactcagaaatatgtaaacgacaagccagaggtaggttctcattggtggaataaaatgccacgagcggagcttggtagggatatttgtggtctttagaaaatcgaatttcaagttcatataaaaaagatgcatcttcaatagcattaagatgagaatcatctacacttctttctattcttccaacaatttgatttgggggcacttcatg

SEQ ID NO: 475246 - DNA, 1000 bp, Homo Sapiens; identical to SEQ ID NO: 343908

SEQ ID NO: 475247 - DNA, 1000 bp, Homo Sapiens; identical to SEQ ID NO: 343909

SEQ ID NO: 475248 - DNA, 863 bp, Homo Sapiens
ttttttttttttttttttttttttttttttttttttttttttttttttttttttttttttttttttttttttttttttttttttttttttttttttttttttttttttttttttttttttttttttttttttttgggagagacagttttgatttattgatgttgctttgtgagaacaaatttatagcctggggaagcatcttccaaggggaatatcgcatggctggaaaggtcacacgccagctttgatgtcgggtggcaggaatgtgggcaggaggcagcgctgccagctgctgtttgtcaaacacacaggctacctgctggccaggcctttcccagcacctgcctgtaggaccccgggtggcatgcacactattgtcccagggaggagaggcagggactccccaggtgctgccccttcccacaccagtgtccccactggacactccaaggcccgcagtgcactgcagtcctgccccttctgcacaggctggagactcccagagatcttgtttgaatcaactccaaatccttcaggtccttccctgcctcttatcagaggccgctggaaacacaaggcctgcttctgtggaccaggggctcctctgggggtggcctcagccacggctgagatccctagaagtccaggagcagctgcggaagcaccttctccagctggtccacgtccacacggagcgcgtcttctgcctgggcctgccgcacgccgcggactgctgcttctttggtcttgtcatccttgaagtgcaggtgcagcagcctgctcaccagctccttccggaagccggatccagctcctgctccctccatgaccgcagcctcaacgcgcgcccaccggaaccccgc

SEQ ID NO: 475249 - DNA, 1000 bp, Homo Sapiens
tttttttttttttttttttttttttttttttttttttttttatcacaaagtgcaaacgcgctgtatttccaaaccccgccgcgcgcaggcggccgcagcgttcacggtgacatcgcaaaaggcgagggggagacgcgcccgcgggaccccttcccggtgtgctcccacgtggcgtcgaccgggaagaaggggccggtagggagcccttcccaggcgcctcccacggggttcccccgcagccgcgacaccaccaacagtcgccgcaaccgccgcgtggaacagacgacccgggtctcaaagaggcggcgcgggcgggacgcagcccctggtccatctcgggcgccgcctgatgcactcctactgcgcccgggtcctcccggcctgtctcactttggggggctcagggtcctcacgggggacgcctgcacgtaagccaggacggcgttctgcaggaagctcgccctctgggcctcctcgtcccggatgcgggcgatctccgcctcccggagccgcagcttctcccggagagacgcgttctcgctctccctgtccagcagcgcctctcggtggtcgctcgccatcactttcagctggcgctccagggccgccgccttctccctcagcgcctcctgagccgccagctccgcctgcagccggccgttctgctcctgcagctccacgcgcaccctgctcacctcggccaccctttcctggtccttgaggctcagctcctgctgcagctcttccaggcgccgccgcaggccctcaacttgcaggcccagctggctgacccgggtctgggcctcggccaccacctgcttctgctgtaggcaagcgccctgcgcctcgtcccgtgcctgcgccagcagtctcagcttgtcctccaggtgagccaggcgctgttgctcctccaggcgggcctggctcttggccttgatcagctcctcctcagcctggccacgctcgctgagtgccgctgctttcactcggctcagctcct

SEQ ID NO: 475250 - DNA, 1000 bp, Homo Sapiens
ttttttttttttttttcttttttttttttttttttaatgtattatattttatttattcatttaacaactattggatgctgaccatgagtcaaacattgacaagatgcaacagatacaagtccaagagcagatgctctttttaaaggaattcataccatgaatatataagcttatcatattaggaaatccaaaagctaaattaaaatatttcccagaagataaataggatttcgtgaaatgttatcatgccattatactatttttcagagaaatgactctggaaatttagtaaaatatttgttttgtggtcaagtatgactgaaaaaaataaacattttgttaggtatttatcaaatctagcaatttataattctaagtattatatccatcaatgtgatgaagagtccaaattagttataaaatcctattctaaataaacttcttcaaaaatgataaattttgaacttctgaagtccatttttttaaattctgtcagtttctgcacaataatcaaaatgtaaaatgtaaaacataaaaatgttaattgcaacaaattacatttcttaaacttttctataaaaactcttcaaggaatgaatagaatcttctcattagttagggtggtttagtattttcagtagggtgacccctctttttgtagatgtcatgtttatagtaggtagtattcatgaacaggcaaccgactgtctgtgagtccaactagaaggatctgatccatttttagtgacttggatgaaatcatcctcattctcatcacagctttcgcagttcaattgttgggctgtttctgacaggctttcagcttgattgacatctctctgcttattgaagctttgaagtgcaacaagacgatgatgtattgctgcatacaaatatgctgtatcttgggcactggcctgaattaaaaatattttgatgctatagtcttctaaatcagtagctgttattcgtacatttttgtggtttgctctttgaatct

SEQ ID NO: 475251 - DNA, 827 bp, Homo Sapiens
tttttttttttttttttttttttttttttgacaagaagtaagcgtttaattgttgatatccgtcattatcagaaacttcagtgtagttttgcaaaatacatgtgcctgggcttcggtctcctgaaactccaattcagtgggacttgtaggagagccaggtatcatgttcgtcaagtaaaatattgtcaggcttcatatccctgtgaatgatgcgctggttctgcaggtagtccagggccatgaccagctcacagatgaagagcttcactgtttcttccttgaagtggacgttctgttgcaggtgataacgcaggtctccacccagcaggaggtccaccaccatgaacatgtcttcctcatcttggaaggaataccacaaattaaccaggaaagggtgctccagaccctgcatgatctggagttccttgaagacatttctcacttcattgcgctccacgcacttttgtttattcatgtacttcattgcgtacatcttcttggtatcattcttctgtacaatgcagaccttcccaaaactgcctttcccaatggctcgcaaaatttcaaagtggtcaaagttgacatcttcattttcatcaaacactggtggttttcttgaagtgttggctcccatggttgaatctgcccagacctggatcctcgatttatactatccgggcagaaacacccatcttcgctcaaaacatgtcccgaagccttagttggatatctagtctcgattcttccttcattcctcccatgaggctcggagcgatgctttcatccagggaacagggactaagagaagaactccaagagcaaggccc

SEQ ID NO: 475252 - DNA, 1000 bp, Homo Sapiens
ctttttttttttggataagccacagcggtttattcgggtgctcagctggggccgacacaggggcgagtggggtcagtgcaggggaggacagcaggcagctgtgaagctctcgggtccattgcaggccaggtgacggcatcagctgacaacgcagcggactccatcagctcccagctccgggccaggaggggtgctcggggctggagagcccacaccacagccagctgacggttcagcggccgatgcacgggtagcatcactttcggacagaggtggcgatgatgatgatgatgacaagcagggcagtgactccagctgataggaagcagcacttgatcttgtgtctctggagttggtgccggctggctccagccaggagctggcgggctgcctccgcatgcgaggacgcagcctcaaggctggcttcaatactatcaacagcttctccttgctctgacaccatggaggccaagtccttgatgatctgattcacatccagcaagttgctctccatctgcaggatggcctcctcccgcagccggatggcctccaggtcctcttcagtgatgtccgggagcagcgcctgctcctggccctgccacatgttgtcactcccgttaaagaccttctcatcatcagccagctcggcaaacggggcctggggactctgtttactgcccctctgcgccatgggaagcagcgctctggacttttctgcaattttcttctgcaccactccatagcactgaatggcatctgagagctgggttttcagccggtccagctgaggacgctcctgctgcagacgctcctgcgggcaggagctgcgcagcagctcggccatctgcttcacggagctggcgctggctgcaatggtcttgttggtctcctgctgtgccgtgtgcaggctgtcccgaagctcctgcgtgtcactcggtgtccctaaggactgaaggctccgctccaaggaggtcacactggagttgattcggaagacgtt

SEQ ID NO: 475253 - DNA, 1000 bp, Homo Sapiens; identical to SEQ ID NO: 343910

SEQ ID NO: 475254 - DNA, 1000 bp, Homo Sapiens
caagttgctttttccctttttattaaaaatagactcaagcactttatgtatcatacaaaagtttcattcgctggtggcagccacgggaaagactggccccgtagcactgattttccacctcccctccaggggactgggtcccaggagcagtgactgggcctcagagaaagcccataaagactgcttactctggaagcagccgactaggggctgttccgcgagcagctgtccccaccccacccaatggcaaaagttagatactcgaaagtgcctcttcagtgccaagataaactaacaagtggagtgaaatggaaaaccctttgattattttactatttcccagggcctgggatttgagttttccctgcactcaagtccttttccctacaaataggggtaggaaacttcatcctcagagactctggtctcctggtgtctgagaccagaatttcactccaacccaagtcttttctcatctgctgttctgtggtccatgatctacttgccctgtgacccaaggtttgtcctctgttcactcaaaaagaggtggagcaaaaacggattcctcccacaatcctctctgcctgagtctatgccctgccatcgcttccatgttcaggatcttgggaacagaaagacccacaaccatccctttcccccagttctgtctctccctgactgctgcccactcctgagccttaacacccctggggtacccccagacccctgttctaaagggtgcctggtagtggatatggtggaggcaggggaggggttggttggagccaggtttcccccaggggtggggcagtactcatgctggtatagactgcttggcagggccgtggggagggaggggcatgcggaggaagggcacaccctgcctgagcccctcagtcccagccgttgtccttcaccatgtgtgacatttcaatgatgtatttcccttccttgtacttctggctcgtctcaaaagcttgctcatatttccagcccagtg

SEQ ID NO: 475255 - DNA, 1000 bp, Homo Sapiens; identical to SEQ ID NO: 246584

SEQ ID NO: 475256 - DNA, 1000 bp, Homo Sapiens; identical to SEQ ID NO: 343914

SEQ ID NO: 475257 - DNA, 1000 bp, Homo Sapiens; identical to SEQ ID NO: 343915

SEQ ID NO: 475258 - DNA, 1000 bp, Homo Sapiens
aatttccaaaattctttaattggtaagtgtaatgcccagcaacttaaaaaacacacactgaagcacagcaactcatattgataggtaaaaaaagttacaggacacaaagggcccgtactaatttgacaaaatagaaagaccaggtctgttgttctttctctgatatgatttatcttgcaattgctggatttgagtggcaatttggaagtatcatctgataccaatgtgatatatagctaggaaagaccaatgataggtgaagtccttaccataaaatgtttcgaagagcttctcaagacagttgtttctatttaaaagggaagatataaagagctaggttatctcaaacaatcctgtgaaagaagtttaaaaagatttaagaaggagaaagagggaagggaagcttcctgggtatgacaccatttgcaaggtcacaacgaacaccccaacggagtgcagaccttttcttctctgttggtactagataattgtttgggacatatatatgctgaggtttggattggggttctgctcgacaaagcatctgctctcggacaccccagcgtaattcctttctatgatcttcaccaggtaaacgtattgagtcccagtcccgtttgtactcaaaataccgggctacccggtctgtcttgccccggtttcggcttaactggtccagctttgggagaataaaggacttgggtctgctggcaacaatcaggtcttgttcgtaagctggagagcccattccttctctttgtagagagcaaatgagctgatcttgagaaattccttggtattcatgtggtaggttaaatttttgtgaaacatcaaatgaagattccttgtcttcctggaactgtacattcatcagcctttgtcttaagtcccagagatcctgatcattttctgtaccagattctgattcactgataatcgactcatctgttactaatacttccccatctggctttctgcgcagcacctttctcttcatcac

SEQ ID NO: 475259 - DNA, 1000 bp, Homo Sapiens; identical to SEQ ID NO: 343916

SEQ ID NO: 475260 - DNA, 1000 bp, Homo Sapiens
aaaagcagactttttattttaacaagaaagtcataaaagtgaattttttcatgaaagaaatagtcttcatttaagaaagtgttgccgttaaagggttatcttggcactaatgattggctttgggtgattttaattctgagatgtctgtcataaaggaaattatgagaccattaaattgagcttctaattttctgtaagaatacagaggagaaggaaggtaaaactgttaagggtgagcttaagtaatacacagatcctagataatcagttgcattttgtgctaatgtagatcacaatgcttgtgtttgaattaatgtttttttactgataagaaagatttgaaatggacagtggaatcaatcaacaacatttcttgggggtgcatttccactgatgccagccacagggacaaatcttaaaccccaaattgttcagtgcctgtaggcttttctcattattatctgccacatggaaataaaatgggatttctttctgagaaagatacttttcaagatggtaaccaatttgcaacatgttgccttggtgtctgtatttggggacagtataacccattctcaactcacaggaccgttccatcacaatccaagagacaagctggccctctggacccagcacgccaaatcctagaaaatcctggaggcagcgttcaatatatttcaagctcctctcatttttcccaaaggcccagtgttcattcacaagacctgcatgtgaagcatctaagaacatgtttgaaaagtttcctttcttgttatcatcatccacttcaaataactccatcttgtcattacttgaggtcttgtgtttctttggtaattccggtataaagaggatggttttcatgtaatctacctgcactgattttgaagttgcaacctttcttattgcttcatccaagccctcttggcaaccttggatctgcaaagtttgctcccagctgattacattggagtatgacaggacttcctctaatttgtca

SEQ ID NO: 475261 - DNA, 1000 bp, Homo Sapiens
ctgcttcaatgctctttatttcattaggaaagtagctgggcaggggtgttcccctgggggatggagtgggggtacagacagtagcctggctcctgtcccctaggattgacaaaccaagggctcagggctcagctgtgtgccacgcagcggctgctgtgaggtgtgttctggtagaaggggtcagctgaggtcagggttcttcccacgtggggatgcaggtgccgcaggctctccatggggttgggggtggcctccatgcagctgaccggctggctgagggcgtagcctcctggcatctggggctggatgccacctcgagtccagccttcctggtctagacccttggggatgttctcaaagtacccttggttgtaggtggtcaggtatcgctgatccctgtcaggatcacaggggctccggacatacatggggttgttaaggctgaaccctgtgggctcctttttccccacagtctcccggccaagcagggcaacgtttgtctgttgcatccgatgaagtggctgaaactgctggtgactcacgctgctgggttctgggcagggagggggcactctggggttcagaatcctttcattccctcggctgaaggctgtttcccgcttggagcctctggccaacacaggtaggaactcatctccatgtaggtgagtcttggggaggaagtctgacttggtgacactctggcctgggaggagggcagggtccccagggagggcctgtgagggcggttggaagacaatggggctctggtgggactgtttggtgaagccactcccctcctttgcgccgatcgatttcttctgcaagaaatctggctggtctagagggtccctgagatacttggaattgtactccgacgtcatgaagcgtgggccatgtcggaagttctcccgctccagcgggtcctggccctgctgctggcggagcagaggcacttccctgggctccagccccgtgatggcctgaggcccgtgctcct

SEQ ID NO: 475262 - DNA, 1000 bp, Homo Sapiens; identical to SEQ ID NO: 343917

SEQ ID NO: 475263 - DNA, 1000 bp, Homo Sapiens; identical to SEQ ID NO: 343918

SEQ ID NO: 475264 - DNA, 1000 bp, Homo Sapiens; identical to SEQ ID NO: 343919

SEQ ID NO: 475265 - DNA, 1000 bp, Homo Sapiens; identical to SEQ ID NO: 343920

SEQ ID NO: 475266 - DNA, 1000 bp, Homo Sapiens; identical to SEQ ID NO: 343921

SEQ ID NO: 475267 - DNA, 1000 bp, Homo Sapiens
tttttttttttttttttttttttttttaagggtcaaacactggatttagaacagtcacatgacaaaaaacatcaactggaaaagggtcgccagagtgcagtcagcacatgttttgtgggcctgtttatgctcaggattgtcttggaaagtccaaagcaccagaaaggtgtagcatgtgcattaagggcactgctggctgccagttgtcaagctcctcaacctcttgtatctcatttttcaaactgttggccttctccttcacccagaaaggcaagttgggaatttgtggaagaggctcaagtggaataaatgtatcaaatttcttttcataaggcactattgaaaaattcactggtgggagcattgatcctgctttgtggaagcctttactctgttctgggtacatatatggattgtcgcctggagttaactttgggattccattcctgggatcaatatcgtatttctttctcccaaagcacttgtccaccgtcctctctgatagagacctcttgttgccgaggaagactccattaaagaagcactgctttccgacgtggtaggtgtggatgttgctgctaaaccttgggtaaaatgtccactcaggacgatgcccatctttcgtctgcaacttaagcaggctgaattcctcaggatatttatccttttggacttcaggcaacgacatttcagaggagtgatcagaatgtgagaaggagagtttccgatccaagtcagcagtggtgtctacgtaagcagacactctggggaggccaggaggctcactgacacttgggcctgtttccactgaagatgaggaactgacacttttgccagagggtgttgtgttggcaaaacatcccttagattccagaaaatcactgcaattagcactgtaggtcctctccacctcggtcatgccagagtcccttttttctggaaccttctccagctgtctgccgcaggtcgtgcttgagatggaggggagacggcagccccg

SEQ ID NO: 475268 - DNA, 1000 bp, Homo Sapiens; identical to SEQ ID NO: 343922

SEQ ID NO: 475269 - DNA, 1000 bp, Homo Sapiens
tttttttttttttttgtttctctcctatactcatttattggctctccttaattttattccgtgtttttaaagtaggaacgactgggctggcaggaggagggccgggctctcaagtcctggggatactgcaggctgacaatgaccttgcaggcctggatctgaacatcttcctcagggtggatgaccagggcaagtagtcggtctgccagtcgggactcttccccaaagagggattcatgcagggactgttcgttgtaatgccatttcaccacgtggtagtggggtgcgttccggccctcactcagccgctcagcaaacaccagtacctcatacaggagactccctgactgtgtgggctggaacaggtttaggaagttggagtgaacctggcagttgagaatgtcatagagaaggtcattcttctgtgccaggtagctcagcagtcgtacggcttgcacctgtgctaggatgtagtctgactgcaggatctccatcaaggcaggcatcacccgtcgcagctgtggatgcacatagtcgggcagtggaaggttgttgaggagtctgaggcccgcaatgtgcagttccgtgtcccagatggtggagatcagttcgagtactttgatggagtgttcctggattttgagcctgaattttctgatgccagagaaagctttaagtgtattcagagcttgggttttgacactgttgtccttgtcatccagcatgtagcccagcaacacgatgtcatccgtagtacaagcagaggcctcagcctccagcaagtacacacagcgagtgatactgtgcaggatcatgctcttggcgtactcatcctgtttgcactccaaagagttgaggagcctccggagctcacctgagtcccgcccgtgccgctctcgctcgactgccaggcctttgggccctcccacagcagaggcctcgggagcaggtgcctcctggggcagagccctctccccagggcccggacactcacgggcga

SEQ ID NO: 475270 - DNA, 1000 bp, Homo Sapiens
gttgcttgtttacattgttattgagattcagctagtaaacatacttgcaacaaatggagaaaacttgccaagttcttgattttttgttcttcctgcttgaggctgaaggtcacgctgcttggtcttcactgctgtatgttgactttttcactgttaattctaaggctcctttagatgatgttatgttgtcaagctctgtaacagggtttccttccctatcatagccaaaccaacgtggagggtcattagtgttgtattcctgctgctgaactttagatgacattctttgagctgccttcttggaaatatttgtgcagtattgcatcttaaggatccggagttgtttgcagcctatctgaaggtcctcaaggatttggtcagtaagcaagacacaaccagagatatccaaaatgtgcaggtaatggcattttgccgataacatctccattgctgagtcagtaatctttggacagccagcaatgctgagagatgtgaggttaatgcagtaaatggccagtgctttgataatcatatctgacagctgggagcaataagagacatccaaatgttccaagatcagtgagcttttgcagaatgcctgaattccatcatcagtgattctataacattcagatacagaaagttccttcaattttttatgtctggaaagcacattcaaaccctcattagagatgtctgttccagagagatctattgataccaaggaaaagatgtttacaatatatccaattccttgggcagtcaaatgttcacaatttcgtaaactcaagtagtttaaattagggcagcgctcagatagtttcataacagaggcatcacttagccgcacacagttgcttaaatttagctctcttatcctcatgcttgcaggaccatcaagaaattgctttagtcccatatcaccaattcttacacaatttgccaaattcaacacagtcagttgcttcaaaggtgaaagggatctgaggctgctgtctgt

SEQ ID NO: 475271 - DNA, 880 bp, Homo Sapiens; identical to SEQ ID NO: 343923

SEQ ID NO: 475272 - DNA, 1000 bp, Homo Sapiens; identical to SEQ ID NO: 343924

SEQ ID NO: 475273 - DNA, 1000 bp, Homo Sapiens; identical to SEQ ID NO: 343925

SEQ ID NO: 475274 - DNA, 1000 bp, Homo Sapiens; identical to SEQ ID NO: 160752

SEQ ID NO: 475275 - DNA, 1000 bp, Homo Sapiens; identical to SEQ ID NO: 343927

SEQ ID NO: 475276 - DNA, 1000 bp, Homo Sapiens
aactttaaaaggctttaatcataatgcaggacacaggtaactcctctggctccttatttcgacaggctataaagacagccctggaaaatccagagagcaggcccaggtgcggcccagtgggtgatatgagctggctccggcacagacaccagcatcaggccagccctaacacatcagcctttggcggtccagctcattttgtgggtacccgcaacacctgagtgggaggaacttgcagttcagagttgatcttggagttcagatactgctgcagtagcgcctgcagctctgtgttctgctgctccagagaactgttttccagcagcagcttggccctctgggtcaggacaaggtggtacttctccaaggctgtgtagagggcatcccagaggttctgcttggaggaagggatcactgtggtcagggcctgccagtactccgagtccttggagttgtcacgcacattcttctgtaccctcagcggggcccgcgagtccctaggcttcttcagacccatgacgaaggcctccagaatcttgaggacatcattggggtggatgacccagggggagggtggggtctcctcctcttcctccttctccccttccaccaggctttcttccttttctccctccatctccgtctgctctgccagctccaattctgacctcgtgcttgtctcctccatgctcgccttctccatgctcgcctgactgcagggcttgatctggaggctggaagataaacggtgagctcgatatttaaggaagaagttcaccagtttatacaagtcatcctcactttcaattccaagggcggagaagatggcatccagcctcagcagatagcattcattctgctccaggggcaggagaaggctcagcagcttgctctctatgaggaaccccgactcgtcacacaggagcatcaggatcctcttggtagttttttcagaaatttgcttcggcaaatccaggtaggactctggttccgcggcggc

SEQ ID NO: 475277 - DNA, 1000 bp, Homo Sapiens; identical to SEQ ID NO: 160753

SEQ ID NO: 475278 - DNA, 1000 bp, Homo Sapiens
ttttcgggtgaaattacttttattgatggtgagcgcaagcaggtgtgagtgactgcacctctttcagaggacacaggactgggcttaaggaagggagggccagagcgcccgccttggtggatgtaggattcgctccttattagggcgtgagtgctacattctgaaaggatttattttgggacaaggcacaagcacaggggaggcaggcaacaccagccctcaggctacactctccatttggagcagagcttcttcggcagccccaggtctcccgggatcttcctcggtgtcctgcggaggctctggctccagcgtgggctccagcgcaggctgggcttccggctgggcttcagcgctccggccaggcccaaggcgaggcggcttgaccggggtgggcggtggcgctgcagggcctttccggcccgaaagggcccttcggaggctctgtaccttctgcaatccggtgcgccgcagccgctgggccctggactccaccggctcctcgtccgagctctctccaacttcggcctccagctgctctgggcccagctcggactggtccgccgggcccaagggctctggtgccttctggaaagcgctggctgggacttcaccctcctccttgaagagcagaacgtggagcttcccgcgcgccaccagcagcccgtggttggcctccagccgctgcacctgggctgcgcggcgcaccgcgcgctcttgggcggcgttggcgtgcgagctcacgcgctccgccttggccagcagctgcgccaaggtgttgctggtggtgtcgtggctgcgactcagagcgcccaggccgctctggatgcggcgcacggaccctgccaggcctccctgccttcgagccaggcctccctgccgctcccgcagagtctccagcatggaggccagcttctccagcagggtcaccaccgtcacggcgtgcacgggaccccccgccggcgcctcgggcacaggcccccgctccaacgcactctcc

SEQ ID NO: 475279 - DNA, 1000 bp, Homo Sapiens; identical to SEQ ID NO: 343929

SEQ ID NO: 475280 - DNA, 1000 bp, Homo Sapiens; identical to SEQ ID NO: 343930

SEQ ID NO: 475281 - DNA, 1000 bp, Homo Sapiens; identical to SEQ ID NO: 160754

SEQ ID NO: 475282 - DNA, 1000 bp, Homo Sapiens; identical to SEQ ID NO: 343932

SEQ ID NO: 475283 - DNA, 1000 bp, Homo Sapiens; identical to SEQ ID NO: 343934

SEQ ID NO: 475284 - DNA, 1000 bp, Homo Sapiens; identical to SEQ ID NO: 343935

SEQ ID NO: 475285 - DNA, 1000 bp, Homo Sapiens
tttttttttttttttttcgcagcaagtgagtgtagccattttattgacagatgtttcagccacgaccaatgatctattattcagtacaagacacattggttgataactcttattccaggacttctcctggctggaagcatcaggaaaggtgcaaaaggcaaatgagatggtcaggtgggtcagcaggcaggtagcaagcaaacaagtaggcatggtggttagaatctctgggatctcttgagcttgcggatagcagcattggtgtccccttcagtagcaatgagtgcctgtagattggcatggtggttcccaaatcccatggcctggagagaatccatctgtttgctaaaacaaatctcaggagcttgcagagggtgggaagggtccccatccggggattgtagcctctgcaggactgttccaggcttgtggcagcactcaggtcccttgggctcagctgtatctgaaacattccaggaacagggcactgtgtcaggatagctgcagctgggggcaggaagccaacccaggccccataggtagggtgcaacccaaggcagaagaacaggagcctctgtggccagcagctggagggcctgctcaatctgcaatattgcttggaatgctttagggttgcctaagcactaagcagatcagaaatctgtgtctgctgcaggaatgtgggcagctgctgcctccactgttcactcagctggggcatacttgtgaacaacataatctgagctgccaggtaggggttgttcataagcaactgcatcatgcctcctgtgatctgggagctgctctgctcatctgacagctggagatcaccctttaatgtctgtctggagctacttagagaaacagtggcatccttgtattcttcttgaagctgctgggtaagctctatgctaggtaaggctggtatcccagctggctgccgagtggcacagatatggctctggcccttggtggaaatcatagcagtgttggctttgga

SEQ ID NO: 475286 - DNA, 1000 bp, Homo Sapiens; identical to SEQ ID NO: 343937

SEQ ID NO: 475287 - DNA, 1000 bp, Homo Sapiens; identical to SEQ ID NO: 343938

SEQ ID NO: 475288 - DNA, 1000 bp, Homo Sapiens
ttttttttttttttttttttatgttacactgtgcatttatttacaaagaggttagagaaacacacagaatctggcccccctttgcactggggagtcaccatcgtcataataaatacagtaattttaaaaaagaaaaaaaatactagattggaacagctgagggtcatcaggcttcccccattccctctcacagggagtgggggtcatgagatagaaaccatcttccttcccctcttctacctccgaatcctccataattgtccagggatcgaagtgaaagagtccttctttccaggtgttaccaacccctacttgaccctcaaaacccccaaatcagtgctccttcccttcccagggcactctgcagggaccacctgagtcagacacagagtctctgaccagggtgccaaggggatatcttaagggtccagggacatggagggggcactttgtgaatgagagggggccatagctgggcaaggaaaggaggaatgagagggctcatcaggaatgagagggagagcggtgaaggggaacaaacagactaggcttctaaactaaaacggggaaattcaaaccgaattaccccttttgcatacatggacacttactgtacagatgaggaaagtgacgcccagagaaggggaactgtcttgcccaagggcttccaagctagaagctgaactgggtcaaacagggctcctccccattcctctcggtggtggtgggggagccttttcaaccaagactgttaggagtggggagagtgaggggggtctttggaagcagagaaaacgatggtctttggaaggtagatgtggaagggtcagtggttgggagtgtggaggtgcagaggccatgaagggggagcccaagcaaatccccaaactcacactgtagtcatgaccttgagagaacccgaacggaaacgcagtatctttttcttgagcgcgtgggaagctttgattttcacgaagactttggcggggcctgcgggcgc

SEQ ID NO: 475289 - DNA, 917 bp, Homo Sapiens
ttttttttttttttttttttttttttttttttttttttttttccgggcacacaccttggccgtttatgtatacagaagtggggtgccgggcgggaagggcgcggggaatgagggaacctagaggccgatgacgtcgttcagctcgaggtccgcgttggggcggcagcgggcctgggggggctgcgtcccggggcggggttccgcgtcgggcttggcggcagccgcctccgggcgcgccgcgtccatgacgcccagcaccgcgtccagcatggagggccccagatccaggtggaaggacagcagcgggtcggcaggcgagggcgctgcggactgcgggacggcgggcggcggcggggagcgcggggcccccgcggggggcgcccggggctcggggggcggcccgccgccgtggcggctcaggaacgaggtgtccccgaaggcgtcgccgccgcgccccacgtgcagcgtgtgccggaagtcgccgagcggcgcggagatggacagggcgccgcgatcaggccgcttcttgggctgcgcggggcccagctgcttcagcacgggcatctcgcggtcctcccagagcggggcgggcgcgcgctcacgactccagctctagcccggacccctggttccctggctccgagtccgcctccgtctcctaatccccggcccgcgccttccttcttcctccgggcgggttctcacctgcaccgggagctaaagtgtcagcccctctcgggggccatggcaggagcccaggcagaagcggaatcaccgcccagtccccaggcagagagggttttggcacaggcccctcccaggctttcttatcccccaaaagtttgcctctaggagttaaaggactagaaagcagtggtggaaaagctgaggcccctctgggcggagtgtgggggcgg

SEQ ID NO: 475290 - DNA, 1000 bp, Homo Sapiens
tttttttttttttttttgcaaggacagagtgaatttattccaagaatgccagtcctgagaacccacttcccacaggcaccaggtcacttggcacgctccgtagttttgctagttaaggcctgggatggcagtgaatcactgggtcactgctaccaacttggcaagggaccgccaccctcactcccacgctcacatgagggttgagtgtaagtctacaactctaagccatagggaatgcctcaaagggcctcttcagggttggccttgctaagggactcccagccatatgccaaggctggctgtcaaccctttccagggcccttgtggaatgagaaggccagccataggatttgtaaaggccacgtgggatactaagcttgggaccttcctatgtccaggaggaacagaggctacatctaggcccctgtccaccaggtcacagtcctgtcccaggcactctctgcttgcccagatcttgctctggtcagcttcctttgggagcagattcgcagaggtgggtggggagtaggaggtggaggttcccatggggcaaggaaggtgggggacactgtagctccaggttttctcctgttgcagagagaagccagcttcatgggaaagggcaacaggttgaggcctcggtccccagcagcttcaggctcaggccctgagtgtccacttcaaccaggtggatgctgtaattcccaaggccctcggtcttggccagcaccgcctccaaggcctccttttgctgtggctccttggtcaacagatagagaaagcctccaccgcctgccccagccaggctctggccatgcacgtggggggccaggacatccatcatacgccgcacagtcaggggctcacagcctggagccatgagcttcttctgctcccagtacgaggtcaggcactggcccagcagaggcaggcttccttggcggaagccttcagcacactcctcagtttgccgtaccaggctgtgggcattctgcaccac

SEQ ID NO: 475291 - DNA, 1000 bp, Homo Sapiens; identical to SEQ ID NO: 343940

SEQ ID NO: 475292 - DNA, 1000 bp, Homo Sapiens
ttttttttttttttttttttcagttctcagtcctctttttatttgaattctcagcaatattcacagaatcatcactctccttgaaatactttcttcctacttcactggcctcagtctcctttgctagattactctgcccctttccatcctctaaagttgggagaactccaggatttggtccttggtacactttgaatatattccctccctaagcagctcatccggttctgtggatttatatacacacggtacacagtgaaaggctggtatacatttcagagtcaatggcatacataaggctgactacagctttactttgaaaaacaaaactaagtatcttaacattttattttacattatatttaataaaaataatacttacaactacccagtaactcctagaacaaggacaaactcaagttttgttttggtgacagttttctgacaagattaatagagcacaatggacaggtcccccatttgactttcaaggaacaatcataaaacagggtaatctttactgcatcaaattcccaaaactacgcctttgaagtaagttgacataatacttgttgtttcttctcaaatttttaatggttctccacagtatgctaggtccttattttctcattggctgtaatttgacaagttctccaaaagcactatcatgaacttaattagataatactttccagctgtacttaaatcagaaggatcgtaggcctgataagcaggtcaacctgaagctaccaggcagctctggaggctcccgtggccatagctaacagtgcacaggagggcccctggcccaggatgagccctcagaaccttttagagagagtgaaattcagggtctactgggtgtccaagctgcagagtggagcgtgagaggtcagctgccatgtgatagaaagagctgacataagagaaaagacccccacacagtgaaaagctggaagagaaacaaaactctcaacctgacagcagagttcctggttcc

SEQ ID NO: 475293 - DNA, 1000 bp, Homo Sapiens; identical to SEQ ID NO: 343941

SEQ ID NO: 475294 - DNA, 1000 bp, Homo Sapiens; identical to SEQ ID NO: 160757

SEQ ID NO: 475295 - DNA, 1000 bp, Homo Sapiens; identical to SEQ ID NO: 343942

SEQ ID NO: 475296 - DNA, 1000 bp, Homo Sapiens
tttttttttttttttttacatgaaaaaggtatcattttattatagaggtaataaaataaagaggtaataaaggtataatgtcattacagaaaaatcagtggaagagaaaagaccaccaaactgttctttgctataattattatttcatgaagtcttatcagacgtgtatttctctcctctcatgtgcaggcaccttcctgggcaggaagcagacctagcagaactgcagtggtggccctcaaaccagcaccccctcttcctgacagcacaggcactccccccggggcctgcgccacagtgagaccagctctatgcagatacagctctgtcctgtgagggggtgagacacaggctctgctggggactgaggctccggctgcattttcttacctattgtagttgtccatcctccccaaatatggctgggggcagaagagagtggacacattcacagacgggtgggtcagtaccaggacatccaggattgccttggttccagcaagatgtctcaggatgggctttccacagggaagaaccagagaagccagggcagagttggggtctctggactaccagggctcagggcatagaggtggggttggctcgcccctgacaccaaccccaaggagaataaataaataaatagtgtataattgtgcagtcccctagcctggcttacccctcaacaaggggtcactagtcactgtcgatctcagttcctctgcatgtcatcctcccagaaacagaggctggctgccagtaggggtcctacccgaccctggggattgaaaaaccagggctgagagtgcccatacagttcaggtggccagggcaggcaagcgagtggaggtctgggcccagcccacaggtgagacaaggtcctgcctgtctccccatcctctgacacatggctcagtataatgaagccacatgcggcctgggggcatttacctccaagttgtgtgacacctcccctctcccatgccttgctcttgctggc

SEQ ID NO: 475297 - DNA, 1000 bp, Homo Sapiens; identical to SEQ ID NO: 160758

SEQ ID NO: 475298 - DNA, 1000 bp, Homo Sapiens; identical to SEQ ID NO: 160759

SEQ ID NO: 475299 - DNA, 1000 bp, Homo Sapiens; identical to SEQ ID NO: 160759

SEQ ID NO: 475300 - DNA, 1000 bp, Homo Sapiens
tttttttttttttttttttttttttttttttttttttttttttttttttttttttttttttcctaattacaaatataattttattaacgtttaactacaacatactgcaaaatccctttaaaagtacaaatacaattttttttttttgagatgaagtctcacgctgttgcccaggctggaatgcagtgggattatctcagctcactgcaatctctgccttcctggtttaagagattctcctgcctcaggcacccaagtaactgggactgcaggcatgtgccaccacgcctggctaaggtttctatttttagtagagatggggtttcaccatgttggccaggctggtcttgaactcaagtgatctgcccacctcggtctcccactgctgggattacaggcgtaagccaccacacctggctatacacagaattttgtaaagtttgtatttaatgtgatgggtgtgcttgtctgttcataagttccttccagtcaggaacacatgaagataatgctacccgcatatctggtgcactattgagcctatttctcttctttgtttttaaccgtgtcaagattgaaaatcctagttcacacaaatatgtagttgtgaatggtagtaacagcaatatactcttcctacttagcagtggaaagtcatctttaatcttaatccaaaatgctgataaacttaatatcttataataattctttagtgtgaatgatgaactgagctgcaataattcattctcttcttcaggctccaagtttaactcaattattgattctgggttttgaaaagcaaatggatctttcatccaaatattttcctttaatgattcaaatttctcttccggaaagtaataattaaaagtttgagacaaagaagtgagatgcaacaatatctctaattttatttcttttaagcagtcttcattaataatgttctcttcgatgtgttgcaataatgttggaaacatatagtagctagggcggttacttt

SEQ ID NO: 475301 - DNA, 942 bp, Homo Sapiens
ttttttttttttttttttttttttttttttttttttttttttttttcaacaactgacatctgttttattttgtactagttattttagagaaaatgaaaccatttattttctgaaacctgtgtaagcttttacacatatgaaggtaaagggagggcccagggctaaactggtgtacatttccatgtgaataagccatcttttgaaaaccaaaacgaaagaatatgcacaataaatttggatccacattaaactagttcattcaaaaatggaaccccatcaatgccagcaaaggaggctggaaggttgtaaggccagagtcagcacagacccatggctccttgaaggcttcctgctgccagggcctccccagccacaggaccattttgctgattaccagggtaaggcagagctatcagccctcaagcagcttaattaaagccaggagtaagacatttgtgtaaggggtcaaaacaatcattttttaaatcttgcattcttttttcttgtgcacttggtagcttgaaatgaaggtgtggcatttctgcatcaaactttgacgatgaaggacaggagtacacaatttccaaaagaggaaatagagcttctctccttggagtgatgggactgagtcccgcaaactgtgaaagctgtctttgatgtggtccctacgttttcgttccagtgcattatgatgagcccgtttgtcagccgcagattgaaacctcggttgctcttcgtcgctctccacctcgatgtcatcgttatcgctcatttcctacggcccagggagcggccactgcagcggcggcggggaggggaaggggtgaaggggagggggaagtcaccgacaacaacaagccgagtcccccccacacacacactcactcactcactcactcgctctctcactcacacacacacacaacacgggcaagaaccacc

SEQ ID NO: 475302 - DNA, 1000 bp, Homo Sapiens; identical to SEQ ID NO: 343946

SEQ ID NO: 475303 - DNA, 1000 bp, Homo Sapiens; identical to SEQ ID NO: 160760

SEQ ID NO: 475304 - DNA, 1000 bp, Homo Sapiens; identical to SEQ ID NO: 157662

SEQ ID NO: 475305 - DNA, 1000 bp, Homo Sapiens; identical to SEQ ID NO: 160761

SEQ ID NO: 475306 - DNA, 1000 bp, Homo Sapiens; identical to SEQ ID NO: 160762

SEQ ID NO: 475307 - DNA, 1000 bp, Homo Sapiens
tttttttttttttttttttcacatgagaactgctataatcaggaggaagaccaatagcccatcccaaacaaaacactccgagtcacgacttccagaacttctgccatgaccatgggctttaaaccattccactgcttcctggaggtcaaatggctgagccttataacctagctctttcttggctttctctaagctaaaataatgtgtgacaccagttttgtaaacttcagtgcgagtgaggaagggctggaagttgtagagtcgacccaaaatgaagtgaaccatctctgttagaaaagcaaagcagtagaccaaggtcaatggcaggcgggtagacgggaatgtgtagcccaggccctcaaccagaggccggaagaactcaaagttgttcacgggtctgccatctgagatgaagtagggctgcccagaggcaatatggcccttgtcagctctcagggcttctgaggccagaatgtgagcctgcaccaagttatccacgtggacaaactcaaccaggctcctggggtccccgtagacaaacttgaacagacccttctcgatgtagctgactatcctgggaaggtgtctttgttctccaggcccatagatgccagctggcctcagagcgcaggttcttaagacaccgtcgcctctgtccaggggtgtagcattcgcctccagcaccttctgctctgcaattgactttgtccgagagtagtgatcagggtggaggtgaagaggcaggtagggcagagattcatccccatttctgataacttgacctccaaagatgacattgaaagtgctggtgtaaactaacctgggcacccttctcctttggcaaacctggaggatgttgtctgtgcccctgacgttgacttctttgatcaggtttcgattgagttgctcccgccctgacataccataagaggcaatatggaacacacaagtgacgtctgcatcctggaaggctttctctacgtcagacaggtggcggatg

SEQ ID NO: 475308 - DNA, 717 bp, Homo Sapiens; identical to SEQ ID NO: 160763

SEQ ID NO: 475309 - DNA, 1000 bp, Homo Sapiens; identical to SEQ ID NO: 160764

SEQ ID NO: 475310 - DNA, 1000 bp, Homo Sapiens
tttttttttttttttttcaaattcaaaagttttaatagcagggaaataaaagtctataaatgagcctatatatatatatgttcagcatgccagttcacctgacataaaaataaatagagggaagaagtccccaaaacaccccttcaggaagcttttttacatcacctccatgtatgaccccttctctgtgactttgattaggccaaggttgataagaacagtcttttccagttccagataactctcatagtccatttttaattcagcctgcatttgttcttttgacttctgatatgttttaacttttttctttgccatttctagttccatttctttcttttcttgctcacgaatttttttgcgctgttctacgtattccagatgcttgacttctctttcaaaatagtggttgacacttgccatctcattggtggaagggcgacttaatgtccaaggaatttctaatatatgcagtgttccataataatcagctgtggctataaattgctgtttagaagaaaagatccagggtttgatgtaggtgatcatagttatgcaaatgttttgagactgggctggttcatgggttttctccagaaggtcccagatatcaatgtatccatcttctcggccgatgtagaaaactccgggccgagtcagggaccagtggcctgaggtgtacctttttggtgcacagcatgactgaaggagcggtccagtcataacaccttctttccatatggccacgttccaacctccaaccgtgagaataatgtcgttgtagaaaggtgatctctgaatagtgtggacagttccgtcgtgaatggtgtggtggctcactggcttctttgacataagtcggccagtttcagggtctttttccattttccaatctgtgtatatcacttcgccttcctctgttcccacaaagaactttgtgcagaagtcatctattggcttgagaagattggccatcccactttccagattatgatacggg

SEQ ID NO: 475311 - DNA, 1000 bp, Homo Sapiens; identical to SEQ ID NO: 343952

SEQ ID NO: 475312 - DNA, 1000 bp, Homo Sapiens
ggaattattttaatatttcacaatattaacatgaaattcataaaaggatattttgcattaaattatagtttatagttcataaaataagctctataatctttatacttgttgaatgtaactaggaattaccactaaaatcctagccaggaccctctcctaatctagatagaatatatgggcagttgtccacactgtgtgttctggttcttttttgcgtaagatccagtgcaagtagtgtcttggtaggcagaaactgtaccctcatgtccagaccacttgtgtgtctgcataataaagctgcgactggcctccatacatacatagcttaaggcggaggttgatgtcttcactaggacatagtctattcaaaggctgctctgtgaagaaggtagaaagtattaaaccagccagtaactttttttttttaacctgatatcctgctcagaaaaagagatcacttaggaccttgtacctcatctaccttttgaggttccttctggggaggagggggattaaaggctgtctttatcatttcagagtgtctcttcaaaaccagttccatgacactgaaaagagagcacaggagtcgcaactatgcattggtccaaagacaccctcctaagtgttctggcactatccacgttcagaaggtgttgaggccattaggtctctggagaaagctgcctggattggcccctaccacacagcttgttacactccaagagctgctcctggggttttcttttttgaggctgttttggcactaattcttcttggtgatgactcataaaacaaatgttgtttttcacatagttcacttttgctagctccattgatatttgttccaaagagcatccctttgtctcaggtataaacataacaacaaaaagcagggatgctagactcatgattgtatatataaagcacacccatggcaggccaataagatcagttacagtcaaaaatgtcagcgagatgaggagattgatgccccagttca

SEQ ID NO: 475313 - DNA, 1000 bp, Homo Sapiens
acacggttcgaggaaggtgggccgggcacagggcggcccgtggttgcaggtaccagagcttgctggagctggctgggctttgaggatcaatcacctggttctgcagatgtagaagtatgtaaagtaatcagcactttcaccagggcaggactcggatccaggccagcagctgcccagcccaaggctccttgcaccaccgtgtgagccacatactttccggataggagaaggtccagaaggtgaagtctgcgcccaggacctgcagaggtgagaggtgagaggtgagggtcaagcattccacgtcttcgtcacgaagcctcgaagtgctgcctgtgcttagcagtgaaaatatttacttggagatgttcagtttcacagaagccaggaaggggcgggggtggtgcggaagcattgttccccagagcacgcgggaggcggccagccctcagccaggacgctcccccacctcaccctcgctgggctgtggccctggggacgccaccactggcctcacaccgtggagcgtggataggccgctctggcctgtctgcaggggaaatggctgtcacttccatcagagatgacggacacagcagggcctgtctctgccaaaaccagagtcgaggcagtccccggcagccggtgtatggggaacccctcagcttccgtgtggagggtcagggaggctggatggcttttccttccgttcctgtaggcccgaagccttccccggatgcactcatgaccggggcctggccagcaggcgtccgggagtcagcggctgcttggggaaccagggccccactcacacgcgggaaggtgatggtggcaggcagactggtagctgagagcgaaaggtgtggcgggatccgcctggctgctgctggagccccaggctcgtgaatcgcctctgcgtcccgtcccctgcgttgggcagcttcacctgctcatcctgctcggcctgggtgtttctgctcctaagcgcccccctcacggtggt

SEQ ID NO: 475314 - DNA, 1000 bp, Homo Sapiens
tttttttttttttttggaagaaaaggaaggggtttattctcaagcgtctaagggtttacaaacgagggcattttgttttaaaaaggggcagggcgacactggcggcctgaggaggggtccattggctggtgggctggcccgagccaccctcaggcccctgcccacccggtccgccctctgcctggtccagagggatggctggtgacgaggggggaggtcttgggagaggctgggaggcaggagagactcccccagggctccccacttaacactgaagggggtgggggtgggcggacacacactcataaaacagaaaataaagttaaataaaaataaaaccaggcagcccggcctcgggcctgtgctggccctgggaccagccatgcaaccttccggcaatcgcagaggcccccatggctggatgcaggggaggaaagggccaggcctgttggcacccccacccggcagacccctggcccctgacaaaggggccaaggggcaagagaaggtggctttcctccctgggggcagagagaagatgacatctatgactttttaaacatgcggcgttttgtgaatatcatgataataacaagagtcaacaggctaagtgagaggagagggatgctacgcctacgctgcccccaccacggccagccggcttctgcgcctttggtgttggattttctttgtgattttacggggttttgtgttttttttttcttgttttttgttttgttattttttcttgtccacttgatttgcatgcaacacccacaaaaaggaaacacaccccctcctgctctggccaccccagcaggctccggggggcacctggcctgggtccccggtgcactcacccggtccttcccagtcctggacctcaacgtggactgggccaggtgtgggtgagtggagggacggccaggggcacgatgggagtgaccacctcgcacccccaccctcagcccggcccccacccctgctggagcttgtcaca

SEQ ID NO: 475315 - DNA, 1000 bp, Homo Sapiens; identical to SEQ ID NO: 160765

SEQ ID NO: 475316 - DNA, 1000 bp, Homo Sapiens; identical to SEQ ID NO: 343955

SEQ ID NO: 475317 - DNA, 1000 bp, Homo Sapiens; identical to SEQ ID NO: 160766

SEQ ID NO: 475318 - DNA, 740 bp, Homo Sapiens; identical to SEQ ID NO: 343957

SEQ ID NO: 475319 - DNA, 1000 bp, Homo Sapiens
tttttttttttttttttttttttttttttttttttttttttttttttccaccagacattaattttaatgaggttactcaagatttcccctttcttcaagcattccaggaatcagatggaggaagatagggtaacatcatctttatcaaatatttgcaaacattatatagatagctggaaaagcctgtgcatggtgaatggaagagatgtcacataaaaccgaataactgagtctcataatatttaggtcttgaatgaagttaggccttgatctgcttccagccagttgatctcttaattatgtaggctgtgcaacaagtttttggttctgttttatagttttcttctctgcattcctctagatttaatatattcttgatttgttttacagatcactgcttttcctccagaataagccaatgtggataagggagaccaaaggaaattaattatataccaataagaaaagtcttacgtaaaccctgtgtgtaataaatgttcaaataagttggttgtaaggttttggtgtacaatttcaagatattttcacagaacatattgctccccagtcagggttaaagtgaaacgttccatggggataatgcagaggatgatattctttcaggaaaaagagtattaagctttcctctactaggcatcttccctcaggcactgagattgcagccatccaacaaatggggaagggcagaaagaggagccttcaaaagtcgcaaatatacttcaatagctactttttagcaagtgtggcaatgagatctttccattctcccctcttctttgtgatgtatgcaggggtgagtagctgcagcagtgattctgtctgttgcctaaagaagttctgacacaaggcctcagtgttacatatcacgtacatcccacagtcatagctgttttgttgggcaggggctttctcttccacaaaggccagtttgtctccttttctgcctaagaaagcctccagtttctctgctacctgcttt

SEQ ID NO: 475320 - DNA, 1000 bp, Homo Sapiens; identical to SEQ ID NO: 160767

SEQ ID NO: 475321 - DNA, 1000 bp, Homo Sapiens; identical to SEQ ID NO: 343959

SEQ ID NO: 475322 - DNA, 1000 bp, Homo Sapiens; identical to SEQ ID NO: 343960

SEQ ID NO: 475323 - DNA, 1000 bp, Homo Sapiens; identical to SEQ ID NO: 343961

SEQ ID NO: 475324 - DNA, 1000 bp, Homo Sapiens
ttttttttttttttttttttttttttttttaatcttttcatcaccattatttattatatatgaaccaggttttcagcacaagtcacactcaacacccttacccaacaggaggggcgacggaggctcagagagggagtgtagggggaggatgtcaatgggaggccccagcctgagccctgagcagctggccagccaggaactggcatgtgagtgagaggcatcctattctcctgctgctccaaagacaatgcccgctgaacaggatggcaggccacatcagcagtccatacagaagtgaggctgtcgtttcttcccctggagcaccagtgaggacaggccccagctgggagccaggcaaggtgggtgagctctgtgctaaccacactgggagctcgggtaagcgtgagggcaaggctggagaggtccgggacccctgcgtgttgcttcccactcctgccaggctggcacgcccccattcttcaccatccctagcacagagcccagggccagggggcagagggcggggctggctcaggagcagggctggcccgtcccatagcgccactcacattgccccttcccctctctcatcccagctctggtcacttagatgctgccatgagaggctctgaaatccacccccactgcagccaaaagcccaagtcagagccaaacctgcactgtgctcggactgacaggctggggtcgggggagggaagacatccactgagggaggtccaggtggcaggaggcggaacaggatactctgaggagacacagcaaagggtgccaacatctaggactgaggccatctggacccacatgactatgttgctttttgtgtgtgaatgtttctctgcttcaacattttcagaaatttcacatctagacgtgtcagaaaattaacaattccatgccagagaaaaggccttgcctataacccaatagaggcccccccagttcccagcaggatggtggcagagctgctgactgggcactg

SEQ ID NO: 475325 - DNA, 1000 bp, Homo Sapiens; identical to SEQ ID NO: 343962

SEQ ID NO: 475326 - DNA, 1000 bp, Homo Sapiens; identical to SEQ ID NO: 343963

SEQ ID NO: 475327 - DNA, 1000 bp, Homo Sapiens
ttttttttttttttttttattacttggtaaattttattgatgtgaaagcaaaaagatggcctttttgaattctatcaacttctttcttcaacaattattttttcttacatggattcagtttctgatgattttactcaatttaacttctttctggaagtcccataggtacagggggaaaagaaaagtggtatcattagggaaaaattattaccacttctaagtgaatgaatgaggctatgaaagtgtttttattctttaccctgactctattgttggtgacttaaacagccacaaagacctaagggcagagcctcttgttcacagttatttactctcctgggcacaaaaacttccaagctacttgggatccagtcaagggaaaagtaacgtagaatcttggctagctttgcttcaaataaagctttcgtttaatgtgagtgtggacgtgcgtgtgtgtgtgtgtgtgtgtgtgtgtgtgtgtgtctgtgagagagggagggagagagagagagagagagaaggagggagggagggagtgaggagggaggatggggagctaatttttttaaaagaacacatgacattctaaaattcaaaggtataatttcatacaagtaattgttctatactgcagaactcctactaagcaattcccttctctttctttcacttgaataactttctagataaaaaccctggggtcttgtttgtctttaacctgtaaagaaatgtgattctccaagaaactagagcagtgttgtgatgttctatccctcctcctcccacatataatttaagactcttctagtctctttggaggagatgttcaagggctgacacaccactccacacaaaggagcaaattatgctgtgcatggcgtgaataattgactgcatttgagtttggagttttagggcactgttgacttaagcaaaataagcctgcagtccagctgcagcttgagttttcttgctttaccctatccaatactgtctgtct

SEQ ID NO: 475328 - DNA, 1000 bp, Homo Sapiens; identical to SEQ ID NO: 343964

SEQ ID NO: 475329 - DNA, 1000 bp, Homo Sapiens
ggggctcaggagcaagtgccctggcctgtcctagtagcccggctggggtcagagcacctggagcttgcgggagcaggtgagattgctgtgcaccagcccccacatggcgagcagctcagggggcagcagcttgtgcaccacgagcatggcgcggaaaaagcacggctccttgttcatgcggctgttgcggttccgggagatgccgaaagtcttgaagccctcgtgggccgtgggctgcacgcccagcacctccaggcacatgcccagaaagacgtcgtcgatcgggtagagctccagggtgtcgcaggcatggtgcaggcgccgggccaggctgccggccatgaggaagccaccgccgcctgcatacggcggatagctggccttgccgtacagggcccccgggatgtagtatttgttgtctttcctgcgaatgggccgagcgtgctgcaggacatcgcccacgaacaggttttcctgtggctgccggtcagccagaaattctagcaggttggtggggttgacgaagacgtcatcgtcgcctttgaaaatgaaggggacgtgggggcagtagatgtccagccacttgaggaagtggatctccttgagggtcaggttgaagaaggtgtcgagaaagccccactgcaggatgtcgccgtagaggcggtcttcgtaggccagcagctgctggtagtgcgtgcgctcctcctgcttggaggccgtgcccagcaggaagagggtgcgcacggcgcctcggcccccacccgcggactgccgctcgcggccccaggtctggcggatggcctcgcggcggtcgtgctgcgtgatgaccgacttgacaaccaccagcaggtagacatcgcccctgcacttctccgggtggttcagcagcatggggaagtagcggcagtggcggtagaagagaaactgccggaactgcggctccaggacctggaaccagggctggtgggtcaagttgatattggctgagcagttagtggtg

SEQ ID NO: 475330 - DNA, 1000 bp, Homo Sapiens; identical to SEQ ID NO: 343965

SEQ ID NO: 475331 - DNA, 1000 bp, Homo Sapiens; identical to SEQ ID NO: 343966

SEQ ID NO: 475332 - DNA, 1000 bp, Homo Sapiens; identical to SEQ ID NO: 343967

SEQ ID NO: 475333 - DNA, 1000 bp, Homo Sapiens; identical to SEQ ID NO: 160770

SEQ ID NO: 475334 - DNA, 1000 bp, Homo Sapiens; identical to SEQ ID NO: 335535

SEQ ID NO: 475335 - DNA, 1000 bp, Homo Sapiens; identical to SEQ ID NO: 160772

SEQ ID NO: 475336 - DNA, 1000 bp, Homo Sapiens
tttttttttttttttttttttttttttttggtttggaattcgttcttctcttttgttaaaagggggaaaggaagtggatgcgggtacccccaggtgcaggggaggcatgcaggcagccccagcaggcaggcgctgggaggcggtgggaagagtcctggagtttcccacaatccttttctctgcaaggaacagcaacgctggctgacgagggggtggggaggaggcagggccctggggagggggcggcgggcagggggctgggggctcacactaacatgcaaagtccagctgccccaggaactaggttgcttctgaagagcgacacacgtagaaatacacagacacggccacgcgcacacatgcggagaggctctgcattccctagggtgggggtcgaggcctgccggcccccaaggagctccaagccagggatcagcaatgtctccgccagggtggtcctccacggcacccctgggctgggctgggcaggtgcgtcttcgaaggaaggctgcgtggtctctgaagttctgtccgccaggcacccaggccgctctgaaccactccatgtgccggggccgctggggccatgaccttgcgtgtgggcagctgcgtgttctggcaccagacgtgtccctgcctggctagagtccgcgctctcccctccagggctccggggaacaaggggtgcagacagaaaaggggtgaagggggcccgcagagacgtcctctcccccgccccacggggtcctggcctccgggaggggggaggggcctcccttatctctctgcctccatggcagggtgggccctgggttctgaggtggcctgttggggggccaggggtggccagtctgaagccggagaagggggtgttggagtccacaggggcggctgtggctggtggtgctgtgggccccccgggggcgaggccgccgtgggccagctggaggccgcagagctgctggtggcggcatgggggaagtgtggcgggggtgacgtg

SEQ ID NO: 475337 - DNA, 1000 bp, Homo Sapiens
ttttttttttttttttcctgctttatttcaccaaatttgttttcaaaactatactcaaccaaaacctatttggcatttattgtcactaagatgtagcaaagaaaagagtttgccaaattttaatcaagattagataagattttaatacaacatactctgctcatttgaaataaaccagtatcttccacggtttcttcaaaatatgcgacatctcacagaatactgtaaatttcagtgcaaaggatgccaccccagagacactgttgacttggcttgggtaaaggtacacattaaaactgcttaaattaaatatctacaaaaaagaaagccaaaagacttgttttggttgagaacaataggagtccacataagtcttcaattctaggagcttcaaaatgaagaaaaggctgagatgtgttgtccttcatgttcctgttcatccaagttgcttccctttgaagaactaagaaaacactacactccataatgtattcttttggaggattccataaagtttaagttcaacatctcagcataaggatgtatgctatagagtagctaaaatccgtaaaaaggagaccaccaagacgcaaaatgtctgtccagtgcccagtgtgagggcttcaaatggtatcatttccttccctgctgctcggtaaactccagcaatagctgcacttgtcaagattccagcagtaattggtcccacgatgcccatcaacaggatgcttacagacatgaacctaccatatttgtgatgtctgagggtgaagagggccagtaatccagcagggacatgaaagaagagagaagacaccagtgcccacaggaatacaccataccacatctctgggaaggagcagagggaagtagagttggggcacagggtcccgttgcccacccgcggcacaaccttcaggctcaggatctgctgcaggagcccggccgacccgccgctgccgccgctcccctcgcgctccatcccgtcgccattcaccac

SEQ ID NO: 475338 - DNA, 1000 bp, Homo Sapiens; identical to SEQ ID NO: 160773

SEQ ID NO: 475339 - DNA, 1000 bp, Homo Sapiens; identical to SEQ ID NO: 160774

SEQ ID NO: 475340 - DNA, 1000 bp, Homo Sapiens; identical to SEQ ID NO: 343972

SEQ ID NO: 475341 - DNA, 1000 bp, Homo Sapiens
ttttttttttttttttttgcctgtaaaataaccgtttatttaatagttaaaaaaaaaaaaaactccagtgataaatgtccgttaccgatggtcagcataaagtgccaatcgcaatataacgcccggctcttggctggctgctccctcgcagtgtcgcggcagcggaggccgggccccctgcagaccccaggcccgaggtccccgtcccgctctcctagtcccggagcccacggccgccagctgagctgcaagagctgggagggggctgccccgcggtccctagggcaggaggctgaagcagatacagggattacacttttgcaggctccgggggtgggggcaggggcgggaggaggaggtgggagctgccagtgctaaggacttcgttgcctctcctctctccactcactctccgcagtcagagttacaagcttatatggtcaaagacaaaaataaaaaagaaaacgtataaaataacaatagaaaaagtaatacttctgggagaggcgccgctgcggctccgcggagctttcgttctttttttaatgcagtttcccttccgccacgtgagtaccgccttttggccaagagtttagccgcgtcctaggggagcagcagggacggtcggggtcgcggccccgggcggggctctgaagtgccgcgtgcgccagggacccaggggacaatgttggagaggtggaaggtcccgagcgagcgcctctcccgctgcccgccagagtcaggcttctggtccctatggaggagagggccgctgggcctagggtccttgtgacccacaggttctatttagcatttgatcttggaggttttgagctccttcacctgtgagtgtagcgtcttgtggacagcgagagtcctggactggcagaatcctttcccacactcttgacacttgaagggcttctctttggagtgaatatatctgtggtctcgcaggtggtcttgcctccggaaggctttgtggcagatgtcacaggtg

SEQ ID NO: 475342 - DNA, 1000 bp, Homo Sapiens; identical to SEQ ID NO: 160775

SEQ ID NO: 475343 - DNA, 1000 bp, Homo Sapiens; identical to SEQ ID NO: 343973

SEQ ID NO: 475344 - DNA, 1000 bp, Homo Sapiens; identical to SEQ ID NO: 343974

SEQ ID NO: 475345 - DNA, 526 bp, Homo Sapiens; identical to SEQ ID NO: 343975

SEQ ID NO: 475346 - DNA, 1000 bp, Homo Sapiens; identical to SEQ ID NO: 343976

SEQ ID NO: 475347 - DNA, 1000 bp, Homo Sapiens; identical to SEQ ID NO: 160776

SEQ ID NO: 475348 - DNA, 1000 bp, Homo Sapiens; identical to SEQ ID NO: 343979

SEQ ID NO: 475349 - DNA, 1000 bp, Homo Sapiens
ttttttttttttttttttttttttgagacggagtttcgcttgttgcacaggctggagtgcaatggtgcgatcttggctcacagcaacctccacctcctgggttcaagccattctcctgcctcagcttccggagtagctgggattacaggcatgtgccaccacacccggctaattttgtatttttagtagagacggggtttctccatgttggtcatgctggtcttgaaatccggacctcaggtgatctgctcgcctcggcctcccaaagtgttgggattacaggcgtgagccaccgcacccagcctatctcaaggtttgagggaggtggtggtcacgagcgtcagaggccccctgggggtctggcgaggctcgggggcttcgtggagtagctagtgggggcgtctgtggaagttctggtgggtctgggggctctgtggagggttgggggactgtggcattctaaggagggtctgggggactgtgggattctaaggaggatcttggggactgtgggattctaaggagggtctgggggactgtggggctctatgaagggcccagcaccccccgcctcgccctgcccgtggcacctggctctccgccggtgggtcgtactgtcgcagctgccccaggaactccaggtggcgcttctcctcctccagctgggccacggactcctcgctggcccgaagccgccgctgcgtctcctccagttcctcccgcagccacacgttctcctgggccagccgccgggcctgcgagcgcagccgctgcttctctgcctccagtgcacccacatgtgccgacagggccagcagcacctgggcctcgcccagccccagctcgatggcctccagcgagtggctcaccacctgctgcttttcctccagcatctccaagccggctgccgggccctgtcccgccagggcctccgccaggtgcccagccaggccatggtgctctgcccgcagcgcctccagcccctggaccacttgccgcg

SEQ ID NO: 475350 - DNA, 1000 bp, Homo Sapiens; identical to SEQ ID NO: 343981

SEQ ID NO: 475351 - DNA, 1000 bp, Homo Sapiens; identical to SEQ ID NO: 343982

SEQ ID NO: 475352 - DNA, 1000 bp, Homo Sapiens; identical to SEQ ID NO: 343983

SEQ ID NO: 475353 - DNA, 1000 bp, Homo Sapiens; identical to SEQ ID NO: 343984

SEQ ID NO: 475354 - DNA, 1000 bp, Homo Sapiens; identical to SEQ ID NO: 343985

SEQ ID NO: 475355 - DNA, 1000 bp, Homo Sapiens
tttttttttttttttttttttttttttttttttttttttttttttttttttttttaacttttgaaattcatttatattctatgccttctttgttttgaacaggttatttggcaggtgggggaggggatgtggatagagttcacaaacattctcgattacctgtggctcctgggactaagaacagagtgaaaacatgaaatccccagggtgatgctcctcagtggtttcaaccaatgcaacctttccaagcattctcccttgtaagcaaataaattgacaggagctggccactttcatgtgccttttcccaccctctgataatggtgctggaaggtggagagttggccactccctgcaggacacacagcaagagacctggactgtgagctcatcgcagtttgccttgtggcacgggggacatgtttaagcctggaagtttccatacttcttttgttcttaacatcaaaatcaatctctgttttcagcattgtggggtttgattgcaaccattggagatttagcaaataacaacttcggaattataaagcgaacatatagtgtaaatatgaggcctatgttacttataaattatctggagtgctttttaaaacaattaaaaagtaattctgaaacattagtcatagtcacccaatgatttcttctcatactaccagaaagttcctgctataaagtcggagaccaccactaattaattatataagaatattacaaagttgattatggtcctaaaaataaaagtaatatacaggtctcatttttgctctttttttcttctctgtatagcctctagagctttttcctgccaatgctcttccatctatggagttactgttacatgaacagtgttggaattctcaccgtttctaactactggcttctccataggaatagacaccactctctatgcaatagctgactaccgcaagaggacctcaggctttatttggaagcttcttgtggttatcatagctgacgccac

SEQ ID NO: 475356 - DNA, 1000 bp, Homo Sapiens
atatagaaaagtttcatttattcgaattaaattatggtatgagtttcatatacaaataaattctgtgtaaataatacaaaatgctacaaatttcaatcttgtaaaaatgcaaaaatacttgtaatactatacatatataattcctttcacatgaccaacatgtacagtagttgacacgatgcacacgcgcttcccccccacagctgaggctgctgagacagcatcaagccttcgcttctgtgacgtcagcgctccctcccgcggctgcctcacggtgagccagcaggccctccccctcacacccccagctcaagatgcttcagattatgagccatcatcaggagggaagctacctattctctggctagttagaaggcactgtcatggggaaactgggtcctcctacagccttaacaccagcctgctaaactgagaacacgcctctaccgtggagaagcgcggtacatcactggtctaactcgttttcattctgcagcgtcttcatcgctagcccccagagagtcatgctggagaaaaactgaccctctgagttcctataagtggtggaagatgctcgactgcccagggggtcaccgccgtggttgtccaaagcagccagagaggaacggatcatggccatgccatcggcctgcagtggttcgccaccggctggggtgtccacatccgagtaagcataggcctgaggctgtgtctgctgcatctggggcttggcaagtttaccaggatccaaactcagcttctcctggtcactaactccatgaggttggatcatggaccgtaacttacaataggagccgccagagtggctatcaaattctgccacagaattttccactgggtggacagggagtttaaccgacactggcatcagcgtcacagacgtgtcttgggagaaagagtctgagctctgagatttctcgaggtcggaggtctcgatggcttggctgagctcctccagcacatctgggctctcgtcacc

SEQ ID NO: 475357 - DNA, 1000 bp, Homo Sapiens
ttttttttttttttttggtcatatttttttaattgcatttcacgtaattccacgatgttccaaacttacactcttgtgacactatgttgaatgactaggagacttttaaccctttattaatgaaagtgatttgttttcctttcacaggctgttcacagatgcctccaactctgggaagacattatccaaataccactgaaatgacttgcaacccagtcgtttccttaactcaacacgctcgcgaatatttccgtaggtgacatatttcagaccaggctttcgaagaaaaaactgctccttatattcatccagccaaacgtgcaccagtcttaggtagttatgtgtcatagcactgatgattgtagaaggttttccagtttgtttcttactgatatgtcctactcgagagcaggggattataaagagttggcctccacacatccagatccttagtgaaagttccaaattttctcttccccaaaaatccatatccttgtcatactgtccaatttcattaaaataatgccgacgtatagcaaaaattcctccagacattgcaggtgaccggattggtttagtagatccttctggtccatccatctcataagagaaaacattatcccatttaaattgtaggttccaatcaaaagttccccttacaagaggagagggcttatactccagagttctatcatcaatgacatctatcagggggcacaccaccattttggggtccttggcaatggcatgcagcaggggctccagccatactctgttcacctcacagtggctgtccaggaacaccagaacatcccctgaagcatgagaagctccaatcagccttgctcgaatcagcccctctctctttttgtttcttattattttaacctttccccgaaaagtttccaggtgatagtctagtttttctttcaaatcatcaactttgctcatgtcatctaccaaaataatttcttcaagaaaatagtgtggcgtgaggttc

SEQ ID NO: 475358 - DNA, 1000 bp, Homo Sapiens; identical to SEQ ID NO: 343987

SEQ ID NO: 475359 - DNA, 1000 bp, Homo Sapiens; identical to SEQ ID NO: 160777

SEQ ID NO: 475360 - DNA, 1000 bp, Homo Sapiens; identical to SEQ ID NO: 160778

SEQ ID NO: 475361 - DNA, 1000 bp, Homo Sapiens; identical to SEQ ID NO: 343989

SEQ ID NO: 475362 - DNA, 1000 bp, Homo Sapiens; identical to SEQ ID NO: 160779

SEQ ID NO: 475363 - DNA, 1000 bp, Homo Sapiens; identical to SEQ ID NO: 343991

SEQ ID NO: 475364 - DNA, 1000 bp, Homo Sapiens
ttttttttttttttttttttttttttttttttttttttttttaattagaaaaattatttatttctgctcctttcatacatcttattgttcaggaaacagtcttacatacatatctgaaataatctaccgtcacacactctagttaaaggcaaagcaccataggtaaacctgatcagctgtccagagttctcagcttatggaatcttgcttcttgattttacgttaatttctgaaaacagaaacgccatctccaaaaggtgttaagggggttgtaaaaaataatcactttatttgatattatagctgtaaatatggagcttttttttttaagaaatgaaaaactaagaagaaaatgccactcaacatcgttggtacagcaatgggtcagcaggggaaaaaaaaatactgtgataaacttgtctctttaataccaagaaggaattctagtccaagcttcaatacacttcctgttttttcactcggtatttcttttactgctgctcttcattcttttccacatttcatattagaggattggacagcctttaaacttcattgacaggagcaaatccagtatccattgagttcttctcaaaggcactctaacccatcagatagcccttctcaaaggcactctaacccatcagatagcccggcagtttcattctcatgaatactctagccatgaaaaagctcaataggacacaaacgaatccaatgaatagaagaagaaatctattgagttttgggatatttggtgcattccatcggtccaggaatatgaaacctaaacctcctattgtaaacaggaagctggatgcaagtccttccataatacattgttcatttactctgttggccaagaaagctactggcctctgatgcccgtgttcatcagtcatagagccaatgcttggaggttcaacaataacatcataaattattcctccagtgacgaggaagtaagacaccaccatcagagcatacacaatcatggccg

SEQ ID NO: 475365 - DNA, 1000 bp, Homo Sapiens; identical to SEQ ID NO: 343992

SEQ ID NO: 475366 - DNA, 1000 bp, Homo Sapiens; identical to SEQ ID NO: 160780

SEQ ID NO: 475367 - DNA, 1000 bp, Homo Sapiens; identical to SEQ ID NO: 160781

SEQ ID NO: 475368 - DNA, 1000 bp, Homo Sapiens; identical to SEQ ID NO: 160782

SEQ ID NO: 475369 - DNA, 1000 bp, Homo Sapiens; identical to SEQ ID NO: 343997

SEQ ID NO: 475370 - DNA, 1000 bp, Homo Sapiens; identical to SEQ ID NO: 343999

SEQ ID NO: 475371 - DNA, 1000 bp, Homo Sapiens; identical to SEQ ID NO: 344000

SEQ ID NO: 475372 - DNA, 1000 bp, Homo Sapiens; identical to SEQ ID NO: 344001

SEQ ID NO: 475373 - DNA, 1000 bp, Homo Sapiens; identical to SEQ ID NO: 344002

SEQ ID NO: 475374 - DNA, 991 bp, Homo Sapiens; identical to SEQ ID NO: 344003

SEQ ID NO: 475375 - DNA, 1000 bp, Homo Sapiens
cccgaggtttttttttttttttttttttttttttttttttttttttttttttttttttttttttttttttttgtgatagacatatggctatcttttaattcaacctcacattgacataaagtatacagacagaattgcaaattgactaaaattataatacataaccaaaaaccacgataagctgatattaagatacctacactgaaaacaccactaatatgaaactgcacaggaagagacgtttaactcatacaatttggtatgcaacattaatataccattaaaaaagaatttgtctaactacagtatttgactgtaactgtactcatcaaaagcaggtattttgaaaaattggcagtaaaatttcagagaatatgcagtataattataaataaaatattctgatgagaaacttttaataagcatttaaaagaaacaagtggccgggggtggtggctcacgtctgtaatcccagcacccaggaggccaaggcgggtggatcacctgaggtcaggagttcgagacccagcttagccaacatggtgaaaccccgtctccactaaaaacacacaaaaaattagctgggcgtgctggtgggcacctgtaatcccagctactcaggaggctgaggtaggaaaatcgcttgaactagggaggcaaaggttttgatgagctgagatcacaccactgcactccagccaggcgacagagcgagactcctgtctcaaaaaaaaaaaaaaaaaaaaaaaaaaattgggaagtacaactacccaagcctcttgtaacatgacaactaaatatggaccctaatgtagaaccagcagccttgcaaccaagttacaaccccactccactacaaacccagagggcatcccaaaaccctggggaacacaagaaaagaagatctttacctcctgaaatcagcttataaaaacttaaggagttgtttgccatttcaaattcacagacaccaatagtaaactctattgtgccctttgtc

SEQ ID NO: 475376 - DNA, 1000 bp, Homo Sapiens
agtattgaatataatgttttttgtattaaaacaagaattgctattttacagtttaagaaactttacatatatacaaaatttacacattgggaatggtaatcaagcaaataggtttttcagtctcatagatctattttccttcgatcaaagacttaaattctttcacattgtggtcacttgcaacagacatagcatgatccaaagctcgaacacttgcaaggagttttactatctgttttatgttttcccttgcatttcttttttccacatcagaacacccgatactatttctataaattgtatccgctaagtgtacaaggtatcggcaaaagttttctaactgagaaatagtcctttctcctttcagattcatgaaccattgtttggggaaacaattgattacattttgggcttttttgatgctgtcatctccatattctgaattctgaaaagccatgagaatatatcgatttaataaaccatctattgataactcttgcagagttttatttgagaaaatgccataccactgaagaaaattgcctaacagcttaactgaagaccaaaactgtcgttgaaaaaacaagtaaggcccagaatttttattttctaagacatttttgggatataagggcataaatacatcatcatctaaagttcttctcattctcaataaaagtgcctttaggtatacctgtgtatttttattttctgcattcactactgaaggatatccattgattaattttagtgtaattcccaccattcttgaagtctgtgttgtagaaaaagggtcccacatattttcagctatcactgttagtttaggaagaatcaccttttccacaatggtaggtagtagggcaacatctacatcatctttttcttgctctcgttcttcacaaccataaaacagcaaagattcaaaccacagcatattctcaaagtcacgacattttgcctcaagaggagtccaagtgaggagctgaagtcgtatgag

SEQ ID NO: 475377 - DNA, 434 bp, Homo Sapiens
ttttttttttttttttttttttttttttttttcgattttaatattttttattaagggctataaaaatacccagaaagataaataaatgtgatgcaatgatatctgtcctaatatgaagaactttctttcactgcattgttttccttcacaatggccttcaaatcacaggaggcagtgattccatgccatttcctcttcttttattacacgctacaggatttctgaatcagtatccccgccctcagtcttctctttataaatcaaagtcattttcaatccaccgtttaaagggagcgtatttttttcttttccacgaagaggactctttgtttcatttgacttgctcttggcaaagaagaccgcggagaggaacatggtgaccacacctgggcagtctccgtcaccggccaaaaggcccccaaccaacaacaact

SEQ ID NO: 475378 - DNA, 1000 bp, Homo Sapiens; identical to SEQ ID NO: 160784

SEQ ID NO: 475379 - DNA, 1000 bp, Homo Sapiens; identical to SEQ ID NO: 344006

SEQ ID NO: 475380 - DNA, 1000 bp, Homo Sapiens; identical to SEQ ID NO: 344007

SEQ ID NO: 475381 - DNA, 1000 bp, Homo Sapiens
tttgagggggcgggtgctttattgggggctgggactgggtccaggacagggactggggccgggaccgggaccggggggacagggaccaggactgaatttcaggctggacttcggggctcggcgtgcccgcagcagcagtgctgctttgggcacaaggcctgcagcctgcagcgtgagtgtatcgtcctggtagagggtgggcgggaatgtgctgaagatctcaaaggcagaggcatccatgaccctggcctgcgctagcagagctcgcacgtccccaatggtgttgtcaggctgcatcatcagtaggaaggcctgttccccattctcagacttgatgcgcagcatggagagcgggggtgccggcgtgttgggtgactcctggctcctctctcgctcagcggccaaggtgggcgtctccaccacaatctcctggatccgggcaggcaatgggcagcagttctgcaaggtgtccctgatggggccccggatgtcaatcacctcgccttgccggatcacaaacttggggagcctgttcagaaatttctcagcagtcatcctggagcctgggtgctcctccaccctgtccaaggccttgtgcatccgctgcctgcccaccacacggccctcgcctgggaaggggtccagtccatcctccaggtagacctgattgcgcaagtcactcaccttaaaggggaccccattggggtacagtcgctggagctctgagggaaagaagccatccaatatgtctcggaggcagcgctgtgtggagggatcgtagaagggctggaagggcccgtcgaacatcatgatgccattccggtagagcttcagcgggatgggctcgagggtacgcagccgtgccccgccgggcactggtgtcacttgggtgtcaccctctaccaccagctcactaagatcctgcaggctggccagcagcctgtcaaagtccacctcagggggcgccaatgagtcccctggcttccagaacttcttggct

SEQ ID NO: 475382 - DNA, 1000 bp, Homo Sapiens
ttttttttttttttttttaccaaagtagatcctttattcaaaatctgtgggggttttttgactgtttttgctgacctgtgacctctcactgaggacggcagtccaggaccacccccagaggggttcaaagacctccgaaaccagagaccacccccacatacaggtccatggagagggcctggaccatctggacccccacggtcaggccaagtcccagataatagcaccagatgtttcctgtccgacttttggtctccccaaggcgaccagaggccgagctgcccctacacaggcgcaaggccgaggcagggcgcagcacagcatctcaggtgtccatctcgccggcggcgggcccagcggaccctcggggcccagagtcagagagcggagatgagcgagcgcagggagctctggctggaggcactcagaggccggtagcccgcggcagaaccctcagcctgggggtccccgggggagcagggcaaggccacccctcggggctgttggtaccacacagcccagcttctcctggggcccctggaagcccccagcgccgggggcccttttcccggagccagcagacagctcctagagagggagcagacatcagccgagccggtccaatcccgctgcagcgtcctgctctacctgcgatcccgcgcgcgatcctgtgcgtggacccaaagcctcgctcccttaagaacccaggagttccttcctagctctgttcccttctggggctccagctccccaccaccggtccgccctcaggccctgccccagcgccccgcaccgtcggcgcagcggacgcagcagccccaggagcagcagcagcagcaccgagacagccgtcaccgtcgagaagacccgggctgcgggcacacggctgcggtgaggatgggcgcgagggggcggctccctgactcactcccgtcccgcgcgcccgcctcacccccaatcgcggccggcggagccccaggcctggggctgcagctcacgt

SEQ ID NO: 475383 - DNA, 1000 bp, Homo Sapiens
tttttttttttttttacatgtctgtaatgttagtactttttatttttttaacaaagatcattgctttttattatactttatcaaattcaatctagtaacaaaagtaaaaaagaatgttcactgtagaaaatttgcaaactatacaaaagtttcagaagaaaataaatatcacctacaatctcatcttccagaggaaaaaaccatttagtgcctttcccttgaatctgtttttatacacatacatcctttttaaaaagttcatagaccaggcgtggtggctcatgcctgtcatcccagcactttgggaggccgaggcaggtggatcacgaggtcaggagatcgagaccatcctggctaacatggtgaaaccctgtctctattaaatatacaaaaaaattagccaagcgtggtggagggcacctgtagtcccagctactcgggaggctgaggcaggagaagggcgtgaacccgggaggcagagcttgcagtgagccgagatcgcaccactgcactccagcctgggggacagagggagattctgtctcaaaaaaaaaaaaaaaaatttgtttagccaatcttttatcagcaaacatgtaggttgtttgctatttcagaaaaatgttttgcacgtgaaagaaagaatagcccttatgaggcacacagggtccaggacagcagagcaaaagtccctgcaggcaacccttcctgaccccatcctacagggtctctgcccaggccttcctgggcccctccgggagcactgccaggggcctgggccaactggcctggaagccttgccttttccctgtggaggcgcagaggctctggtttgtctgtcctggccccgggatcattttccagcacacagcacagtctagtccatccactctccccactccccaaattcaaggtcatcagggttctggtggcctggagatgggtacaacattctcatactcaggttcctcctgcctttcctcttcagcctgcttctggggat

SEQ ID NO: 475384 - DNA, 1000 bp, Homo Sapiens; identical to SEQ ID NO: 344008

SEQ ID NO: 475385 - DNA, 1000 bp, Homo Sapiens; identical to SEQ ID NO: 339616

SEQ ID NO: 475386 - DNA, 1000 bp, Homo Sapiens; identical to SEQ ID NO: 344010

SEQ ID NO: 475387 - DNA, 1000 bp, Homo Sapiens
ttttttttttttttttttttttttttttttttttttttataataaagttatgccaaaaatacagcaacaaatacagaaaaagtattaacaaacggagaagccccagatacacgtacagtaacaatacaaaaatgtggctggtcaaacagctcaagttcacatttaacactttcaattatttttaattacactatttctgttcaaaagaatgttttccttacatacaaccatgatcagtctttagtctcaatcgtaccaaaataaagctatatataagcactctgactaggtaaggtgtgaagtaccctgtgagttgctctgtggcttgagatgggacacatggtctcaaatgactcttatgcatgccttgccttaagaaagaaaagtaatgttgatggtttaaaaagtaagtactttttgaagcagcagatgaaatgtgtttactaccagcctaaatcaaagaacatggcaagagcaagactgttctcaggaaggaaaccataaatatggcatttatgtaaaatccttgcagcatctgaccatgcttttatctttaaaaaaaaaaaatcctcactttcttaaatataagtaacagtttattaattttttttttttacagtgagatatggctatgggaagcaggtgatactatttgtttaagaaactgggatgccaactaacacgtggagttccccaagactttgcaatctccatttgtgagtttctgtaaaaaagggaacccagctagaggattcacagagaccttgaatgacaagcgacatactcgaaatctgcagctctcctcccggagggcccagcgtgccaggagacacgctgcagtaaggcacttaccaagctcctttggatagagggaaagaagaaatcaatccaggcaacatgcaagtttcagtgaagtcagacattttatgggaatttaaagtcttgcctgttctcagtgcaccccagtcagttactgacatgtcagcctcagaaaccgcac

SEQ ID NO: 475388 - DNA, 1000 bp, Homo Sapiens
ggaaaacaatatattaatttattcccaagaaaacaaaacatggaacctcatcgaaaacaaacatcagatacagtagtttcagggcattcccatgggctgtcagaaacccactagcccaaacactatgctcttccaacattaaagtatttaagacacaggagagatgaccaacaacagacatgtaaacatcaattccagaaagatttcttgttctacatgagaaacatccagtgtaaaacggttcctcttctcaggtgctgtcatttaaataagttgaaaagagacaatttttaaactccactgctgaccctgagtgcattcgctatcccctcacctattttgttttgggacaaagtctcgctctgtcacccaggctggagtgcagtggggcactctcagctcactgtaacctccacctcctgggttcaagcgattctcatgcctcagcctgccaaatagctgggattacaggcacatgccacaaagcccggctaatttttatattttttagtagagatggggtttcaccatgtcggccagcctggtctggaactcctggcatcaagtgatctacctgccttggcctcccaaagtgttgggattacaggtgtgagccaccacgcccggcccaagccagaggtcttgtaaggggactcatcccatcatgagggtcctaccctcgtgacctcatctaaacttcccttaccaaaggccccatctcaaataccatcacattgagggttaaggctccaacacatgaattttggggggacacagtcccatctatagccaatggcagtttgtgcttggagcccactctggtcaccttagtgggactggcctctgtgcaagtgacaggttttcacatgtggccttcaagagttccttgtgtgaccagctgtccctattccttaacactttaccacccaaaacaactccatttttttcagtagcaagaaaaaaggttttacttcaaagtcattccctttaaatatgattg

SEQ ID NO: 475389 - DNA, 1000 bp, Homo Sapiens; identical to SEQ ID NO: 160785

SEQ ID NO: 475390 - DNA, 1000 bp, Homo Sapiens
ttatcgtcgggagaatcttcccttgtagtctcgaattgccttggccatcagcggggccactttcttggcagcctgttttcgggttttgtccgcgggcgccgcgtgccggttgctgctgccgccgccgctcacgctgccgccgtcgccgtccccgaggccggagggagcctggctgcttcctgcgggcttgggggctggctccatctctccatttccggggtcagcggctcctgcagacttctcttgcctcctggaagcatcataaggcgtcttggccacagagttgaaacagatcatctttgtctgtcggccgctgggtttgttttcacgtgcggatcggattttcgtggtcactactcgcagccgctgctctcgggcgtcccgaagccgcaggtacagctcccgccaagactcgtgctcctgtggcttttcttccttgaagtcctggaggcaatgaatcctccataattcatctgtctctcgagcgagtgcggcattgtctttctctgtgcggtacagctgatcgggcgtccacccttccagaacgggttcaagaaccgagtaggggaccccttccacgtcgccgagggcgtccggattgttcctaggcacccggaggcactgctggcgcagcgtcggcacctggagctggcaggcaggcctggagcccgagtacaccggcatcttagcgttcactctgcgtccagggaaagcagcttcctcctggagcgctggcgcgcagagtgcttctgggtttgcctgggaggtcatggcctcaaaagcggacagcagatcgtagttggcctgcatccaggcctctgaggggtcccagagctccgagaagacatggctgggcaccgttttcggcccggcggaatcagcgccggccgcctgcagcctctctgactggctttcctggacaggaggcgatttctgagccgaagccccgcgggacgatttgtgccccttgctgtggctccccaccgcttccccctggggt

SEQ ID NO: 475391 - DNA, 1000 bp, Homo Sapiens; identical to SEQ ID NO: 344013

SEQ ID NO: 475392 - DNA, 1000 bp, Homo Sapiens; identical to SEQ ID NO: 344015

SEQ ID NO: 475393 - DNA, 1000 bp, Homo Sapiens
ttttttttttggcagtcacagtattttattattggaaagggtcctgaaatcatctcatccaagccccttacttaaagacgaggaaactgaggcccgagtaataaaggcatttttctgaggtcacagtgagttggaggcagctagctcctgcattccacccagcagaagggagttggggtggagctaccaatcggtcacatctgccgagaagtgaaaggctcagcgagaagaggcaagaacaaaggcctggggacctagtctgagtaaagtagttagggctggagggctcttcaggtgtctcggagctgactcagggcagacggcaaggcctgtgctgaatgaacgaacgagggaatgggcaatggtgaggaagggcagggggacaggagaaccaggccactgaggggctgctgcgaccaagggagccaggcttcaaggaggaaagaaaggagaaaaggaaccaactttggtcaccagtagcctgtccatgaccttggaatagatgatcttagtggaatgcttcaggcagagctacccaggaaggaagtgtggaagggaaggaggtgaagaggaggcggtaggtatagaccgcaggaaggagccagagaacagaaggtgggagccttcaagtatttgaagtcgatttactgaatcaactcaagtgttttccaggagaggagcatggcattttggggcagaggggaaaggtggcaagtctgagaaggaaaccaacaagagtggttggcgaggtgggctggagggccagggacagacagtgtgacttgtggagggaggacacctcttcagaaagaaacggcaacatgttgaaaagggactgactgcaagataaggcaatgcccactgggtctgggtaaaagtcatctggtgcgatgtggaaagggggctggagtggaaaggagtctgagcagtgctcacgccaaggagccactgcgggacctcattcacatcaagcagcacccatccatcctgggtcaagtct

SEQ ID NO: 475394 - DNA, 1000 bp, Homo Sapiens; identical to SEQ ID NO: 344016

SEQ ID NO: 475395 - DNA, 1000 bp, Homo Sapiens; identical to SEQ ID NO: 344017

SEQ ID NO: 475396 - DNA, 1000 bp, Homo Sapiens
attgtttcaaaagattgtttgattaaaagccagccaaaaaaaagccttcaggctgaggctgaagaacacaaatagagttgtctgtggattacatgattgtttccccagtgcaaggttcctgaccacaggcagcagatatccaaacacgccatgggagataagctgtttaaccctctggaacctagacaaaacaggaagaatggagaagtgcagaggcatacgtgaaaacagggctcagcacatttccagggtggagaaatatttaataaaatcagagtcgagagaaagtcacttgcacaattcatctcctacattcactgctggccaggccaggggcacctgggttgaaatcaggctgacctccggacagccgtactagcgcactgtgtctcggggggaatctcagggtgacgctgaggccgagtccccaaaagccaaggaagccagccccacaggctggggagccctgaaggccgggggagctgtggctgcactgcctctatcctgctgagtgtgctctgcccaggcctcactccttcaggagcttgtgcttgactgtggtgctctcggagcagagatggatgaagagggtgccggcggcggtgcgggcccgcagctcctgcagctcatagtcatgggcccactcaatgttgccccacttctggatctggtactcctcctccaggcgtgacagcagcacggcctgctccactgtcaggcgcaggtcaatcaggcccaaggttagcaccatggacttgagctgggcagctacaaactcaatcccttgtaaagcccatgtgttgtaagatgccaggtggctgacgagcacctcccgagttttggcagggatgctgggtcccattatgctggtggaggagctgatctccacgccgtatcttttctcagcccattcgatgattggatcccactcattcctttgaagttccactaatgtctcgggctcctccaccctgtagcagatggtgtcggtgtccagaaa

SEQ ID NO: 475397 - DNA, 1000 bp, Homo Sapiens; identical to SEQ ID NO: 344018

SEQ ID NO: 475398 - DNA, 1000 bp, Homo Sapiens
ttttttttttattttttttaattttatactaagcttttggctatgtcctttcaaagaggtctcccttatctcaagtagtatttattctccacacctaatccagcttcttatcatcatttcaccttattttttaataactctcacagtctgaagttatatttatcatgtagttgtttatttattcggtcctctattataggaatgtaagtaacttgaaggaaattacactgttggtcttgttcatgtgtctactcccagtgccaaaagcagttcctagcatgtttttgaaatgcaataaaatattcactatgcaaatgaaaactgattttttttgagaggggcagtgtctgccttaaataatacctcattctggaaaacacaattaattatggtagaaactggagagaaatttttttcttatggagaagaaagccctcaaatccccaaatggaggcatagaaaagctgagaaataagttcacatataagcttaggtctgcatttctcgcaaataatattctaataatgtgctctgaaataaacaaaaaagtttcagataaacttttattaatattttgtttagctccatagtttataattgatctatggtttataattgatctatttaaaagatctatttatacttaggctagcacaaacattcaagagctaaatcattgccaagggtatataatgtctacagcctaaatgtagtggctctgacacacacataacaacaacaacaaaaagactatttgctgataggttgaaaagaaataaagaaaaaaatcagttattgtggttatttagtcaaagaggaaagcaaaactgagattgacatagcatatcaactactctgtactcactgtgcatggggtctgcatccatggctccccatcaatttgcattggcagagacttgctcgtcctgatgaccacgcaggagcactgagccagccgccggccagcacttttcaggcctgtgtatatttgccccatctc

SEQ ID NO: 475399 - DNA, 1000 bp, Homo Sapiens
ttttttttttttttttttttttttttttttttttttttttttaggactccactttttaataatgatgcctgaacaccaaactcaagagttgtgaatgcccaagaaagattatgggcagcccacaaagtgaatatgaccattcttcctgtggttttctactacatgccatggcaactccgtgactaagatataaagtcgattacatctcatttgaaattcactcctggtttgcattctttcttttatttaatttagaaaattaaaaataataacttataaatttgatctcattatcacaatggtacctttgaaaagcagcttatgttactctatggaagataatcaggtaaacatgttaccaaatgatcattaataatttaatgtccttcaagttcaagggcagggtaaatctgtgtatactacttataacctagtagagattgattattcaagtatcagcaatattagtccttaaaatgttatcgtttgtgtagtgcaaaatatatatgtgtatatatgtacacaaactaaactactggacaacaaaaagcaatgtaatcatcacaaactaagattttcttgtgaacaccacaatccagttcattctgaggtcatccagttccagtagtcttcttgaggaaaacaccattttcctcagttcagttttcttctccttctttgatagtataaatacaccaaccactgtgcaataaaaggccatatgatggcaaacgttagcacaccaggagacatctcgaagggccaccaagatggtctctgtgaggtgggctgaggagcagtctgcaatgttgatgttgatgattttgcctgcaaagcagtcagcgtttccagtttctgcagtctctgaaggacattctgcatgtcctcctgcagtctcatcagcacgagggcgatctgctcattgaggctgcctcgggaccctctgtcggagccccagcgctccccatcacctccacttcccacctgccggcccttggtt

SEQ ID NO: 475400 - DNA, 1000 bp, Homo Sapiens; identical to SEQ ID NO: 344020

SEQ ID NO: 475401 - DNA, 1000 bp, Homo Sapiens; identical to SEQ ID NO: 344021

SEQ ID NO: 475402 - DNA, 1000 bp, Homo Sapiens
tgtaaactgtccagtttattattattatttttgatggctacagacaatgtgggctctcacacctagactagcttttctggtggaagggcttgggcacagacagacagcagggcttctggttttccttttttttttttcctttttcctttttttttttttttaagaagaaagcatagaggttgattggggtggggggcttgctagaagcttccatttaaaaaaattttcccccaaaaaacccccctgaaaacaaataaaaaaatcccaacaatggtaaaaccccaaacaaaaaacaacaaaaaagtgtcatgtacagaaaaggtcctttggggaaagggcaaggggtgggatttttctggtcactgacttgaaatacatttttgagagttttgtccttcttgttttatggaataaaaagtttggcctttttattgcatgaaactaaaattgggaaaggtagggggcgtggatggggtgggagggggttgaggggagcagggagatgccctccccaccagctcctggataatgacacctcacttcttgcataatttctggcatcttcccgcctgcaatgcctgctctctcagcgtctcggagaaggggggatcacacactcatcgtcatgcttggagaataattgtcgttctgaaaggagtggaggaagttccctcctagctcgccgtcatctcgaggggtgcctggaggattgctaatgccacttatgttgttaggagaattttttggaagtccgtctatgtcgcctgaccctaatgatccattcatgtggtgtggctccatgccacccatgccgcccatcggaccgtccgagccgggacccatcgggaagttggaccggctgcctccaggcggcactggattaatcattgtgtagatgttgtcactggaatttgttgaatctgcgggactgggcataatgggtgttcctggaggaccgccaccaccagggggtcccacataggtaccaggtgatgaggag

SEQ ID NO: 475403 - DNA, 1000 bp, Homo Sapiens; identical to SEQ ID NO: 344022

SEQ ID NO: 475404 - DNA, 1000 bp, Homo Sapiens
gaggccttaaaaatagacaatatactgtatttgaaacaaaattgcactcttgaattttagaaagaagatatcagaattgcattactatttcataaattctccttttacttaacatgctgacatgtccagctatccccacgtgtgtgtgtgtgtgtgtttttttggtgttcaagtttaaggaagaaaaatcatgtttcttttgtttagcatatatgttttccaccttaattaactagatctttaaaaatgaaaatgaaaaccttctctgacagcaatatttatcttgttgaaggataaataattcttcagagtgaagtgtggctagtctattataaaacgtgtcaggtgtgctcacgcgtggctcctcccgccggcacgcgtccgccttctgccgcttcctccgtctcacaaggtccttttctgagcgcgaggacctcagtgaagacagaccggttcaaatcccccagaggagttgccttctgctaaatccacctccccagctacttatcagggatcgggcagatccgaagtatccactatgactttaataaaaattgtatcatctttaatatatgtcccattttctagaacagtttgggccacaaagactgggcagccagaggcgatattcatctctccagtgggcttcttgaagctgctgctgttggggtcgggcttgaatgcatctcccaaatgacgtcgagaggacccctgatccatcagcatgagtgtcactttctgcttaaacggccaaggaagcagggcatcatattctccacgcatgatgacaaaaaacagcgacaagtgcgtccccttccccatcccgtccccgttcaggtagaccctggcacacatcttatagccaaagtaaccagtgtagaaaggctggctgtaaagggacagggtcttccccatgacggcctcctgcttccgccgcttgtagtcgcgaatcttccagatgagcactccattgtagctggcggtctccaggacctggaag

SEQ ID NO: 475405 - DNA, 1000 bp, Homo Sapiens; identical to SEQ ID NO: 344023

SEQ ID NO: 475406 - DNA, 1000 bp, Homo Sapiens
ttgatgtcatcatttttattcattttctctttctgaaaataagagtaaacatacaatatatattttctgatgatatatattagatctagttaccgtagggtcagaaaaccatccccaaccactcggaggcagctttcaatcctgacattcggtggaggggaaaaaagtgtccgtgattgccaaaagccgaatctttctttattattacacagcagtaacaggaaaacctaatgctctgtcagacacaactgaaacctgggaggccaggaggagggcagcagacactacagagaaaccccgaagaaacccaaacaggaggcgcacccgcttacccagccccatctctcggcccagtctttgtggcaggaggcctgggctcagaggcgacactgaggaatgtatcacaggcagtgaccacccttggggcagaagtggggagttggggatagtgcagctgccagtcggtggggagcccgagacaggggctctgggagcttctgcctggtcttgaccatgtgggtcagcactcgggaggctgtggcccaactggcacagctgcagggcaccagcctggtggttgcaagtgggtggtgcaggccctgggctcctcccagcctagctctgcccctctgccggcacctacagctccttgagccccaggccctaagtgagcagctctcctggtaccaaggggaacccctccctgcacacccaggccaggttggcagggtccatcccatgagaggtggcagtggagggccctttaacaccaaccggagagaccaaggagccaggggctgccggggctgtgagccggaggggcaagctccacactcacccttcaggcacagcttctgtggctgctctggctctgtttcctttggtccccacctcacttaaccccacatcacagccacaggagcaggggtgtcccagagcacgggagtgcactgcgctctcaccccaggagggggtggtgccctaccccagggatcgggtg

SEQ ID NO: 475407 - DNA, 1000 bp, Homo Sapiens; identical to SEQ ID NO: 344024

SEQ ID NO: 475408 - DNA, 1000 bp, Homo Sapiens; identical to SEQ ID NO: 344025

SEQ ID NO: 475409 - DNA, 1000 bp, Homo Sapiens; identical to SEQ ID NO: 344025

SEQ ID NO: 475410 - DNA, 1000 bp, Homo Sapiens
ggctagcaaatgcaaaatttatttcaactgtacataacaggttttttttaatataaaacaaacacttcattgccatatgcaaccacaaacaataatatgcatactgtacaatacaatgcaacattcagatatacatccaattgagtttttcaaatggtagtcacctactaaaaatggcttttcccattcacagataaagagcacaattatagagatttttttcaagatcttataccactatatacacattactgtgttttggcaattttatgcaaaacacaattaatatagcttattatatacttgtggcaagcgttatttcaaagggaacaccatttaggccatttgcaaaggcctggtgatggcttaaacctaccttctagttcagactcttcatcctttcattagaatactaactgtacaaataaatattacagaattgtatgaacagaagattctattatcagcatgactgaagtcccacaaaagtagaaacaatggccctctggatgccacatcgccactgccacaggagaactgtcttttcaggcttgtggcactaatacttcttaaccagatcacaaaagctaatggtgttagacattcaaaacaaatgcaaagaaaaggtcaggttattcttctgcagtgatcttagcatcaagaaaaagcatcatcaaaatgcctttaactggtacaaaatggaatgatggtaaaccgtcaaaactttggtgtatagaatatcaatgaaaatgtcccagtaagataaccaaatgatacttggtattaaaggaaaatccaagtgcagcaactgtgtttgagtgttgtggtctacacagcccatgacacaggcaacccacgcctacgagaaggcaaaggcagcttagccagtgcgctaatgagtagtctcgaggcaaacaaaaaagtgctccctgacgcagaggactaccgtatgtaatacaaaaccaaaatcgcttctaaatccacttatagtaagtataga

SEQ ID NO: 475411 - DNA, 1000 bp, Homo Sapiens; identical to SEQ ID NO: 160786

SEQ ID NO: 475412 - DNA, 1000 bp, Homo Sapiens; identical to SEQ ID NO: 160787

SEQ ID NO: 475413 - DNA, 1000 bp, Homo Sapiens; identical to SEQ ID NO: 160788

SEQ ID NO: 475414 - DNA, 1000 bp, Homo Sapiens; identical to SEQ ID NO: 344028

SEQ ID NO: 475415 - DNA, 1000 bp, Homo Sapiens; identical to SEQ ID NO: 344029

SEQ ID NO: 475416 - DNA, 1000 bp, Homo Sapiens; identical to SEQ ID NO: 344030

SEQ ID NO: 475417 - DNA, 1000 bp, Homo Sapiens; identical to SEQ ID NO: 160789

SEQ ID NO: 475418 - DNA, 1000 bp, Homo Sapiens
ttttttttttttttttctttttttttttttttttaacacttaaacaagtattattcaacagacatgtttacactaaataattaaggttatatttagggtttaaactcatccctgaatatccttagtaacaacctggaggaaaaactggggtgaatgagaacttaagttttccaaggattatggttcaaatcctctgaaatctataacaggttaaaaaaatgagaactcaactttctagagcaataactcttctcgagggcactagcacaaggcggtagtgattttcacttttaatatattacatataatactacaaaaagactgaagttttaaggaaaatccattattattaaaagtttagtactcttgagtctggactttctgacaataaaatacaccagagcaaaagcccaagaaagtacaacaaagaggtatactaactggcaaaatagctgctgcaacatgccacaggcacttcaggcctaacatttctgaaaaagcatggaacgtgtggattcccaggaaaaaactgcctcagatcatttgtaacaggaagaaatagtaagtgacctctctaacaacactcactagtagatattacatatttcccgtggcttgtttgtttgcatgttattgagaacagggcaaggaaaggcactgttttctccaggtagttgtttttgagcaagtgagggcaagctatacccctgcatcagtacttcgtggctgaaaaccctccctccgaaggctacccatgtcaaagcgggtggagacctcacagcgcactaataatgtgtcatccttaatgaaagttctttgtcttagggcttccagatgcataaaagttacatagccaaaaccttttgggttccgtgggattgtgggtcgctggaaagcaagcagctctggtttggcatccattatctcttcgtggttttgccttacaggtgcttcagactgatcaagaattgtaaggcgtattgtaccctggaagggccaa

SEQ ID NO: 475419 - DNA, 1000 bp, Homo Sapiens
cattgttaatgagtgtttattgttaataaaaccatagtacatttacagtaagtgacaacattattgtacagttaaagtatcatacaatattacagcaataaaataatgcctatttctttgtacatccagccaagcagctagtcaaaatattttccagaattgcaagcccctgggggcttttcagggtgacctgagtgccaccttctgaaatgcctggggcttttggtgaataaatagtttttaaggtgcggccagacagctgaagaagttgcacccagacagactgtgcctgatgctgccccagtgtctggtccataaatatgacaggtgtcaggggagcccagggcctgcagaattcgagggcaaggccgtgaggggacacagcagaaaggcctcttctcctggcccttaccttccatcaatgccctgtcctttaatctccaagagtcacagtccccagtgggacctgtttgcccagctctcaatcctacattaaaggagccgagagacttgaccaggggactctgcttcatcgcccccacaaaggcaacctagtctaggcctgaggttccagaatccacccatttactttggcccctaaaaccagcagcaaaacaagagctgaggccattcctacacagcaccccatcccctaccccttgcccctccatgccagacttagctcagaaaccatcaagctggggaactgccctctgctgctaactgagcaagctggtagtcctgatgggagggactctggaagcccaggcaccaaagacaatgggggaactccgggtggcagcagtcgtggtggcaggggggggtccacaggccactggatgcccacattaagcctgtcaaacctttgaagaacaagtttggggatttgggcagcctttgctatgtgacatttaggaagaaaaataccagcttttgaattactgcagacgactgggggcctaggcagtatgcattctatacattcataaggattcctgta

SEQ ID NO: 475420 - DNA, 1000 bp, Homo Sapiens
ttttttttttttttttttttttttttttttttttttttcccgggttattattttttattaagatcaaaatacaagtcccactatgaactggctgttctcacaataaataacaataacttacgtttgtttgttcggcaaaggctcacatactctgtcctccgtcgaataacttaaacactttcaaggcaagtctggtttctactgtttcccagcaatcatgcgctttgggagtttgagtgtctgttcctctgagttatccccttccttttccccgctaggagcccgggcgaagccgccagggagcgctgagctggggcagggcgggggtccgcgtgggcgagctccgggccggccgagatggggacacaggtggggcgtggagagacagagcggcggccacgtagagaggagaggagagggcagagctaaccctggtaagtcccagattctggttttgaaaaactaagagtcctcggagcaggggtctgcagtctggtgaaagcaggttgcatcctggcgccttgggctgtccagaccgtgtctctcggtactctctcataaataacaatagaataattacgaaggcgagagagctttcggaactggaatggcctgagcatgggtgagtctcatgcagggagcatgcgaggtccgcgggctggcagggaggggtccccctcacgtctccacgggactcggcaccatactgttgggggtgtccgggagctgcgaggacagggaggtcacgtcgctgccggaggagttgcctagggagccggactcggagaaggagaccagctgttggaaggcgggttggtccaggtcgctctggagggcaaactcgctgagcgccttccacggcggctggtacgtctgcacctccactgcgctgccctgcacggcgttctcatggcggatgggactgcccgccaccaggggcgtcccagtcagtccctgaaggctcgtcttgtcgctgtgctgctgctgctgcagctgcttc

SEQ ID NO: 475421 - DNA, 1000 bp, Homo Sapiens
ttttttttttttttttttatcagtgaaaaatacttatttcatgtgtttaaaaatacattcttagggtgggccctgcaggaggagacaggccgtccacatctccttcccaatagtgtgtccaggtcgtttccaaaatctgtgggtccctcacagcttctgatgacagctgctaatgccatttgctgaggaacaaggatggggaggatggcgagggcctggcccccagggcggccacaccagaaggtcggagaaaggcccaaggcggatgccacgcccagcagtggtgactgccccccactccttttctgagtctatcagcattgtttggttttcttcttgttgcttttaaatcctcgagcggcaccctgaccaaagcagatggtagagggtattctatgtctgtagatccgcctctcacctgccggtgcaggggaggctgccacaggctcagagcagatttccatggcctccccttctgaccgctctccactgtcccctggggcttctgctgaggctgggcttctgcttttctttggcttatcaaaccggaagtccgcggggtacaggtgcatcctcaccatgtgatccttccggtctctgctggtcttgaacttctctgtgcagccttctaccaagcactgatacatgtcctgcctctcagacaggatctggaagagcgaatcgtgccactccaggatgtgggcgtccagcaggtgtccggaagggaaggcccgcttgcaaaaggagcaaacatttccgtgcagcgtgtggtagtggtgctcgtagtcgtccagggcatcgaacacctggcagcagccggccacctggcaggcaaacgcgggcaccctgggcttctcaggcacgtcggccacctgcatgatcacgtcctggaggtagaggtggcgctgcacgtccccatcctcgaagaactggtgctcccgcgggaagcgcacggggcgcgcaacgaagcgaaagggcgcggccccagccgcgggatccc

SEQ ID NO: 475422 - DNA, 1000 bp, Homo Sapiens; identical to SEQ ID NO: 344036

SEQ ID NO: 475423 - DNA, 1000 bp, Homo Sapiens; identical to SEQ ID NO: 344037

SEQ ID NO: 475424 - DNA, 1000 bp, Homo Sapiens
ttttttttttttttttttttttttttttttttttttttaaatttccaaacctttaatcccaaatcagatcacagcgaggccagacccttcgctatctcccccaaccgcacccggagctgcagatgagttgtaaaaagtctctcccggcaagtgaatcgatccagacctgggaaatgaaggggcccccaactcccacccaagaccccctgacctcatcccccaaccccacaccccagctaccccatcaggtccccgccagtcttctctggggaccctcgtttgcaaagagcctcttcccatcccacccccaagcaacccacatacagccacagagaaaaacgtatttacagagggagaaaggataaggggacaggaggcaggcgtgtaaaaaaacatgggcccccgagcagggagaacacagtttctctaggagatggggcaaaaagatcttgggggtacaatggagaaggtcaaagggctcggtggttgcttagagaagtctcacgcgtggctctaggtggcccggtgcccccgcttgggacagagggacccccagggccaggaaggcagtgtgagcagcagaaagcagccggcccccaacagcaggatcaggccggcccccacgccgcagcccagggaccaggagtactcgtaggtgaggcgtggggccgggggaggctccgggctgactctctgcagcagggccctcacggaatgccggaacacctccaggctcaccaagagcagcaggcctgagaggccaaagcagacggctccaactcggagcaggaactctgcacctttactgagcaccatgatgatacagaggcaccccaaggccatgactgccaggcccagcactgctatcaccgcagctgccagattcacctctttctttgtggttctctgaaagatgcgtgcattctcccccgtggtgaagaatttaaaataggtgcagtttgcttctccgggcagctccgcggggccgcaggtgtccctg

SEQ ID NO: 475425 - DNA, 1000 bp, Homo Sapiens; identical to SEQ ID NO: 344038

SEQ ID NO: 475426 - DNA, 1000 bp, Homo Sapiens; identical to SEQ ID NO: 344039

SEQ ID NO: 475427 - DNA, 1000 bp, Homo Sapiens; identical to SEQ ID NO: 344041

SEQ ID NO: 475428 - DNA, 1000 bp, Homo Sapiens; identical to SEQ ID NO: 160793

SEQ ID NO: 475429 - DNA, 1000 bp, Homo Sapiens; identical to SEQ ID NO: 160794

SEQ ID NO: 475430 - DNA, 1000 bp, Homo Sapiens; identical to SEQ ID NO: 344043

SEQ ID NO: 475431 - DNA, 1000 bp, Homo Sapiens; identical to SEQ ID NO: 344044

SEQ ID NO: 475432 - DNA, 1000 bp, Homo Sapiens; identical to SEQ ID NO: 160795

SEQ ID NO: 475433 - DNA, 1000 bp, Homo Sapiens; identical to SEQ ID NO: 160796

SEQ ID NO: 475434 - DNA, 1000 bp, Homo Sapiens
ttttttttttgaggagttggaattttattccaagtgaggcaaaaaccatgcaaggtatagagcaggggaggccaaggccaggtgtgggtttaatcggggtctgtcggtggcagggcagctgcagggaggccgtgttggtgatgcctgggccagggcacagtggtaaagtttaacccaggctcccctgtctacccctgaaaaagactggaaaatgctgagtcccagccaagggtccagggtctaggagctgaggtcagagaggcccaggaggtgggggaggcaggcccagtgaggtggccctctcctggtcttgctggcttcggttttcccaggggagctcactgcaccctgagcggcattgtcccccattgccctgacccttgcccccacctccttggctggtggagccaggagcctgggaggcccctgtgcacacctggcagcttcacctccccaaacaggcccggagttcattcaaatccagcctctgggagcaggggccttgccactcggttatgtgagcctgctaaagccctccttgccatgtgtgcttgcaggcgggggcccagaaccaagttgggaggccactggctgtcctgtgggaccagagaagtctggtgccaccctagcagggccaagggacttcttctggacgtcagtctgtgcccagcctctaccaccagctttcccttccctgcagggaggggcatgacctgcagaaccaaaggtgcttctgtgagccagtagcccagtgctgcttgggggcaggggcggggcctgtgccttgggttcccccccctccctgggcacatttggggttggggcagcccacacggtggggtgggaagattgacctgcccattttacaaatgagcaaaggtgggagaactcagggagacatgggggagcagagggaggaagcagagcccaacagcccggggcacccggaccccagccactgcctgcctgtggatgggtttctggccacggtgcagggcta

SEQ ID NO: 475435 - DNA, 1000 bp, Homo Sapiens; identical to SEQ ID NO: 308768

SEQ ID NO: 475436 - DNA, 1000 bp, Homo Sapiens; identical to SEQ ID NO: 344047

SEQ ID NO: 475437 - DNA, 1000 bp, Homo Sapiens; identical to SEQ ID NO: 157851

SEQ ID NO: 475438 - DNA, 1000 bp, Homo Sapiens
ttatctttatcctccttgattcaaaaatacaatttattttaaaaacaaaaagagggaatggatgcagaagcccgtctgggctttccgtggagtcgccccttcccaatggcgatggccgctccctgtggcctcagcttcctccgtggaatgaaggggtccaggtgacaccttcctcgaagggtgggcgtgggcctgaggctcccaagtcggccaggggctcggcctggctcagaagaggtgcttcacatcaacagtggtacggggtggccgctgggccctgggtagcgtggggtaggggtcgggggaagtcgctgtagggcaggctgaaggggtagaggggtctgtaacgtgagtcctgccagagcagcttgtcctccaggaaggcgacggtgggcagcgtcaggaccagcgtctggtgcttgagcatgctgtgcacatttaggcctgggggcggggtgggggcggggcggggggccggtcaggccggggctgcctctctcctcaccccacccacatcggagtccctttgtgcttacagagatcgtcactgtggtctagtgtgactttgtgagcccagcagcccggggccagaccctgcctggccgcttgttgcctgtaagcctctggccaaggagctgctcccagctcatcacctgctgaccgagagccaggctcggtcctgtgcctggctgggactcctggctcccattctggtgggggagacccagggcaaatgacgggagggcagggaggtgacggggcacatcgtgcagggcctgacgtgccaccctgatgacttgggctttcatcctgagagaggtggggaagccagcgaggggcgtgggttgagggacaggacttgacttaggctcatgtcgccatcttgtggctgtggaaggaacagactgtggctttgacagaggtgactttggagctttttttttttttttttttttttttttgagacaagagtctagctctctccccaggtttgggtgca

SEQ ID NO: 475439 - DNA, 1000 bp, Homo Sapiens; identical to SEQ ID NO: 344048

SEQ ID NO: 475440 - DNA, 1000 bp, Homo Sapiens; identical to SEQ ID NO: 344049

SEQ ID NO: 475441 - DNA, 1000 bp, Homo Sapiens
ttttttttttttttttttttcacccttccacccactctggggtcaaatagtaatttattgggtgaatgacagtgttcagggacccaagctcccctaacagccagaagagggtatgtgtgggcctggcaggaaagggcagttgccaaggaggagtcatatctgatccttcccatttctcaggacaatcaggctcagcctcctgggactgggggaagcagatgtgctgagctcccacatggtggtgggaggggcgctgggaccacagccggcagctgccttcttggacctttccaggtcagacatttgccctggtaatagacggtgctgcccacggccacagagagaaagctgacagcatagaatccagcccgaaggaggaggactgtaccagcccctagctgaggatgttctttctccaccaccagccgagtcccattccctgtcccgacaccaaggcccagcacctccactctgcacacgtagatgctggcgtcatggcctcgcacgtcccggatgtgcagctcagcctggtggtcatggaggaaacgggaagaagcaagtggggccaggcggcccctgaactctggggttccattcctcacctccttccctggaaccacctcatctcggaaccacgtgacggagccaatggccagtctcccttggctggcattgaaggagcagggcaggaaggcagaggatccttccagggtacgaatctcagggggctgggacacccagagagcacaggatcctggatggaccatgatcaagatgagcaacagcatccaggccatgtcggaagatgtcccagttggcgaaggggatctgagcagtgaggtctgggtggaggaggaaggactcactacttgtagccaggcctttggtcaccagatggggatggggagcttcctatgacacacgggactcacacatcacttgccaaggaccacaactgccagggacctcgagcatcaaatgcttgcctccctgaggagag

SEQ ID NO: 475442 - DNA, 1000 bp, Homo Sapiens; identical to SEQ ID NO: 344050

SEQ ID NO: 475443 - DNA, 1000 bp, Homo Sapiens; identical to SEQ ID NO: 344051

SEQ ID NO: 475444 - DNA, 1000 bp, Homo Sapiens; identical to SEQ ID NO: 344052

SEQ ID NO: 475445 - DNA, 1000 bp, Homo Sapiens; identical to SEQ ID NO: 344053

SEQ ID NO: 475446 - DNA, 1000 bp, Homo Sapiens; identical to SEQ ID NO: 344054

SEQ ID NO: 475447 - DNA, 1000 bp, Homo Sapiens; identical to SEQ ID NO: 344055

SEQ ID NO: 475448 - DNA, 1000 bp, Homo Sapiens
gaattcacaaaatgcaatgaagaaaagcaaagttaatttttccaaataatgttttatgctcagctcccaattatcttattattttatgtttgaaagaatactgttaatagttatctctagatatttattatctctcttagcttcagttttcaaaattaaattcaataagttttcataagaacttctacataaatatttcttgcttttctgcaatggttttgtgagtatattttatacagcagttgacaagaatccagctcccaaataccaagaagtatttaaatttagtcaagaaagggataagaatgttaaataaatttgcatttctcaaatcaagaagagatgtttccctggaaagagtttcagaagcatactacttccgatttccattcatgattaaaaagatggattaaagacagataaaggtaaaccttcgagatgctaattggtggactcacaaaactataaatgaagatagtaaaactgaatgatagtaactgcataatggagcacctcagcacaatgttatttccaaaatgtcaaagtgagtttgctatatatggctaatggaatgatttaaaagaaaaaaacaaaaccgtgtagccacttttccagtgcttgaaaaaggagttaaataaaatgacagaaagacaatgcccactccaaggttgagataggtgtccctaacaagatctaaagctgctgtcttagtatagagtgtgttcctgatgctaaatatatgtagtttattcagatttcggcaaaaaaaaaaaaaaattatggctacataaaaaatactgttgttttaattggggatctggttcaagttggtgtttggaaaaaaaaataactggggagagaaaggggactacaagacccttacctgggctaattgtctattaagtctcttaatctcttcttgtagctgttcctggtcttctcgctgtctctccatttgccgcatatgtgcttgccttaacaattccgttgcctgttgatg

SEQ ID NO: 475449 - DNA, 1000 bp, Homo Sapiens; identical to SEQ ID NO: 160798

SEQ ID NO: 475450 - DNA, 1000 bp, Homo Sapiens; identical to SEQ ID NO: 344059

SEQ ID NO: 475451 - DNA, 1000 bp, Homo Sapiens; identical to SEQ ID NO: 344061

SEQ ID NO: 475452 - DNA, 1000 bp, Homo Sapiens; identical to SEQ ID NO: 160799

SEQ ID NO: 475453 - DNA, 1000 bp, Homo Sapiens; identical to SEQ ID NO: 344064

SEQ ID NO: 475454 - DNA, 1000 bp, Homo Sapiens; identical to SEQ ID NO: 344065

SEQ ID NO: 475455 - DNA, 1000 bp, Homo Sapiens
cacatctcctttccagtttttaatgttttttcttgtaaaaccaaaaatataaaactggcaggggaacggaaaacaagttctgcatattttatatacacgaggtctgtgatttcaaaaccactgcggggaggaacgggaagacaagatcgagggaatgttacagggccacagatcctggcgggcacctctgtgcgcccagctcaagctcggatggcggctccctggcagcgctgggtggggtggcagcgctggctcccctgggtcatggcctggctgttccggctgtggcctggcactcctgctaggtgcacggagggtgggagcgacagcaggtgggcgaggtggcatctgcagtgctggacgggcaggcgcatgtgggggctccttcaggtgtctgtgtagatggaggggatgtggcccaggcagtggtcaaaggctccattggggaagaagccacagtcctcggggccgctggacaccacatcttcagatggctgctgtggcagcgctgtggggcatgaggcctcagccagggcctcatagcctgtggcaggcaagggcgtgctgaggctgtggtagccattgggccgcagggggttgaaaccgtgggtctccccgaccagtccgtccccaccggctgctggttcagccatccggtagcagtcgccataggggaagcaactctggatggagtggaaactgccctggtaaccttgtgggctgggcagaggcgggggtggagggctctggaagggtgggtaggacggcttgctggggagtgtggggaagggctggccccccggagaatggctctgagaggatgggggcagcggcggtggccccagccccttcagggggctgactattggtgagaggaggccgggccccaacccatcccgggtgctctcagccatgggcagaggggacagatggtggtgggaactggtggtggcatccagcgggtggtgcctggaaggtacgtcgtgcgctgggggcagga

SEQ ID NO: 475456 - DNA, 1000 bp, Homo Sapiens; identical to SEQ ID NO: 344066

SEQ ID NO: 475457 - DNA, 1000 bp, Homo Sapiens
gctatttgggcctttgtcttctggtcagagatgcttcttttaggtgcccgtagtgggaaatggtagaagaggaagctgcaaagaagctggcactgttatggtcagcaggcagaaggccctgctgtgatcttctagggccctgggacctcccagcacagctgggcatagaaggggccaccagaacagcccgaggtcccccttggcttcttaaatatactctgattcccaagaggagcccagactccagctctctttccggcaccctctagcccattggccttagctctgtgtacccctgacccagccctgcagcccccagccccgagctcgagcctcggggcctcatgccgggcctggcagcagcctcagcttcatcacaacgtgtgaaatgagggtagcccattgccttgagcttgatgtctgctgggctgggggttccatttctgaagccacctctacttactcccttgagctggatcccctgccaggcttggggaagtcttctcaccactggggctcctccctggccagacagagtccctcctgctgccacagtgtcccccagtgaccctctctgcctcctcatggctactctgggtgtggcctcacaccctgacccatgcacttcagccatttcgtgccagaaagggtggctgaagtaaccccatatcccattactccttcacagccactgccatccctggcagaaagggtgggagacaggcaggtctgggtggggagagcagtgtatctgcagagggacggtggcaccagaccacctctgccgagacagtacccatgtggatggggtgaaaggagccaagcctaggctggggggcaggacacctacgagattgtctggttcctgcccctgatgggccatgaggatgtggccatgggcctcagcttccctctctgaccacagcctctgtggtccccaaatgagctcagagtccaacatgcctggaccccggccacggcttgagctccagggcccgcc

SEQ ID NO: 475458 - DNA, 659 bp, Homo Sapiens
tcaggttgatgtagcagtttatttgacaaaagcttcagggtaaagaggtcaaggaaatagcagaaaggttaccagctagagccagtgggtgtcccaagaaggaagtaggcagcactcttcttagaccagatggtcatccttcagcccacagtagtgatcggccaatagaatctaggggtttagcattgatttaaggggctcttcgttgtctaagcagatgtttccacagtaggtccagcagcatgtatgatttggacgtacacaagtcattattttagtacaccttttctcacagtacttatatggaggctgtacccagcactgctcagtttctcttatcatatctagaaagggatctttgttccagaagcttcccagcacaggcagaagcatcacaactccagagatgaacatgacgagtagaagaatccagggcttcatggtgctctctgtgtgtatttgggttaagttctggcagaaggcaagtcttttcccaatactctgaaggtgtctgcattgagtgtctgtagtaactggctgacagctcttttgtctggccttttattatgaagttgtttgaagtggggctcgaactcttttgctgccactacagatgatcattgagagctcactgtggcccctacagatgccccacttgt

SEQ ID NO: 475459 - DNA, 1000 bp, Homo Sapiens
ccatctagattatgggctcctcactggtccaatctgcttcccgacagctccaggatttcctcaggaagctgccctccaccttcatccacctcagacgcgtcctgcagagccctctggagaaccagcttcaggttctgcctattttgacgctgcctaaaggagcccacgaagaagtaaatgatggggttggcactgctgttaagagcggacaggaaaatagaaactagatgaacatgacaaaataagacttccctgtccacgtggatccataaaaataggaaaaactgaatgccaaagggcaggccacagaggaggaagaccagtactgtgagcaggatggtcacgtacagcctagtcagcggtatcttccgggatccacagagaatcctgatcagcaggaccaggctggacccacagagaaccacacataaaaaaatcagccacgcgactgtgatgaaatctgatgtttgacaccaagcagaatcagcaccactgaacaggaagccacataacatccattccaggatgctccgcagcagggacagggcccagagcaggacacacaccaccgctgacaggtgtgtggggcggtggcagcggtaccagatgggccacaggacggacaggcagcgctcggtgctcacggcactcagaaagctcaggcctgcaaagtaggaaaacatcatcacaggatagaggattttagagatggtatgggggatactgatgaagcttaacagggaatatataaggcggccgctgaggaagaggaagtctgctgcggccaagttgaggatgtagatggagaaggcgttcctgcgcatgcggcagcccaggagccagagcacaactgcgtttcctgtcagcccgacaagggaaacgatgcacgtcagcaccgtgaggctcaaggtctgcttgtagcaaagagtctcctcagttccgttgattggtgtcagttctgtgtccaaggttgagatggttggatccatgctcagaaacc

SEQ ID NO: 475460 - DNA, 1000 bp, Homo Sapiens; identical to SEQ ID NO: 160800

SEQ ID NO: 475461 - DNA, 1000 bp, Homo Sapiens
tttggcttcagggatgctttattatccttttataatactcgttaatttgggctttggcaatttctgcagatgtacatttcatttcttccctgtaaatgaagaggcaacccatgaggttgttaaacaaattctattcagtagctggaaaagtgaatttcctgtggaatgacaggaattacatagaagcaagcaattttattttcctcaaatgtagcaataattttaatctgtacatacataaaacaaacagtgcaattataaaaccttgaaggtgacatgcatattttaaggtgcagttgggatgggggaggatgttagcatctccaattttccttactttttttttctagttccttatgcaaaagcactgagtcaggaaacttcatctggaatgctgaagttaaaggtgaacttcctgaagtctgcgcgtctaaatatcacaaacaaaatggaaatgaccttctagagcagtttggtagggactagagtaatatggctggctttcaagctggaaatgaatgaaatcagggatgcattttctgaaaaactaaaggagataatgtttgtaactgagtgtcctatttctgtttcatagttgctaaccacatgagcccttccaccaatctttttattcggcatagtttctgaatagatgctgttcaatggagttatttgtaactaggggtggtgagatgcagaaggaaggacctggggaaatggcttcttccttgaagtctgagtccatgctcctcttccactgttcttatggccttttctctgccatggaggcagaggtagctggtgcagaatgtcaggtgctgtcatcattcacaggcccagggatgcagacaaaggtgagtgatgggggtctacctttgcttcttccacaatacctttctcaagctttcctggccttgcagcggaacttctagaactagaaagtcagttcactgggttcttgactcagaggccaggatgagatgggatgtggcagagtcac

SEQ ID NO: 475462 - DNA, 1000 bp, Homo Sapiens; identical to SEQ ID NO: 344068

SEQ ID NO: 475463 - DNA, 1000 bp, Homo Sapiens; identical to SEQ ID NO: 342437

SEQ ID NO: 475464 - DNA, 1000 bp, Homo Sapiens; identical to SEQ ID NO: 344070

SEQ ID NO: 475465 - DNA, 1000 bp, Homo Sapiens; identical to SEQ ID NO: 344071

SEQ ID NO: 475466 - DNA, 905 bp, Homo Sapiens
ttttttttttttggggtcagggtgcctttattggtgaatgggaatgtgtgggttggagctcaatggccatatgtcggcacgtccagggtccccaaggcagcaggttccaaggcactggggcagcccacgccgggggcgagccctgagcagcaggcaccattctcgccctgcgcagggcctgccacttggggcaggccaggaggctggccaggccttcagcaaagctgttgcagctcaatcagctcctcttgtgggacccggaggctttctgccggtagatctcagcggtgaagggctcttcgtataggagagccactatgtaggtgagggccaccagcaccgtcaggagcaggcccgtggggctggcgtgcatgatggcccagcccaggtagttggctgtgcttccccagtacatggggttgtccaggatgttgaaggggaacacggtcactctcgcctccttgaggatcccgaagtaatcacctaggaaagttccagcgaaccccagtgcaaagaagctggagagcacgagcacgacgcccagtcccaggagcgcgaggcccaggctgtaggccgcgggggtgtccaggctctccatcctgggctggctcagcatggcctgcgtgaagcagtgcgagcgcaggaagttcaggagcaggatggtgacgcttagagagtagcaggccaggtagggggatccgaaggccctgctcagcttgcgggtcttgtgttcccatcgtgcaaccacattccagtagagcggattgaaggtgatggtgatgacggcagccacaaagctgggatccagggggtccacgtagcccagcagccgggtcataacgcagaagtctgccaggaatcaggtaaaagcaaattaaaacaatagtggtgtgcctctcctcgcc

SEQ ID NO: 475467 - DNA, 1000 bp, Homo Sapiens; identical to SEQ ID NO: 160802

SEQ ID NO: 475468 - DNA, 1000 bp, Homo Sapiens; identical to SEQ ID NO: 160803

SEQ ID NO: 475469 - DNA, 1000 bp, Homo Sapiens
ttttttttttttttttttttaagttagtttaaaattttattttttttatttattttttaatatttttatgtaataaaaagtaaaagtccttgtccagccatcctcgtggggcatctgtctgtctctcacacaggtcactcaagttaatgggaaagaaagaacagggggcccaagtctgaagttataaataatagaaaataaaagatcttccgtctccagcgggggaatagatgagaggatgggagggcaagactgggtggggacgggcaggggcagagcaggaaccccccacccctgctggaccctggccctgccctctgtgaggcccctcccattcaaggtgcttggcaggaattccccagctcccctggggaacggggggatggggggctgggagtggtccgagctgctgggggaagagacatagatcactcttccctccactcatggaggtctcaggtcgcggccaggacaatcttcagttccccggggggtggaaggggagctgctgggagggatgagattgaacttgggggtgtccgatgtaggggtagggtgagggtgtggaagctgagagtgcaggcaccccactctggggcaccgcgccttgggggggccccccatgactctggggtgggtgcagcagcatcacctggggcgggtggggagccccagggtgagggggcggggctgctgtgattccagtttggacatgggcctgggtaacatgggccatgttggtgaagccgtggggcagctgctggtggtggatggcatacacagcggctggctgggggaagctgctctgaggggactgggcagaaggtcccggtggcagagagggcggcgtgcctgtcagggcccctgggtggtacagattctgctgtggctgtccactgcccaagtgtggggcctgccccgcctgatgctggacaggactgggggccgcatgctgggactgcggctggcttccagtaggcgtggtagccggctgcggctg

SEQ ID NO: 475470 - DNA, 1000 bp, Homo Sapiens; identical to SEQ ID NO: 344072

SEQ ID NO: 475471 - DNA, 1000 bp, Homo Sapiens; identical to SEQ ID NO: 160804

SEQ ID NO: 475472 - DNA, 1000 bp, Homo Sapiens
ttttttttttttttttttttttttttttttttttttttctaaaacaatattttcttttgggaaatgcccgttttggcaggaatacattttggctccgctgtgctgtgaattcggaggaaaagtagggagggccggaaagcccagggcttcatgcagagtagacatcaagaacccacctgctctggagtcttggtgggcaaggggaacgaaccttccagtccatttctaccgtcaccataattcctgtgtctgaatctgaatcaccttcttcaaaaactgggggctgaggttgcctccacatgctaacgctgattcagggcggcagcagatgctggtgttctcagttccttcctgcttccgcttcctgttcaggaacagggccgcattttcccatcctcttcggctgtaggcgtggtcacgtgaccaggagggcggggcgcgcctgcctagcatacgctggaggacggcgccctcaccctggcgggaggtggatccccagcgcggtgcagttacatcgcagacatgggctcgtctatacgctgctggacggccggggtctgggctccacagccggggggcaccaccctggagctggtgataggggagggaatcgccgctcgggcgcccgggcctcgcgcggagcctgcgtgcgcgggagttcacggggcaaatcctgcccatcctccgcgctcaggcgtggcttcaaaagcctcgggccgggtggtgcagccccagcataacctggcgccccggtggctgctggagtggttggctcagaatggaaggaaacggtggggtctgcgttactctgtggtgataaaaaagagaagcggcagcttagcgccaagaataaatgatgaccgccggaatccctgccgttaggcgcaggtcttggcatgagagctgcaacagggcggccagctgggcgccagggggcctgggccgcctgtccggtgcgggtccccgaatatcctgggctcttccgggaagtgccgctgcg

SEQ ID NO: 475473 - DNA, 1000 bp, Homo Sapiens; identical to SEQ ID NO: 160805

SEQ ID NO: 475474 - DNA, 1000 bp, Homo Sapiens
tttttttttttttttttttatatatacattagaattttttccttttattcttgttcacatcttcgaagctgagcttcgtttcaaaaggaaggataccagaggcaggaggagggtcacttgggaggggaggtggaatctccctcctctagcccccttgctacctcttaacaggcttcaaagtcagaatacagccatcagctgagagcagttcattttggcacactgggaggccggctgtgcacaccggacctctctagtgggggatcaggtcctctgctctccagtggggcctggaacagctccagtgagatgccccagctgtgggctgggggtgcagcacagagcctcagctcccccaggaccctcagctgcctgaagaaaacactcacctggctggagggaaaaagggccttgccctgaggtatcaggtgggtggcaagtcatactgagctcccgctcagcaagaaaactaaacgcacagaagacagcaggaaaatgccatcctttaacagccaaaaatctgtccttcaggggcaccaggtgactccagcccctgggggacagaacaaacacaccatacctaccatcaggcaccagacgcctcaaaacgcctggagctagggccggaaaaggcgttaagtcaccttctctcagcagaaatgtgaagctggccttcagcttctgcccaggatggcagaaaccacattctgttggtggattggttgctggtgatggacagagccaaaggtcctggggttggccccaagagctgaaacggtgcttgcaggaatggctggcactccaagctgcctgaggcagcccagctgcactcaggtgacagtgacccaagctctctgggctcagggtttatggccaccatagcccaagcacatcctgatgccctgggtttaagtaatgtaccctcctttgttctggcaaaaagctagagaaaaaccactattcaaatccctggaagggaggtgggtgcagctccccagca

SEQ ID NO: 475475 - DNA, 1000 bp, Homo Sapiens; identical to SEQ ID NO: 344076

SEQ ID NO: 475476 - DNA, 1000 bp, Homo Sapiens; identical to SEQ ID NO: 344077

SEQ ID NO: 475477 - DNA, 430 bp, Homo Sapiens
tttttttttttttttttttttttttttttttttttttttttttttttttttttcaggcggcgaggcagtcggctgcgcgcagggacaggaagacgttcgccttgcactggtaggtcccgcggccgtcggggagccgctcgcacctctgcaggtttggggcgacgtcctggacgcacacagcgaggctccgcagcctggggtgcagttgcagctccggggaggcgccggccccgcccgggggttccgcccctctgtagggctgggagcgccgcgcgtacggggacctgcggaggccggacagcagccccgcggcgcggcccaccgagtaggagctgtgccccgccgctggcttgtaccacgcgaggccaggcggcgccagcagcaggcacagcgccagggcggcggccgccagtgtcgcggaccgggccat

SEQ ID NO: 475478 - DNA, 942 bp, Homo Sapiens
ttagacactgtccgctggccttggaaggtaccggcttaggatgaaatctgtcacaggggtgggcaacttagccagagggatgtagaggagtttggcatccaggccagggttgtagcggatgcgagggctccgggaaacaatagcatgctccatgctgttgatgacatctctgactctgggctctgccacctgcattatgttttttaacttgtcagtatagatgcggaaataatcctctccgtagctgtcccgggtctcctgaggcagcctctcccaaagctttcgcatgcgtgactccaggttctccttgccgagaatggctgtccgatagttccctggctcaatgatgcagactttcaccccaaagtagtagagctcacgccttatgctgtcagagaaggcctcaacgccaaacttggagacgcagtagccaccaccaatgacagccacacgaccaccagagctggacatgttgacaaccctgccccgggctctcttgaccatgggcagcatgtgaagggtcacttcgatcagtcccaccaggttcacattaatcaccttcacaaagtcatccttggtcagccattcgttgggaccactgggcaggcccacaccagcattgttcaccagggcccagaggccttgttcgcccactttgtccctcacccactgggccgccgccttgatgctttcgctcttggtgacatccagtagggtggtctgcagccgataggaggtatcccgctgaagtttctgggatccctcctcagtgaagcaagcagccagcacctgcatgccccgatcaaccagctgtttggccagcaggttcccgaagccagagtcacagcctgtgatgaagacgtacttctctgagaggttgccaaccagattgcagttcttgaaccagcgatacataaatgagaggtctgtgagggccgccat

SEQ ID NO: 475479 - DNA, 1000 bp, Homo Sapiens; identical to SEQ ID NO: 344078

SEQ ID NO: 475480 - DNA, 1000 bp, Homo Sapiens; identical to SEQ ID NO: 344079

SEQ ID NO: 475481 - DNA, 1000 bp, Homo Sapiens; identical to SEQ ID NO: 344080

SEQ ID NO: 475482 - DNA, 1000 bp, Homo Sapiens; identical to SEQ ID NO: 344080

SEQ ID NO: 475483 - DNA, 1000 bp, Homo Sapiens
acagccttttccagaagctgcgctttgaactactaggctacagggctgtctcctaaaagtcaaagtagatcagatactgtagctgaatcccgttccccttctccctcctgtagtagcttacaacgcatgacagcttctttgacttgacgaaagccaccatcagggcccctgccatcgacgtagtacatgaatcggagctcaggtgggtaggcagctctgctgaggcccgacagcagggggatggtgcagccctcggcccctggagcctcggtcagggcctgcagcatctggtacttgcaccaggggtcctgaaggaagcccggcgtgatgagcagcacccggcagtgactactgctcagtgcctggcacagctcggacactatagcgccgcctggggttgcatcccggagttgcaggaagcagcgcaggctggcagtgctgccttccaagtaggagaccaggtcctgggcggccaccaggtcttcctcactgtggcacacgcagacgtcatagtctttgctccagcgactactgccactgtcactcgcatgtgtgggtggcaggctgggagacgtgactgagctgaggcttgggggtagtgggctgtcctgtgaggtaggctgtgaagcatcgctggaggtgctttctggggagttgggcctcttcttgggcttcttcagcagggtctgcctgaaccagtcagccatcttgcctagaggcttcttaggccgagagccaggagctgggagggaggtcgatgatgccatagcgtgggggtcaaaactagccccgtgagaccaggcattggtgaagggggaggagggaggagacccagtcttgacctcatggagcagccatcagggtatgagctcagcatgaccagctgaggaactgttctctgctccacctggccaggaggatattcgggatctggggaagggcagctggcaggcagctctttagaaggacttcctatgtaaggccatgttcttttcccacc

SEQ ID NO: 475484 - DNA, 1000 bp, Homo Sapiens; identical to SEQ ID NO: 160715

SEQ ID NO: 475485 - DNA, 1000 bp, Homo Sapiens; identical to SEQ ID NO: 160806

SEQ ID NO: 475486 - DNA, 1000 bp, Homo Sapiens; identical to SEQ ID NO: 344081

SEQ ID NO: 475487 - DNA, 1000 bp, Homo Sapiens; identical to SEQ ID NO: 344082

SEQ ID NO: 475488 - DNA, 1000 bp, Homo Sapiens; identical to SEQ ID NO: 344083

SEQ ID NO: 475489 - DNA, 1000 bp, Homo Sapiens; identical to SEQ ID NO: 344085

SEQ ID NO: 475490 - DNA, 1000 bp, Homo Sapiens; identical to SEQ ID NO: 344086

SEQ ID NO: 475491 - DNA, 1000 bp, Homo Sapiens; identical to SEQ ID NO: 160808

SEQ ID NO: 475492 - DNA, 1000 bp, Homo Sapiens; identical to SEQ ID NO: 344087

SEQ ID NO: 475493 - DNA, 1000 bp, Homo Sapiens
tccatctggggaggtgctcactcaatgtttattgaacagcgaatacagaaaagacagtccctggagctctatatgtggaaagtagcccttctggacagaaagaatattcgtggtccatgtggtttgagtctgttaagaaggacactaaggcacatggctggtgatctttgcgtcatagacacgggtgagctcatggtggaactcctccttgtctgtaggtttccaggctgggcacagaggtgagggcagaatgttgggggtcccagtggatctccccacaacttcctccagggcaggatttccacccaggcccaggctgcccgttcctctccttctccgccagtctgcgctgcggctgccacggctcacaccagagggatggggtaggaggcgcaggcagccaggccacacatgttctttccgcgctcgatgaggaagtacccgttcattccccactggggaccccaagagtttttcacgatccagtaagggatcccatttttttctccatacccaacagccagtactgcatggtttactttatctggagttttatggcaggaagtactggagtagatgcccgttctatacatcatgaagtcctgagtcacctcaaaggcaaagctcacagggttgtagagggccacagcctccaccatcgcttcctcgtcatagattgtgatgttggctacatccttgacaaagccgatggcctttccaggttggaacttgcaataaccatccttgccctggtaggggtaggtgtcttcacccatgatccccttgttgtacaggatatactcgaaagcctggctggggagacccccttggcagccgtgattattgaagtcctgggcgcagtccaccagctgctgttccgccaaggacagcatctttccggttgcgatggcgatcgcagactccagggccccagtggtggagaaagtccagcaactgccgcaggcaccctgatttttcacaggtgagacaaaatttcctt

SEQ ID NO: 475494 - DNA, 1000 bp, Homo Sapiens; identical to SEQ ID NO: 344089

SEQ ID NO: 475495 - DNA, 1000 bp, Homo Sapiens
ttttttttttttttttttatcgtagagtacgttctgcattttatttctgcaggcaacacttttgctcaccagcaagaacacagcccgaggaagggacccaataacctttcaaaacgcaaactgctgcctgcggtgagggcccagggtcttccacggagaggacaggcatcttcctttcccaccaggaaggagtgagcccggagcctctgctatgtgcaaggcggtgtgcaagcaccggctgcagctttttgctctcttctttctctttggggctgggctgggtgtgcgttctggtgctgatgctttggcctgtgaggctgagctagagaaatgtagatgttagatgtgccagtaccatcctgcgcctcccaagcatgcccccactcactcacgtcggcatctcgacccgttcaattacagcaacgaagaagccaccgctaagcgtggtcttgggggaagcccggaggcagtgctcggcacccgggaacgtgctcaggcctcggtggggccgggcaggcagggcgggagctagcctgaaggcgcccgggttctgctgcagcgcatcttgtaccatgtcttcattctcctcctggcagagggagcacatggagtagacgagccgctgcagggaagggaaagtgagcgcgtggcacagggctcgctgctggaaccctgccagggcatgcagacgcaccgggctaggtgtccctgccccgggctcctccagctgtctgctcggcatacctaaggaaaagcgtgtctcggttacacagcttcacaggctgcctcagtcctgaaatcctcgctcctgaaatcctcgcttcacagaggagaacttttgctccagggtcccaagcccattaaagtgtcagaactaagaccaaaacagatgactccaggtctaagctgctgtggacctctgagtccctcagccacgccttctcaccatctcacccgagccactgcaggaaggatccagcaggacatagtggacctcacg

SEQ ID NO: 475496 - DNA, 1000 bp, Homo Sapiens; identical to SEQ ID NO: 344090

SEQ ID NO: 475497 - DNA, 1000 bp, Homo Sapiens; identical to SEQ ID NO: 344091

SEQ ID NO: 475498 - DNA, 1000 bp, Homo Sapiens; identical to SEQ ID NO: 160809

SEQ ID NO: 475499 - DNA, 1000 bp, Homo Sapiens; identical to SEQ ID NO: 344093

SEQ ID NO: 475500 - DNA, 1000 bp, Homo Sapiens
tttaaagatggaaagactttattccatgaataacctggtattcctcctgtctccctcagtcactcacagatgtcaagcttagtagttttctcttgtgctgtatgagttcctttcaggatgttttcaaaccgctctggcctcctggttaggtggcactcacgacaacaccactaggtccaacccagtttctcactggcaatatgtaggtactaatgctgaaaccaaatcctattactgacatttaacctaatcttaccaataacagcttgctagggacttccaaaacccatactatgcatctgtttgtgggatgaattgggatctgcttttctctgctactgactatgaatttcaggggtgttggaaaggactgtacttgtgatttgggcctagctgtttcagggagcctgagggaagctctcatttgtgtttagccaaggttggtgacatcaggtttcatcaagtcttcatatctatgcactacatagaaagcctttaaaaactcattaaagtcaatgcttccatctttgttcaagtccattatgttggcaagcttattgacttgggaatcatcaatgtgaacattgtagtgagaactaaaaagtttccacatggcacgaaattcttccacggagatcaggcctgagtgatcagtgtcaatggcattaaatatgatttccaggtcagatctgtatctgtacagagtttcaactagagtagaatgagcctcttgtacaggtttttcaatgcggatattctggaagctggacatgtattcaacgtttccattttggtctatgtttaccagattcgaactgagggatctccatggtaagttcagccccaaaatgttctccatgcaaaaagcccactggctcacagaaagttttcctgattttctgtggtcttgaagttggaaagcacgagtaaggtcactttttcgtgaaatcactctctctcttaatatcttgatggcgctgttttccatagtatccactct

SEQ ID NO: 475501 - DNA, 1000 bp, Homo Sapiens
ttttagtagcacgattattttattatatgctttataaaaaaacaaacacccaaagacatacaacacaccgccctcaccccccagcggccattagggagggggcttatacttttcctaatgtagatctggccatcttataaagcagaccacattatttgtttccatatatacctgtagatatttctctcccctcaaatatttatatctcgactaaaaaaaggaggtgcaaagagtatataaagataaatgagattttcttgctgttgttatagtacaaacaccagatgactaccagtggagtaacagggcaaaacaaaaacacaaaccccaccttcagtgaggaatggaaggtctgttaccgacctcaagtagctgaatcacctgctgtaactggcacctccctgacaatcatgggtttgtagggacatgggccaggtgatggcttctacttgtttccagaaggctaatgtgtcctacaccctttcttagtaactaaagacgaactacgggagaacccagtatttggattctgcccagaggtattaaatgcacaaggaaaaattagttatgtccaagtagcaagcaataatatttttaaaccaacatggttaaatgttaagatttgtagaaatcaaaatatttattcacataattttaaactaaagttgaagctaatatatcttccgtggtaatgatttaagtgcaagtgatgcttggctttctttcacattcatttcttttcttctgagtgaaggcatatcagttattcttgaacaagtcaatacagctctgcaaaagggagacattgttcctggcatgttttatttccagttcagacatttcaattagattctttctaaatgctgccactctcttccgtttgaaatttatcagttcttcttttgcagattcggaaagttgttcaaatttctggcagcactcctgctggtgtgcctcagccaacttgacgtctttgctctttaaccgggccttatccaga

SEQ ID NO: 475502 - DNA, 1000 bp, Homo Sapiens
ttttttttttttttttttttttttttttttaccattcctaagtttctttattcttcatagttttctaatgaacaaatagttagttttcctgagtaagattataaaaaagttaaccattcttccaaaagtataaagacaaataaaatgtcgactcataatacaaattttttacatagcattaaaggtgcagatattgactgcccctcttcattatgattggcccaccccttaaaaagactgcaacagaggattcaattgtctaaaatacttcgaagtacagaaattaaatgctttagcccataaacatatccctcatctattgtgttgctagggaacacatgagcaaaatctatcattcgcacttctacttcagcaatctcttggcaaccagtgggaagatggtagaaaactttttccagttgggaaagtacatttccatttaaatgttcctgtgacatgcttttccacccattgtcttgctccagattttcaactttcaatgaagtctgactgtgatgcttttttgtatatattttcctgtgacgcgcatacatcttggacaagcttttgcccactgaagactctatttttccattagctgtggaacttaacacatgaaagttattattgtactctagtacttctgtgtctgacagttgtcctttggacaaaaacttttctgccaaagttctgtcattcaattttgtagtggttggctgagatgaaccttcataaacaaagagtaatgaacttgcgtaaaaattaagctgcttctggttttcaaaccactgcagaattttctcaatcttctgaatactggcagcaacagcatcttttcttaagcagtacccattatgaaaaaatctggagactccatcctttatagtttcttttgttaagcttcttccgtaatgctggttttctgtctcatagctatcggaatgaacatgataaaccctcatgccaagcaccaagaacccaatctcttccattaatgggt

SEQ ID NO: 475503 - DNA, 1000 bp, Homo Sapiens
ctagtccctcctcatggtgtagccctggatcatgctgttgaagtaggcgggcgtgttgcgctccgggtagaagaggatcatgtagcacttggggccgaagtagcccaggctgatggccaggaggttgagcacagtgaccaagaggtccacgatggtgaccagcaccccgctgtaggcagacatgaaggtgcagagggagacggatgaggtgaaatagaaggtcatgctgagggtgatgaacttggcctcgttgtagttggtgggcagctctttgcccatgtaggcgaagctgaaacccaccactgagagcagcaggtccaggctggtgttgaacagcaggctgttgcggtagttggggttacaggagacaattgtgatcttggggtcatcggggtcagtacgggtggtgggactgaggcccgtggccagcatgccaattaccacaatgaccattttgagtaccgtgataaatgccatagagacgtagggcccctggtagcggacccagtagctgtaggcgcgtgggaagcggctggccatcttgaaggcgcagacgatctggaaagaacgcacggcgatacaggagatgcaaattgtgaagcagaggggaaagagggcctggcggcagaggcaggtggagaccttgggcggccccacgtacaccgggaccaccatgtatgccaccagcagcagtgtcagcatcaggaagcacatggggcccccagccgagcgaactatgggtgtctggaagtgcctccagaatatcaccaggatggccagggtgctgaggaagcccagggcggccagcagggccacagcgatggtgggtgcctcatgccattccaggaagaccagctgccgcttgaagcaggaggtctcactctggtaggaccactcgttattcgggcaggcctggcattcatattcatcttcagtgtggttgaggaaggtgccgggaaggcagtcgatgcactcgaagcagcagacgtggatgcccaca

SEQ ID NO: 475504 - DNA, 1000 bp, Homo Sapiens; identical to SEQ ID NO: 344094

SEQ ID NO: 475505 - DNA, 1000 bp, Homo Sapiens; identical to SEQ ID NO: 160810

SEQ ID NO: 475506 - DNA, 1000 bp, Homo Sapiens
gctggagcaaaactttactgtcagaggctctgctgggccacaggtcttcagaacaccgggctcgcccggcctcctctaaggcattcaataatattagtaattaaatagcaacgctcatcccccaaccggaatgtacaacagaggtcccattgtgccatgtggtcccaaggggtctggtcccatgaggtctggtactcaagaggcagagggggctccctgatgcagaagggttaaggccacaaaggaaaaggagaagggatggggtctggggacagctgagctggtccatcacatccaggaatctggctcagccctcggggtgactgagtgcagggcatgccatgtccccagctctgcgggtccggaggggcggcgggggccccgaggcgtggggatacgtgagggtttacggtctggctgtgtgtccatccgaccccgtgcccaggtcctcgagggttcagtgcaagccagggggctcccaggtgcatctagtggcccccccatgccagggcaggggctgccttcatcggaggagctggaaagggcttggcttcggggcccaggcagcccattggccgtccggccagagtccccaggttggccacatttgccacccaggacgctgagggacgaagaggaggaactggaggaacaataggcagagtcaggagctggagggtcgggggcccgagctgggtcaggggctggtccagtgggggtcacgctagcaacagcctcaagggcccgggcattggccaggaactcctcttccaggcgccggaacagctgctgctcctgctgcgggtcgagctgcaggggtgtgcggaagatgctggccggtgtggtgcccaactctggactggggctggagacccgggaaagccggggtgctgcagggctgcgggcacggggagtctggggggtgctcctgcccgagcccccactgcccctgccccttggcacccatgagtgctgcccgtctcgatccctgcgcacaagc

SEQ ID NO: 475507 - DNA, 1000 bp, Homo Sapiens; identical to SEQ ID NO: 344096

SEQ ID NO: 475508 - DNA, 1000 bp, Homo Sapiens; identical to SEQ ID NO: 160811

SEQ ID NO: 475509 - DNA, 1000 bp, Homo Sapiens
aaaaatacggaagtttattgtaggacactcagtgtgaataaatggaatggaaaggcctacacatcgagactcatccatgattgatatgaatttaaaaattacaagcaaagacattttattcatcatgatgctttcttttgtttcttcttttcgttttcttctttttctttttcaatttcagcaacatacttctcaatttcttcaggatttaaaatcttgagggattgatctcgcctcatgacagcaagttcaatgtttttgccacctgactgaaccacttccaggagtgccttgatcaccagcttaatggtcagatcatctgtttcaatggcttcgtcagtatagttcttctccaggaactcgcgcactgacttggcaccccgacctatggcattggccttccaggcatggtatgtgcccgaggggtcagtctgatagagcctaggagtgccatcaaagtcgaaacccacgatgagggcagagatgccaaacggcctgcgcccattgctctgcgtataacgctgaagtgacatggcaggaccctccatggcggagccgtgactgccctgctgccagaggtgagcatgcaagcgggcaggcacccacctgcttcagactggcgatgtagcgggtgatgtactccacagtgaccgggtcctccacagtcagccggtggctctggcactccacccgggccctgttgatgactatccttgcatcggcggtgaggcctgcaaaggccatgcagacgttgtcatccaaagcacagatcttccgcactgttctttcatcctgcagtttggccactgacttcttctccacaccaagaacaacaatgtctcttcctcgaacaccaaccgcggtcgagcccttcttgacggcctcctgcgcgtactccacttggaagaggtggccgtcgggcgagaagacggtgatggcgcggtcgtagctcatgccggcgggcggcggccgggctccttccgccgcgactctcaaaagc

SEQ ID NO: 475510 - DNA, 1000 bp, Homo Sapiens; identical to SEQ ID NO: 344098

SEQ ID NO: 475511 - DNA, 1000 bp, Homo Sapiens; identical to SEQ ID NO: 344099

SEQ ID NO: 475512 - DNA, 1000 bp, Homo Sapiens; identical to SEQ ID NO: 160812

SEQ ID NO: 475513 - DNA, 1000 bp, Homo Sapiens
tttttttttttttttttaagcttgatctaatacatgacaccaatggatattttattatagcttcttaattatttaaaaagaataacatttgttagtatacagttattataaacagttaattgtttacattcattatttgtattcaaagaatcctagccgatctgaaggctttcccatactgcttacattcatagagtttctgccaagtgtgagtgcttccatgcatttgaagtcttgaggctgatctgacggctttcccacattgcttacattgatacggtttctccccagtgtgagtcctttcatgatattgaaaagaactggaagaagtgaaagcttttgccacattgcttacattcatagggtttccttctggtgtgtctttacatgtctatgaaagcaattaagcaagctgaatgctttcccacaatccttacattcatacggattctctctcgtatgagtcctttcatgtatatgcaaggaagaaaaataattgaatgcttgtttgcattccttacattcataggtttctctccagtgtgtgttttgcatgtattcaaacgatcttggcagatatgaatgctttcccacaatgcttacattcttagggcgcctctcctctgtgcaactttcatgtatttgaaaagaagagaaattatggaacgcttttccacatttcttacattcatagggtttctctccagtgtgtgtcctttcataaattgaaaggttcttgacagatctgaagactttcccacattgcttacactcatagagtttttctccactgtgagtccttttagatatcgaaaggaactggaacaattaaggctttaccacattgcttgcatttatagggtttctctccagtgtgaattttttcatgtgtttgaaataacttggcagaataaaagtgtttcccatatatcttatatttataaggtctttctccagagtgcattcttatgtgtttgtgtcctttcatgaaatcgaaagt

SEQ ID NO: 475514 - DNA, 1000 bp, Homo Sapiens
tttttttttttttttttttccaatagtttgactttattaaatcaatagaacgggatctcagtggttaagccgtcttaacagggccaggtctcttgaggtagtttttgggccatcagttaattacatcgactttccaggaaacagactatggagaatgagaggaatcagactgcctgtcacacacctctcatggaaccccctagtgacacctataaggacgttacagatctagttccagactttacagatctagttctattttctcaagttacagatggggaaactgaggccccagcagggggaggggatgtatctaagtcactagtgagttggcggcagtcaggtctcttgattcttttccccatactctcagcccaacttctcagtggagaggggctggcaggcctgctctctggatagaatgtagcaaaaggcccgtggtcaaactgatacggggtggggaaggttggtgggctctcagccatcagccattctcatcttacacgtgaaaaactcagctgagagaagggaagtgacttcccccctcagggtaacacccaggactggagcttggatctcctgcttctcagcctcctagaagcttccacaatggaatacaaaaggaaaggtatatggcggcatggccagtctggagaaagggatcaagttaatgactttaaatacaaataatctgaacaaatgactagataaaaattgatttccctaacatgatctcaccctccatgagctgtgctgtttctggagagagcagtccaggaaaggggtgtaggaaaatgcagtgttagaacgaacaccaaggctgcaaatgggggcaggggtgggctgggggcatttagacagtctgcactggggtcagtaaatccatgactccatctttggtgaggaaggccacctcaccagtgttctgacaccaaacctcaaaatgtgcagggtcctccagggccctcttgccagcgattatcacaaaggggtagccaaa

SEQ ID NO: 475515 - DNA, 1000 bp, Homo Sapiens; identical to SEQ ID NO: 344105

SEQ ID NO: 475516 - DNA, 1000 bp, Homo Sapiens; identical to SEQ ID NO: 344106

SEQ ID NO: 475517 - DNA, 1000 bp, Homo Sapiens; identical to SEQ ID NO: 344107

SEQ ID NO: 475518 - DNA, 1000 bp, Homo Sapiens; identical to SEQ ID NO: 160817

SEQ ID NO: 475519 - DNA, 1000 bp, Homo Sapiens; identical to SEQ ID NO: 344110

SEQ ID NO: 475520 - DNA, 1000 bp, Homo Sapiens; identical to SEQ ID NO: 160818

SEQ ID NO: 475521 - DNA, 1000 bp, Homo Sapiens; identical to SEQ ID NO: 344111

SEQ ID NO: 475522 - DNA, 1000 bp, Homo Sapiens; identical to SEQ ID NO: 344112

SEQ ID NO: 475523 - DNA, 1000 bp, Homo Sapiens; identical to SEQ ID NO: 344113

SEQ ID NO: 475524 - DNA, 1000 bp, Homo Sapiens
aacagtgagatccacctttattgaaacatcacacggcagcatcagggctcccacacctcacagggcagcaggcagttcacaggacagcaggcagttcacagagctttgggggcctcacagggcagcaggtggttcacagggcttcggggggcctcacagggcttcggggggcctcacagggctgcagggggttcacagagcttcaggggcctcacagagcttcaggggcctcacaggactgcaggggggctcacagggccctgtatgcagggctgctggtacaaagaagaggcccagagaaccctaacacagcctggggccccggggaagtcagggcttccagcagggcaggtacagaggcccctaggacttggcaggagcctcagccttggggacagtcccacggaagacgctgcatccgggctctttagcagaggcctctacccgtcctggtcagaggagccctcagacagttttgggaaagccagactggggtgtcgatgccgcagtgaggactcgtcctccaagtctgagccctgctgggctgaggtgctctggaagtctgcgtatgcatccctggggacgtccagcagctcctcctcgtactccgtctggtagtcagattcgtcatccaccatggcgggcttggcgggctcaatgcgagacacaatttcggcaaggtccgtgaaggaggcgttgggacaggtgaggaccgcactcgcgggcttcttgctcggcccctgctggtcgcggagcatcttctccagcacgccgctgcggccccagatgtcaaacaccgtgcgcccgtgctggtagcccacttcgcagatctcgttgaacttgccgaagtccagggtgctgtagctgtcgatgggggggcgcaggtactcgcagtagtcactgctcttcaccacctccagctgccgcacgcaacacacgtaggccaggcgcgtctgaatctctgccatgttcaacaccttgactttcgtggccaaggggt

SEQ ID NO: 475525 - DNA, 1000 bp, Homo Sapiens; identical to SEQ ID NO: 344115

SEQ ID NO: 475526 - DNA, 1000 bp, Homo Sapiens
ttttttttttttttttttttttttttttttttttttttttttttttttttttttttttttttgtttttaacctcatttatttaaaattaacaaatttgtaagccatttggtctgtggtattttgtgatagtggcctgagctcattaaggcagattaaaaacaaacaaacaaaaaaactaaaaatgtgaagcagatttgaaactgacaaatgaggctggaaaaattctgatgtgcaagctggaagtaaggttggtaagggtgatcctggtgaggtgtcattggggaatgaggaacatgctattgggaaataaagaaaatacaacccttgatacgaagtagtgaagaacttggcagaactgtattctagcactttgcggaaggtagagcttgagagagataaaactggttatgtatcactaagatctgtacttaaagtgttaaaggacacaggaagcttcattcttcctgagtgcttacaggaaaatgtgctcagaacaggccccccaaatttggacataaacaggccatgagaaactgcccataaacaaaatctctgcggcactgtgacatgctcgtgatggctatgacacccatgctggaggttgctggtttacccgaatgagggcaaggaacacctggcccacccacggtggaaaactggaaaactgctcaggcattcctaaaccacaaacaataccatgagtgatttgtgccttaaggacatgttcctgttgcagataacaagccagagcctgtccctttctttcttgtaaggaatacttttagctaatctataatctatagaaataatgtttatcacaggcttactgtcaataaatatgtgggtcaaactctgttcaaggctctcagctctgaaggctgtgagccccgattcccactctgcactctatttctgtgtctttgtcttaattcctctagagctgctgggtcagggtctccatgacccagctggtctcagcaaaaatgcaaaaggagacct

SEQ ID NO: 475527 - DNA, 1000 bp, Homo Sapiens; identical to SEQ ID NO: 344116

SEQ ID NO: 475528 - DNA, 1000 bp, Homo Sapiens; identical to SEQ ID NO: 160819

SEQ ID NO: 475529 - DNA, 1000 bp, Homo Sapiens; identical to SEQ ID NO: 344119

SEQ ID NO: 475530 - DNA, 1000 bp, Homo Sapiens; identical to SEQ ID NO: 344591

SEQ ID NO: 475531 - DNA, 1000 bp, Homo Sapiens
tttttttttttttttttttttttttttgagatggcaacactgctttattaggccgggccagccaggagcagacgcacggctcctcagtacacattcccccacccctgcctcggtgctccccactcagggctgggccatggagggggcagcgtaggtctggaagcgcttgtgcgctcgctggtgcgtgagcagtctcagggacatggtgtccacggccatctccagcccgggctgctgggttatctccactgtgtagtcattggccagctgcagggaggccagcatggaacgacacacctcgaaggccggctggccagccaccagctccgcaaagggacaccactcattgagctgggggaaccgtgagaccagctggtccccataggtgtggatgtcaaagggcacatgctgctcctgctcctggagcagaggctgcactgtgtcctcccagtccctgatgcgctggctcagctctgtctcctggacaaacttctgggaggtggcgatgaagagctccacattccttcgaaccagctcctcgtagctcagggacatcggcactgcgtcaaggtcagcggcttccctggggtctgctccctcgggctccatgtactcctcaggctctagaaagtcatctgctgcccccaggtcttccagggaatcctccaggtggtcctcctctgcaggccgcagccactgctcagccacctccctcctctgcagcttccggagagtttccaactgctccttcacgtgtgtccagtacaggacctccatgtctgcaaaggacggaccctttcgccgaagccgcctgctgtcggcatggtctgcataggcagccaggtaccactggtggaagtcctgcagcttggcagcgcccttcctcttgcgcttctgtcccagagcctcctccacacaggggggcacagagtaaggcctacctttcttgaagggcttagactccaaggagtcaaaggggtccaggctctgccaggggtct

SEQ ID NO: 475532 - DNA, 1000 bp, Homo Sapiens; identical to SEQ ID NO: 344120

SEQ ID NO: 475533 - DNA, 1000 bp, Homo Sapiens; identical to SEQ ID NO: 344121

SEQ ID NO: 475534 - DNA, 1000 bp, Homo Sapiens
ttttttttttttttttttgaaacagagtctcactctgttgcccaggctggagtgcagtggcgcagtcttggctcactgcaatctctgcctcccaggttcaagcaattctcctgccttagcctctggagtaactgggattacaggcatgcaccaccacgcctggctaatttttgtatttttagtagagacagggtttcaccatgttggccaggctggtctcgaacccctgacctcaggtgatccactgtccttggcctccaaaaatgctaggattacaggcgtgagccaccatgcctggccatcagaactttcttttctgtagaaagcctcgactccaaaatccaggaagcatgactgtgtcaggatactgtttatatgaacccttctgtcatttgtcctccagagagatattaacactccccatcccaccaggtgggctaaggctgggactgctttaaccctttctctcctagagtcaacactggcatgggcctgagtgctgcttcctgctgggggacctggggatttgggtcttgtggatgagccggacacccccccagccctcttctagcttgatgtccccctgctgcagggcctgctggatagcatcagcgagggtgtcaaaggccaggtccacattgcagttgtttttaaccgaggtctccacgaaggccatgcccagggaggcagctagctcctcggcctcctgggctgagacacagcgggtgctctgcaggtcactcttgtggccaaccagcaggaagatgaccttgtccgggccctgagtggccatgacctcctggtgccagtcttggatgtgttcaaaggacttcctgtttgtcacatcaaagaccagcaggacacccaccacattccggtaaaaggacctggtgatgcacccggcggggcaccgagggcgtcggaccgagtggaaactcctggccaagtttctctctctcgaagcctcaattctctcctctgtaaaagggggctaatgatg

SEQ ID NO: 475535 - DNA, 1000 bp, Homo Sapiens; identical to SEQ ID NO: 344122

SEQ ID NO: 475536 - DNA, 1000 bp, Homo Sapiens; identical to SEQ ID NO: 160820

SEQ ID NO: 475537 - DNA, 1000 bp, Homo Sapiens; identical to SEQ ID NO: 344126

SEQ ID NO: 475538 - DNA, 1000 bp, Homo Sapiens; identical to SEQ ID NO: 344127

SEQ ID NO: 475539 - DNA, 1000 bp, Homo Sapiens; identical to SEQ ID NO: 344128

SEQ ID NO: 475540 - DNA, 1000 bp, Homo Sapiens
gagacggagtctcgctctgtcgtccaggctggaatgcagtggcgcgatcccggcccaccgcaagctccgcctcccgggctcacgccactcccccgcctcagccttccaagcagccgggaccacaggcgcccgccaccaggccggctagttttttgtatttttagtagagacagggttccaccgcgccagccaggatggtctcgatctcctgacctcgcgatctgcctgtctcggcctcccaaagtgctgggactacaggcatgagccaccgcgcccggcctaacttgtgaatctctaatccaaatggtattaagactttctgtgttaaagccagaaagactaggacctttaccaaagcactggctttcgcctctgcagtggcggaagcaatacttacctgtaaggatttcttgaggattattagagaaagaaaggatccagtatagaacttgttacatactgaactttaaaaaaaaatgggggaggggcatttttgtgttattattattttaaaatagagacagggccttgttctgtccacccaggctggaatgcagtagtgggattacagttcattgcagctgcagactcctgcgtttaagcaatcctcccgcctcagccttcctctgcaattccaccaccttgggtggccaaggtagggagatggcttgagtccaggagtttgaggttacagtcagtcaggatcgcgtcactgcactccagcctgggcaacagtgtttgaccccgcccctgattcacactgaacattaaaatggcaactttccaaataaggagacttctgtcgaagagggcttggtggcatgtttccaatattttcccggtatctcttcaggtaccctctcaggtcttccactggaagtatactaacttcctccccaaaaattgtagtttcttgtatcagaaatgttaattcaaagcttctggatggtgtttttgaaattccttaattaatttcttttttcgtttcagagagatgctg

SEQ ID NO: 475541 - DNA, 760 bp, Homo Sapiens; identical to SEQ ID NO: 160821

SEQ ID NO: 475542 - DNA, 1000 bp, Homo Sapiens
ttttttttttttttttttttttttttttttttttttttttttttttttttttttttttttttttttttttttttttttttttttttttttttttttttttttttttttttttaacatgattgccttttatttattatgcaggttgttgatttacatagggagttggagatgctaaccaagcatggagttttcacatggtctatttctgctgagttcagggacttggagacagcctttaacttctggcaaaaagacaatttcacaaaggtgtttaaaaccatcctttggtttttgatcctgagtcagagacggacatgtgcttatgaaagaaggtagagtttcaacccttaggtaaccttaaaagagcaggaactatgttgtgtgtaagtcatgtgcagtatacaaacttgatattaaatgacaaattggaacaatctttctctaggaatgcctctctttcatagaggcatcacagtgagtctcttaaagccttgatctaggtgtgttacagatgggcttacagagtatgaatgcacgataagaaggaaattggatagggagtgaggatatgaaatttaaaagaaggaagaagagaaaacgagattttaagacaggaaatgaagctctgtgtgtgtgtgtgtgtgtgtgcgcgtgtgtgtgtgcacgcgtgcgtgcgtgtgtgcacgtgcgtgtgtgtgtggttggcaggcctagtgatcctgttgtttagtgtctctgagatttgagttgtgcctttttactttgcataaagtagatacttggccatatgtagttccaaggagaagtcagagttccacctttggagtctttccttctgattcacgattttctttcaacaattttccacttaggaatccatcacaaaagttttgcacatgctctacggaaacttctgctgtgggcagtgtatcccactcgtcatctagagtctggtaaattgccaaagctggcagttgagactcctttagtttgaaaaatg

SEQ ID NO: 475543 - DNA, 1000 bp, Homo Sapiens
tttttttttttttttttttttttttttttttttttttttttttttttttttttttttttttttttttttttttttttttttttttttttttttttttttttttttttttttttttttgaagctatttgcatcttatttttccttgataattgagaaaatgactaggaatgtcctcgtgcttccattgattttcagattttcttcatttgtactattttcccttttcatttcttctttttgttagtgtcacagtgagtacgaataaagcgatcaataatttgtctatctttgtaggaaagactctgaaggtactctttgacttgagaggaagtaaatgagtttaaaagcattaagaaatctgggtaggttttgtcgtagtcactttggtatgtggtctgtttctttgtgtgctcttggttcctcaggtagctgtgcagcacagaaggcactagaccctgagaagcaacaggcaagcttgagtagcatccatatttgaaactgaaatcttgaagctcaggaattttagctggaatttggtaattccttcggaattcagtgtctggaggttggggaagtaactttttccattccagagacaagtgagaacttttcttaatcttctgagcttttgatctgtccacaaagtctctcttagtaagggaaataaactgatttgatagtgccttgttaacttctttcattgaagccgggattttccaagggaggcagttctttagtgtccccgtttgttgacagtgaggtagtgtccacaggaaaatgtcttcattgagatgagatttgtggctcttgattcctcttgaagtctcagttttgatcaaatcttctttagagtgtgatttccaagtgtactcatcactatattgtgtctgattgagaataggatcactaagtgaatatgtatatcctaatcttctgataccgttttggcgaattaaggcaggcactgctcctgttttaggcgtgaatgcagtcctcatag

SEQ ID NO: 475544 - DNA, 1000 bp, Homo Sapiens; identical to SEQ ID NO: 344132

SEQ ID NO: 475545 - DNA, 1000 bp, Homo Sapiens; identical to SEQ ID NO: 160823

SEQ ID NO: 475546 - DNA, 1000 bp, Homo Sapiens; identical to SEQ ID NO: 344134

SEQ ID NO: 475547 - DNA, 1000 bp, Homo Sapiens; identical to SEQ ID NO: 344136

SEQ ID NO: 475548 - DNA, 1000 bp, Homo Sapiens; identical to SEQ ID NO: 344138

SEQ ID NO: 475549 - DNA, 1000 bp, Homo Sapiens; identical to SEQ ID NO: 344139

SEQ ID NO: 475550 - DNA, 1000 bp, Homo Sapiens
tttttttgaattctctattgacataatgccattttaattcagttctgagcacgtagagcattcctctctttaaaatctgaaatccatttcagtacataaatccatggaatgtcatcccatcaaaaaagtaacaactctaggtgagcggcttagtggtggtagaagcccacagctgaaacgctggaaacactgatgcaattcatttgggaatttatttttttctaaagcggaacaaaacctaattatgaataagaaacatttaaatggcaactcttaacctatagtgcaaacaccagattccacaaaactgaattcctttgtcagtaatccaatatttagcagtagctgctgcttttgtggttgttggttagttaaaattaagtaatgattccagtttagaagataaagtttcagtgtgaattttagtagaagtcataaaaatacctgagacatattagaaaataagattttccctcctatttaaaaaaaactctgcagacttttatttgaagcccatcttttgaaaatcactaacatttcataatcatttcctagtgttttgtttcactttctcgatgaataatatttccccatttaagtttctcaaggcattgattgctggaaaatttcccacgtgccctctaaacgtcccccgtggacatgagtaaattaaacttcgtgcatgtcagctacacgttcatcgtctcctttctcagctgaggccatgagtggacccatcagtggctccaaagtcgtagaagtactaacatgttaagaaaaatacatttttaagggtcaaaacaaagttacacagaagcaaatatcagggaaggacttcaaaaggcctcctcagcattgagtgtccgtgtcttcctgagattcttcagtttatcaatggcagaagttactaaaatctctccatgaattttgttgtctcttgttcgcacgtttacagcattatctatcttttccttttctccaaccaccaaaataaaattat

SEQ ID NO: 475551 - DNA, 1000 bp, Homo Sapiens; identical to SEQ ID NO: 344140

SEQ ID NO: 475552 - DNA, 1000 bp, Homo Sapiens
cagttttcttcagttgtactacaaaaaaaaatggaggaaaagaagagtaaagacagactgacggggaggagagaaagagagagtggggggtgggtgggaaatgagagagaagaaagagaaaggatggctgcatctcaaacggtgcttattcccaggggttctaccgcgaccgctcagaggatcctgtgggtagagacaggaatgataactctgctcactgtgagagacggcaagacaggtcttgggaaaactttggtctccagcatttggggcctgttttcctgcttggcctttgggagaacatgctttcgggtgatcacaggagatcttggctccttggctttgaatttggatttgtagctttgcactccccgtttctgcagaagctgcaaggcagcaaggtagcgaacgttgctggggtctggagggcacgccaggtttttctcagacaggagggaccaatgcaggcagcgctgctccggatcggtcagcagggatatctgggccgctggggaaggggaggatggcgtgtcgttgaccatagggtgtttggccagctcactggctcttttttcacctttcccatctgctgttttcaagccatatgcataagccacacacccatccttttccacatccagcaccttctcttctgactgcaagaaagagttcttactcttcttacccagaacatccaaagcatttgaaagtaaagccttcaggggaggcagaactaggagggccctggaagtcagggggcctgggatggatagccctctgtgggcccctccactgggattcccagaggccttgcccctattagtgccggggatggcccagtctttgttgcaccaaataaactccttgatttgcagactttttttctctgctcgaaagtaggtgggaaagcagatgtcgctaattgccctggaagcagtgctggggccctggggggctgcctgagtctgggaggggctgctctgatccttctctgggcccc

SEQ ID NO: 475553 - DNA, 1000 bp, Homo Sapiens; identical to SEQ ID NO: 344142

SEQ ID NO: 475554 - DNA, 1000 bp, Homo Sapiens
gaggtagttcagtatcttggaatttattcctgcgttgacttcttttgtgcagagatggcttccccaaaacaccttcaaatctagaataaaagtgttgatgggagcaaggcatagcgaggttccttacccgcgcagcagccgtgccacgccctcctcctagagggaggcaggttttcccatcgttcctgtggggtgggtagggtggcccccgtatctgcagggggaggtggtgggagatggagcagggcagtggtgtgggcttgggagattgaggaggacctcctggcagagagggacttctgcctcctctccttgtacaggagcctgtggatgtatcttggtgagggcagctgactcagagtaagcttcccacctgggctgtctctggcctgtgccctctatgcaagaaccttggggagctcggggtgtccttggaggttcagacttggagtagggtttggaaacctgtgttctgacctgtgcaggcctttctggcatgcagccaggtgtggaggcagcactcaccaaacaggaaggagaggaaggccacaggtgtgggcagggctgggtggacagggtggacgctgtgggcttcaggtgtgggcggggctggctggagagggtggatgccgtgggcttcagtcactacagtggctcctctgtcctcatctgtgcatggccatcgtccagaccctcagactagctgccgttgcgcttcccactgtgctgtggactccagacgctctcctgagggccacagctgccttgagcttgccgccattctagcttaggctggatcacccacccccggcacagagaggagctgccttcaagacggattttcctgcatgatggaaagtggaatttgcacaataaaagagagagtccccattctcccatcaccaagagcagctcttcccatcttcacgtggtttattttggtcttttccagattggcattcatttaggattggctatgatgcatggggctggggagaat

SEQ ID NO: 475555 - DNA, 1000 bp, Homo Sapiens; identical to SEQ ID NO: 344143

SEQ ID NO: 475556 - DNA, 1000 bp, Homo Sapiens
aaaaatatatatttaacaaaacatttctaaatgtacaatatctgggtttgcaaatcactcaattgggttttaagaccaagccctaatagtcacacagatttgcgtcggaaaggagactgaggccaggtgtgcacaatcattttgctcattggtctggaaattccctaagattggtcgtcctctgacacccgatctaaatacaaccagagagagccatgatggccaagtctccaagtcagaggcactgtgtagacacagcctgagtcagaagaatgtgaaagtggtcttccccttcctggaccgtcatggtgcatttcagcaagtggggaaaggacagcggtgcttggcggagccctgggaagatacagccttggacagctctctggccaggaagggcagggaggtgggggaggccaagtatgctgcgttttccatccattacacaaaatcaaaccaaggaggagcaaccaaaggacacgaggaaatggacacaaccctacgtataaagagacaccttgacaaactccttggccggggcagacactgtgctctggtttccgaaacacagggcagagctggaagttgggggcccgtgagctggggcccctcagacttcataaattttgtcctgcaggtagctgaaaagggagtcaaggcctttggaggagctccagagctgcttgagcatgaggcattccttctcgttcacgtcttccagcactgatttcaggaagctccgcacgaggcatttggactcctctaacaccacggcactgcaggatgccatctccttgacccgcagcatgacctcctggctgaacgtggtgggccagaagacctgcgacaccagccccctgctgcaggcctcctgggcggtgagcttccgcccacagaacagcatctcattggccagcgcgacgcccaggatctgggggaaggtgtaggaggagcagccagcaggcgtgaggcggatggtggcgtagggcgtctggaaccaggc

SEQ ID NO: 475557 - DNA, 1000 bp, Homo Sapiens; identical to SEQ ID NO: 160824

SEQ ID NO: 475558 - DNA, 1000 bp, Homo Sapiens; identical to SEQ ID NO: 344145

SEQ ID NO: 475559 - DNA, 1000 bp, Homo Sapiens
gctcttccaaaggatttattggtcctatttacatctattgcaaattgtgagaaggcagcaggggccaacccttggacctcatctctgtctagaatgtgaggtcgcagggatgcttaagtcttcctctggcagagacccgaggtgcagagatgattcttctcaacccttctctcagggtcgtggagccccagcaggggttcagggcccagaggctgccccctcagctgaaggcacaaacactgtggtaggggtgggcagacaacgcatggactcactcctggcaggcgccactggccaagtgcaccttttccccctgctcctagcctccttcttccttcccgtcccggtcccacactggccagggcctggatgggtggccacttaaaccccagacccaagcccttaactcctggaccacggccagccttccttaggctggaatccaagcaccatcagtgccctggaccaggccagcttccctgtcctagagggatgggacagagagtgcccagcgggggctgaggggctagagaccggctgggcagggccagtctcccttccccttcccgagcttccctgtcctcatgtggacccagagggcagagctggggagaagtgaaggtagcaacgcttcctcctgctcttaacttcctgcttgctaggagccctgtgtccccaagccatgaatgggacccctctggcaggcttggtggctctggtgattcaggggccaggactcccccactccatttgcaggccctagttggcaggccatgtgggcacccagggcgtgggacccagggcctccctggagggagctgctgctcagggaacagggtgagcggacacgcgcccgcagatgtcttcccacccttgcccggccagctcctgcctcagtctatgccaggaggcggataaccccgttgtctgagcccagcaggaggtggcgtttagtgggcagcaaggccaggctggtgagcgtgccgcggaagttctcaga

SEQ ID NO: 475560 - DNA, 1000 bp, Homo Sapiens; identical to SEQ ID NO: 344147

SEQ ID NO: 475561 - DNA, 1000 bp, Homo Sapiens; identical to SEQ ID NO: 344148

SEQ ID NO: 475562 - DNA, 1000 bp, Homo Sapiens; identical to SEQ ID NO: 344149

SEQ ID NO: 475563 - DNA, 990 bp, Homo Sapiens
ttttttttttttttttgctaaaaaaagccgttcctttattctgccccaggcaggctgcagtcacagacacacggggaatccactgatggcgtcggtgctctgcatgatcatgtctgccagcagaaagcagaagcccgcgagaattgagaagggtaaggccagccacccagaaaaataggaccaagagaagaagacgttgttcttccacgcattcttcacggtgtagcctatcaaggcggtcagcagcagcagtccgccgaggaagaggaaggcgctcgtggtctggccccgcagcgactcgccctcgtcgcaccgaatccgcagtcccatcaccatgcccaccacgccgacacccaccgccagcaccatgcacgccacagtcaccgccagcgtggtctggcaggggatgctggagcagatgccgtggttgcattcctgccacaggccactgtggccctcttgttggcgggtccagtagttggtggccgtggagagcaccatgaggacgttggccacgaggctgagcagaatgcccccactctggaggctccgcttcacccccatgccactgaggctgcagccgggggccacaagggcaggatgggcccaggcctttcctaccccgaggcccccagctgaggaccccgcttcctccacactcctcccctggtactcctgcctgaggtccctgcttctggggacctggagacccccctccctcaacaaccctgcccgaggatccacaacctcctccctccagacctcgttccccttactggagaccttgagacttcccctgagaggcctctgagaccttcaccacaggctttgctgtgaggaacctgtcttcccagagacctcccccgacagccgaacgccctttcagcccagcctgttcaatgtcctccccagacacccctccacacaggcccacctaagtgactcacacccagtgccctagggctccttagacacagagcccagagagac

SEQ ID NO: 475564 - DNA, 1000 bp, Homo Sapiens
tggtgagacacaatgaacttttatttcttactctaaaaagaaatccaacacagatgaagtagtgaccttctatcaacccagtctggaataagcagcctccaaggtcaccttggcagggatagagaagcctgaggatgtttgtaaaggctagacctgaaagtggcttatatcacttttgctcacactccattggctagaactcaatcacatgggcacactcttaactgcaagggttactgggaaatagacttcttatttgcaaggaaatggaaccagtgtgataaacacagcactgcctctgccacacccttcaaatgccacttctatggagcttcttgcctgtgtagagaatctcatggaaaacctgggtactaacgttctttcatagtaagagcatgggtttcatttttgagcacacttttgaatgttcttcatacagagagtatttttctactggggactaaaaaaaaatctaaagacgttggctgaactgaagaccttaccatgatcatcccaattagaatttccttcctggacacaccctttaatggaaatttgaccactaactacaaccactaccacaaaccacccatttgtcaaaagtaacctctttgccattgtagcatacagcagttgatgggagcttcacagaagttcttgaaatccacagtccttgcctggcacacttcagtgctgcaggctgacattatcgatggcagtgtccctgtcttttgctcccctagccctcccacaggctgagtaagcctctatcatctggaatacagtgtggcttctgttttactaattgaaccctgacttactacatttataatgtttctctctgctcatgtagtctttgatgagtcagaaggtcctttccacgctcacagtgtgtgtactgtgtctcatctatatgcactctctgatgggcaaggaggtatgaattacgactgaagcccttaccacatgccttacacttatagggcctctctcttgtgtg

SEQ ID NO: 475565 - DNA, 1000 bp, Homo Sapiens; identical to SEQ ID NO: 344151

SEQ ID NO: 475566 - DNA, 1000 bp, Homo Sapiens
agtagagactgggcctcactgtgttggccaggatggtctccatttcctgacctagtgatccgcccgcctcggcctcccaaagtgctgggatcacaggcgtgagccaccgcactcggccctaaggccaagtctttttttgtgttttttaagacagagtttcactcttgttgcccaggctggagtacaatggtgcaacctcggctcactgcaacctctgcctcctatattcaagcaattctcctatgtcagcctcctgaatagctaggaccacaggagcatgccaccacgccctgctaacttttgtatttttagtagagacggggtttgaccacattggtcagaatggtctccaactcctgacctcggcctcccaaagtgctgggactacaggcgtgagccaccatgcccagccaaggccaagtcttttattgttggagagacacgtgtcacataccaggcatatgagacgatgctcctcagtgaccatgatgaatcaggacaaaaacaagggcattttgtaactatatttttaaatgtgatagaggaaaacgtatttcaaatcataaacatgaccaaaatttttctcttcttactaatgtgacttgtaattctcatacatctcacagtcatttatggcttttggtcatatttatcactatggtatattacacccttgctgacagcaggtatggcactgctggttttggggaagaaggcactcagaggtgcatgagataactattggtattatgactgaatgaaaaattagggttgcagctgggcatgatggtccatgtctgcaatcccagcattttgggaggccgaggtgggtaaatcatgaggtctggagtttgagaccagcctagccaacacggtgaaaccccgtctctactaaaaaacacaaaaaatcagcctggcatggtggcgcatgcctgcagtcccagctactcaggagactgaggcaggagaattgcttgaaccctggaggtagaggttgcag

SEQ ID NO: 475567 - DNA, 1000 bp, Homo Sapiens
tttttttttttttttttttttttttttttcccagctcacacatctttattggcctggatgtggggttgccaaaccagttgcccctgtcctgtgtcagccagctgtggcaatttcacccttattccttggagaggccagctgcctgctggaaggagtcagaagtcggtggatgtcattgaggccttggaggccccagtctggcgggagagaaatccacacctgtgcctggagttctccttccctgaccctctgaaccggcgcttaaaatgctgtcccgcctggaacagggaggccacatccagcagtgcgtcctcaatgtgctgccccagcctgtgggaatccgtttttgtgcttgattttttgctggagatgtggaaggtgatcatgccatcccccatgaagatataagaaacaccataaccatggtcatcagcaggcccgaatccaccgcctgaggaaacatagtccgggtaattgtggacgtcaaacagatgcatttgctgaacagggatctggctggtggacagctgccactgctccgaatggacctgggtcaggaagggcgactgcaggtggaggaatcgggacacgatgtacagcgcaaacaggtggcggtcaactccctgcccgctcatggctgccttcagcagagcctggtgcttgtccactgccacgcggaacagggcgaggcactgtgggtccgtcttctctttgtcctccatggccctgacaaagttgcaggcctccctcgtgcaagaccgcaccgtctccgtccggccttccaggaataagcgagtcatggccgactcataagtcaggcagaattgacccctgtcccggaagtgggccagttgcaaggcgatctggatgaagctgtctgaagagaggtggcagcgtcggatgaagctcttgccaaatagggagaatggaacgacatggcagtcgacattttcagacaagatcttggctcccctcagggctagagagatggaggagtgga

SEQ ID NO: 475568 - DNA, 1000 bp, Homo Sapiens
tttttttttttttttcttaatttaccattgaatagtcagatattccattaaaacaggactgacattgaatgctttctaatgtggcaagatctgcattttgaactctctcaattgctaaagccatacctataagactaacattccatcatttctcaccagtgtgggctgtctgatgatgaatggcgcgctcatactctttacggtcttacacttttatgctcctatgaattctctgatgggctttaagggctgaaccatatctgaaggttttcccacactgcttacacacatagggtttctcaccagtatgaattctctcatgttgaacaaggtttgaagcacgactgaaggccttcccacattctttacattcataaggttttccaccagtatgaattttctgatgttgggtaaggtagccatacattttaaaggcctttccacattctttacattcatagggttttttatcagcatgaatgctctgatgtgcagtaaggtgtgaactacgtctaaaggtcttcccacattccttacattcaaaaggtttctcatcagtatgaatactttgatgtagagtaagatttctatagaaagtaaaggtttttctacataccttacattcatagggtttcacaccagtatgaattttctgatgttgattaagatatccatgcaagctaaaggtcttgccacattccttacatttatagggtttctcaccagtatgagttttccgatgttgaataaggtttgagccagtactataggccttcccacattcctgacattcaaaaagtttcttaccagtgtgaatattctgatgtcgagtaagatttctatacaaagtaaaggtttttttacactccttacattcaaagtgtttcatgccagtatgaattttctgatgttgtttaaggtagccatacaagctaaaggcctttccgcattccttgcattcatagggtttctcgccagtatgagttttctgatgttgaaa

SEQ ID NO: 475569 - DNA, 1000 bp, Homo Sapiens; identical to SEQ ID NO: 160825

SEQ ID NO: 475570 - DNA, 1000 bp, Homo Sapiens; identical to SEQ ID NO: 160826

SEQ ID NO: 475571 - DNA, 1000 bp, Homo Sapiens; identical to SEQ ID NO: 344155

SEQ ID NO: 475572 - DNA, 1000 bp, Homo Sapiens; identical to SEQ ID NO: 344156

SEQ ID NO: 475573 - DNA, 1000 bp, Homo Sapiens; identical to SEQ ID NO: 344157

SEQ ID NO: 475574 - DNA, 1000 bp, Homo Sapiens; identical to SEQ ID NO: 344158

SEQ ID NO: 475575 - DNA, 1000 bp, Homo Sapiens; identical to SEQ ID NO: 160827

SEQ ID NO: 475576 - DNA, 1000 bp, Homo Sapiens
gtaattttctgccccagtttattcatcttgggttggtccagaagccgggtttatacactcaatatgcaagagctacagacaaaaagtcttcagggcccacccctcacccccactctctggatctttcacccatccacctgtcagggatgaaactctttagagataggaagagccccccactttgccgatagggagactgagggccagaggctgcatcagtgacttccatgccactgttcacccaccagtgtcccctcttcataccactgctcacccaccaggatcttgcattctcttggctcccaagaacaaagcagagagctaagctaccttagtcgttggttctctccaagactcacccactctgtaactcgcggagcctgccaatccctgtttgaagggccatgcagtgaaagaaggggttaaaattcagcatcctaagcatctccagaggcttaggctgacactgtccccttcacatcccagaaagccaacctctggctcctcctgacagtccgacttcagagaaatgaaccaaaccaattcaacatccaatgctgctaaagccagagaggcacagcaaggtagaggcagagacagggaagcgatattttcctcatcggccttggaacatcttgtctgttacttgcaagcttataaacatacattgcttttcatcagaagcttaaatgaacacggtttgcaacagctccttttccaatggagagatggtttgtttgggaactggtattttagaattcccattctcctattcttcacagggttccactgttatcatctttcctgtccccatctcccatgtgcccaaaggcagagttcaagagggacagtcccctatgtcctctgtccccatccccaccatcatcttcatcactactcctggttccctttcctgataccagttctccacacactgccaaaattgcagccaaaattccatggcaggccagagcagccactaaacctcctacaagtaaag

SEQ ID NO: 475577 - DNA, 1000 bp, Homo Sapiens
ttttttttttttttttggtttgagtctagctttattcacatatcctaaaatatcctaaaatatttctatgcttatgccttccactttttcccaaccccaaaattctaagctcaccagcagcagcaaaccctaagcacagaagattctaactccttcaagcttgctccatttcactcaagttttctaaagctttcctgtttggagaaattaccaagtcccaggtgggtgggattttattcttaccacagagtaggtgtgattttatgggaggctcttcccccagcctcctagatcagacatagagttatgtgctcaagtcctggtgggaagtgaaattcctgtacttttaggtgctgggctcaaattctgtctgctgtggtcattaacgggaagaggtggccagttgtgtgggcctgcctgaggcaccactggccccagctgacctttccaatcaaaggaatggctgaccaaaccaggatggtattaagaaattctataaaacattcagaaataacctattctagaatgatctgggcagtgtgggatgcagttaggaccagaccagccttcttctgagcaaatggcagtggtgcccatctccactaagcctcaacgtgcgagaaaaaacactcccaaccatgcagcttatctgagcacaggatgcgcttgttgctggggtagccacatgtatatgcttctggaactcctgattcctgccttctctctgtatacccaggaggcgggagcacacaccagaactcaggactttgtgatgaccatgctttgggggaacaacatgcacagaatgtctgagtgttccctactctgaaggatgatttggccataaaagggatcagatgagtcatggagtctggctgaacttgcaatagaagagaacattggcaaactgtccacatcagcacttcgaagttggaaacacaagaccccatggtcttcaaagcagctcaggctaagacaggctgatgtacttcatgccggt

SEQ ID NO: 475578 - DNA, 1000 bp, Homo Sapiens; identical to SEQ ID NO: 160828

SEQ ID NO: 475579 - DNA, 1000 bp, Homo Sapiens; identical to SEQ ID NO: 344162

SEQ ID NO: 475580 - DNA, 1000 bp, Homo Sapiens; identical to SEQ ID NO: 344163

SEQ ID NO: 475581 - DNA, 1000 bp, Homo Sapiens; identical to SEQ ID NO: 160829

SEQ ID NO: 475582 - DNA, 1000 bp, Homo Sapiens
tttttttttttttttttttcatcataacaaaagtgtgatttatttctgagatcttcttactctagatttatttataagttagttacgttaaaatcagtttttcccaaccagcatacataaggtgttgtacaagctccctcagctggttaagatatagaactaccaaaacacatgttccattaggttgactgcgtcatcctcttcagaaatttctgtaactgcagcctgagatcgaagaatagacgtgatgtcattagataatttgtcaaagccattctgtgaacatatatttgccacttcttgccacttttctatggagcaaaaggaatcatttatcataagactttctactgcatctatcccacctttattgatttcttgaagtagcttaatgccaacttttttcatgtctacagagaacagatgaagtatagcaagaccaaaagataaagatggttgtttctcattcaactctttagtgagacactgaattaattcaacttggggacatgacattaatagctgcaacaggtcatcggtagtaaagtccttcaactgctgtatgtactccatgaccctatgagtctgaccctgtttacacaagcaaagaatagctttcttgtgcaggccacattcactgtagataatctgagctaaagccaggcacttggccttgttataagtatcctgctccccataatcacaaatcacatccccagcctcctcagaaaatgtcagtctttcctgtgtaacccaattggtaactaaatctaaccgtttttctgataatccacatttgattccttccagggttagagctgcatcaacaggacatggaaaagcatgacttgtgataaagagggcctcaaaaaataagagtaatggaagaggctttcctctaatttttccaacagccttaaatgtattcattgtaccaatgtttcgaagaattcttctaggactgtttgctgcataacaagctgccttttcatattcacca

SEQ ID NO: 475583 - DNA, 1000 bp, Homo Sapiens; identical to SEQ ID NO: 344164

SEQ ID NO: 475584 - DNA, 1000 bp, Homo Sapiens; identical to SEQ ID NO: 344165

SEQ ID NO: 475585 - DNA, 1000 bp, Homo Sapiens
caaacaaaacatacattccctttttattggtcataatgtagagcatctttcaagctaaattatattataattattacatgatactcaatcactaagccagtttcagaaaagacaaacttcatatttcaatttattcagtaaggggaggtcaaaaatgaaggcttttttcccttctaccatattcgctaaatttatgtttaaacctgatatatattttataacactatttaagttatggctttttctaaaccagtgctttttaaggtaatagttataaatacaactgttttgagaaaataggaaataaacactttcacttgctggtttctagttcattattccctttgtcattaagatgataatgctagacaaattaatgtttagacataaacagcaaacacaattttaacatttttcataatattgagagatgtttcagtattatataatcaaaaaatctattacaaatacacatgtatacatcttataaaaatacatttaaaaacaaaaatgggacaaatactgggtcattattcctccaaaggtgagctggtattatgaagaggctttgatttctttctctttatcaggatattcttccacctctgaggagaacattaactcttcactaagatccatgcctggcctataagacaaaaatagccaagataatccaaccagaagagccaccacgagattcaccacaatccatggctggagaatctgttcctcaattcctgcttcccagaggctaccattaacagaagaaggtgtgtaaaggtggattctgtcacttgtcatttgctgactcagagatagtataagagcagtaaagtacaagaaagatgctaaagctgtaggatccagggccaaaaaatttcggattgctactgatattttagcaaagtcaatcctgtcaaaagctgaaattgtactcagagccaaaagcaagtacagaagactctggaatggatacgctagggtcttgtattgttgcaga

SEQ ID NO: 475586 - DNA, 1000 bp, Homo Sapiens; identical to SEQ ID NO: 344166

SEQ ID NO: 475587 - DNA, 1000 bp, Homo Sapiens; identical to SEQ ID NO: 344167

SEQ ID NO: 475588 - DNA, 1000 bp, Homo Sapiens
ttttttttttttttttttttttttttttaagactcagcagaattcaaaatatgaaaatttattttgcataggaaacaataatctctggtaaacatcattactgcatctaacaaaacaatgccttcaattaaagggggaaagtgagtttttaaacattagggttaatttagaagaaaatacagtatataataatctcaacatcatgtttagggtaaaaatgctataatgtgaaaaaagtccctaagaactggacagaacctacctaacaacaccatttaccgtgtatgttttcaatagacaaaacatattttgtaccaaattccaacagtggtaattctatagttgtggccctttaaaaaatggcagcattgtacttgaatcagaaagcttactgggatttcctcatcgaaagtagagattgcagctaatcctagtaccttttgttagtaattacttaaggcacagtgcaaagttgaaggactgttttggtacaaactcaagccagctacatgtatgcttgccttggtatccttgctagagcacatgcaggtataataccgtattatacacaacaaggccaccctgttgtatctgtgttacaattaaacatcagtcccagaaagtgaaccctagtcatttattataggtgcccacctctgacttggaacaaaatgccactccattcatgttcatttttgtcctggagaggatttatttcctaaaagattctgaaagccaacaaatcaatgtagttcttcatagagaacttaagagtaaggctcaaaatggcctcaaaatgggcttcttggatgacttccaacagtgactggcctcaacactgcagatgtctgagcactaccataacctaacgaagtgaggaaggaggaggcaaattggtatttttaaacaagaatttaagtggctctttctttcaagtctaaaaaaacctttggctttaaagattataaactgatttactaaatttataaaagaccttaat

SEQ ID NO: 475589 - DNA, 1000 bp, Homo Sapiens; identical to SEQ ID NO: 344168

SEQ ID NO: 475590 - DNA, 1000 bp, Homo Sapiens
ttttttttttttttttagttaaatttcttcatttattatatttcttattgtcttcattatatcttgctttataccagaactgtgacaaagggcaattagttttagagaaagtgaagaaaggtaggaaggttgctttaatttttcccaaacctggcttgagggaaaattcacacatccttcaagtttatgaaacaggcgacggatctttattaaactggccagcagaagaaggtcatctccacttacgtatcggaggattggaatctcctcagggtttggtagcttcactttggttccaacactgattcttgcctgttggcccattgctagaaaagttatagaaatcttgtcttgttctaagatgcggactccaatataacggttcaaagccagaaagacaggtttaaatgaaacaaagggtgaggaagtgatggaatttgaccaattccaagcccttattctgttgccggcttgatctgaatattgacctcccaagatattgatgtatacccagacatttccattgggatgatagcaggaacttctgccagaggaatccagcactgctaggatagcagggttagtgggcatatcttcttggactatacaagtaaaaccatttaccttgttgggcactcgaatgatggctaggtttccagatggatagaatatttgtgttgtcccatctggaaatgaagtcagaaacttgctcccatgtttgtagtgcttctctaagagctcattcctgacaacctttccacatgctatccgagaatcacaacaaatgatagacatgttactgtttcttagttgaaaatcaaatacaatgtcatcaattatctgtttttctggaatatccacagaaagttgataagaaattgtttttaagcgctttgaatcatcttcagagaaatgagtctgttcccttgatattattgcaaaatgtctggccattcgttgctcctgtttcctttgcagggctttttcttttgccttgagt

SEQ ID NO: 475591 - DNA, 710 bp, Homo Sapiens
ttttttttttttttttggaaaagaccacttcattcctttattgagaagggaatacactctgtcacaatgcaaggccctgagtccagcaagatctccagctggagatgcagctggttggctgtgactctgtactggcccttgatgaacccccgggaagcacaggagcggcacctccagtaagcctggatgatgcgaacagcattgagcacctggcaatagcgtctgcggatgcgccacatgcgggcctgggactgcagtgtgactgctgcccactccttccgggagaaggcctctagcgctgcctgccgcctcttcttcagaatcttggacagtatcagccgccaccagcactgaatgatgcaggcactgagggctgcgtgcaacagtgcccgacgcaccagggtgccccgccaccaggccttgatcttggtggctaccgtatctttgtcagagagcttcttttggttttctgggggtttttctgatttctcattggcattgtccactgtctgtgtctcaaccagaactggagttttagcctctgcctttgactctgctcctaaggacaaatgggttggcatctccttctgctgaggctcatcttcttttgagggttccttcgtcttttggggctgcttctcctccattggtcacatatggattgattgtagatggttcaaatcccctcacatctgtgttcatccaaccat

SEQ ID NO: 475592 - DNA, 1000 bp, Homo Sapiens; identical to SEQ ID NO: 344170

SEQ ID NO: 475593 - DNA, 1000 bp, Homo Sapiens; identical to SEQ ID NO: 344171

SEQ ID NO: 475594 - DNA, 873 bp, Homo Sapiens
tttttttttttttatactaaaagctatttattgaatatttctctctatttggtatcattatcactgttggagctatcactgtcatcatgaatagaagtgtttctaattgaagataccatcatatctaccatgtcttttctggggttttcttccaaatcagtctgtattgctccaacttctgctagcttccattcaagttcttccagcttgagatttatccctccacattctataattccaatgaatttggcttctatctgaccatttttatacacaaaaattgttggtaaacaattgtcatggtagtgttgaatacagctattcacgatggctttaacaaatttagtttctggaaactttcttgctagaagactaagatgctggttaaccaacaaacacattgggatgcttgatctgtatagatgaattataacccacacatcttcttctgcatttgtgacttcattcacatactgatttccagaaatttctcttaattctccaaatttttgttttttcttaagagctttccattcctgtaaccgcttctttctatatgtttcaacagcctgcatatcttcttcatcaaattcatcttcagcttcctttagctgtgcaagagtcatcttttcaaatggtttcaccattgcttctttctgtaaacgtaaaaccatttcttcaatttcatcttttgactcttctttaggaggaagaatgccgaaatctcttaaaatgtcattccattctgtatcttcattgggatcctgcatgatgcgctgctctgcccctcaagagcccgcgtcgtcctgcagctggcgaggcgccacggatggagacccgcagccttctccaggctggaagagcgcccgcttc

SEQ ID NO: 475595 - DNA, 1000 bp, Homo Sapiens; identical to SEQ ID NO: 344175

SEQ ID NO: 475596 - DNA, 1000 bp, Homo Sapiens; identical to SEQ ID NO: 160831

SEQ ID NO: 475597 - DNA, 1000 bp, Homo Sapiens; identical to SEQ ID NO: 344177

SEQ ID NO: 475598 - DNA, 1000 bp, Homo Sapiens; identical to SEQ ID NO: 344178

SEQ ID NO: 475599 - DNA, 1000 bp, Homo Sapiens; identical to SEQ ID NO: 344179

SEQ ID NO: 475600 - DNA, 1000 bp, Homo Sapiens
ttttttttttttttttcttttgaatttttagtagagacagggtttcaccgtgtttgccaggatggtctcgatctcccgacctcgtgatccacccacctcagcctcccaaagtgctgggattacaggcgtgagccaccacccctggcccaaatttttttttttttttttgagacagtgtcatactatgtcatccatactggagtgcagtggcaccatcattgctcactgcagccttgacctccctgggctcaggcgatcctcccacctcagcctcaggagtagctgggactactggtgtgtaccaccatgcctggctaatttttgtatttttagtagagacagggttttgccatgttgcccaagctggtctcaaactccttggctcgtgatcctcctgccacggcctcccaagtgctgggattacaggcatgaaccaccgtgcctggcctaaatttacttttataacaattactttttaaaatgtcagaacttccttataattacacacatatatttttatacaaatgcacaaaggtaatcacatcttatctggatttctgtgtgcaccttttcttaaaaatgttaacaatcacatataacctcgtagaaattgttttcgtttgcagatgcctcctttttcataaaattatgtccttgttttataatgctgtcttttccaatatagctgggatcacgccactgcactccagcctgggtgacagagcaaaactccatcttggaaaaaaaaaaaaaaaagaaagaaatataattggtgatgcttctgaagagaaaatcctttgtggttcttcatattcctaacttgcatgacactcttgctcaaagaaggatacctgctcctaaaacccgtctaccagcgggtctggctactgttgctgtggattcctgggcaataccaatcctgctcaacgctttggatgtcccactctgcctcaactccaatcggcctctatcattgcaaacagttggctgagccttttct

SEQ ID NO: 475601 - DNA, 1000 bp, Homo Sapiens
tttttttttttttttttgcaaagactaaagttttattccaatcagtgtttttttttcctttggaagacacatctctgagctctctgtgaggaggacagcctcattgatgccctcagtgatgtaatttatgttgttggcattgatacagctgaagttaatctgaccgttcttggggatatagatgtgcttcttcctgaccaggtattccacctgctgggagttgagtccaagatagccgtgggtcccactctgctcggtgatgtgaccccaggacccaggggttcccaggagctggagtttctccttcactttttccttggttagcatgatgttctctacaacttcttttagactctgcttccattctcccagcagagcagggttgcagaggatggaggtgatgacacgtgcacccgtgttgggggggtttagccacagggcctgggctaatccttccagctgggagaggacacacagcagctgctggttgttgactgccaccaccactagcatccccactccttcatcataaatgccaaaattcttggacagagactggctgcagaagaactcaaagccttgagacacaaagtattgtaagattctagtatcttcttccaagccactggtgtataaaccttgacagggaatatcaaaaaatgggaatatctgcttgctctttatcatggacatcaactttgcccacccacttggtgtcaacttgcagtcgataatgttccccatcacaaggacacagccatgtgggatctgctccaccacattgaggagtatgtcggggtccatgcatagcttcttggggtcccagacagagtattcataaactgtaaagcccatgtcctggaagacgagtccatgcagttctttttgagaagagatgatgtaaactatacgagcatccttatgccaagctctgagaaactggacgccaagctggaaggcaccactgtcaccaacagtgtgtacaccccctaccctgttc

SEQ ID NO: 475602 - DNA, 1000 bp, Homo Sapiens
ttttttttttttttttgtttgatcaaaatattttaataaagattctttctgacatagatacacatacaaatggtcgtacatagctgtcatagtctgattgacctatttaatatatatatcattctttacacatccaaaacccgccaacagatccatcacagctcccaactcaccatccaacctgacaaactgaatttgtattatctgcaaggagtggaaaatagcaggactccatttttaaaaaagattttcttgattttcatagggcggaaaggcagtcaaacagccatgcaaaactaaaactgaaagctcactttgggtaaatagcttcttgttcttccttagttttctttctttttaaattttatttttttagaaaaataacaaaggatttcacaccataggcaaatcaaaccagtcttttaacttaaataattctccacagttaaaataacatatatgtacatatatattaaaagcaattaaattagaccttttaaaaatgcacagcacagcctggaaaaatatttgcttagcatgttcttacgtatagcaactattgctgtgatgtttttcccttttggaatgtaaaggagtcccctttcaaaaaagagatcaattcattcatcaattaagaatacacctttcctgtaatttttggactgaagcaatttattaaagctcaatttaaatacagggatgatgcaactgaaaatatccaggtgacctttcataaacctaagcagctcagatacatcaatatttctcttcatacttgttggcaaataaacctttaaacacttggcacacagcataagtaatctataaaacaattttagaggcattaaaaaaatctgcacataagacccatgactttaacacatgataaatactgttgatgtggaagggtcattgaagaataacaaataaataccatgaattgttaatacatcattgcagagtagaaagtaacaaggtgcacataaatatttttaaatgc

SEQ ID NO: 475603 - DNA, 1000 bp, Homo Sapiens; identical to SEQ ID NO: 160832

SEQ ID NO: 475604 - DNA, 1000 bp, Homo Sapiens; identical to SEQ ID NO: 160833

SEQ ID NO: 475605 - DNA, 1000 bp, Homo Sapiens; identical to SEQ ID NO: 160834

SEQ ID NO: 475606 - DNA, 1000 bp, Homo Sapiens; identical to SEQ ID NO: 344182

SEQ ID NO: 475607 - DNA, 1000 bp, Homo Sapiens; identical to SEQ ID NO: 344183

SEQ ID NO: 475608 - DNA, 1000 bp, Homo Sapiens; identical to SEQ ID NO: 160835

SEQ ID NO: 475609 - DNA, 1000 bp, Homo Sapiens; identical to SEQ ID NO: 344910

SEQ ID NO: 475610 - DNA, 1000 bp, Homo Sapiens
gactgaggagttccctcttgaacccagaagtttattagcattcagcaaagaagtatatgttgttacaaacaggcagtgcatcaagatatccagatgtcagtgagagctagaagtggagaggtcagaacccgggtgattctgtgatgtctcagggatggagaagaggaagctcaggtacagccaggggccacactcccctttctgcactgggagagaaataactcttacacctggggtgatgatgtactgcagttcctaatttcttccctccttcctccagccattttatttaacatgacctaaatatacattcctgttttattcccccccacccccacccccatatacagcaggaaaaataagcaccaataataataacaataattaaagtcccacctctcaatagacccaaccctcacacatatacataccatgtggattttcttctttggagtgactataggattggaaagtcagggatcaggccagcaagccatcaccctgaaagtcactgttccccaaagtaccatccacgtgtgagctggagcagggcaggggagggggaatggtggtaggggaggagattcccccaaagcagcaagaggggtgaaggagttccccaaagcctctcttctgggaaaatgtcacaatcaactgagctcctaggaagtcctatgcaagggtttcctcaacgagatggtaaattcctgatagtgcaagcatcattgtcatctgtctcccacagcttcttggggaaaggggacatggttgaaacccccttccttccccattgggtggagaatgttcccaaaatgctcctttggagaaactcaacaagacaaagcacaacatgggcactctgatttcaaaactaaagcacaaaacataacgaggaaaaaaaataagacacatgagtactctcagagggtctagacatggggaagaagggttcaaaagaaagaaaaacataaaataaagccagaaaatgacaagctgtcta

SEQ ID NO: 475611 - DNA, 1000 bp, Homo Sapiens
acatacacacacatttatatatataatggaaaaacatatatatagttgcccctccacatccgtgggctctgcatccacagattcaacaatggatgggaggaaggtggggaggaagggaaaaagaaagagaaccagggtgcaaatcaaatagaacaatgataaggccaggtggctgccagtttgtgactcttgctttatgtcaacttcttagtttctgtcttttcccagcaattcaagatgtgtttaagaacttaattcaaggtgtacttggaagtagatcaaatgcaggtagaatttccattgccttgccacttctttaaatctaaccatacagtttttattgagcacctaacatacacacacagtctctcattacatcacactaaaaatgaaatatattaataattagttacatgaaacagagagatataacttccataatggtcaaaatgactctgagatacatacttacattttagctgtttaaaaaaaaaaaatcagatataaagagaatcactgtttactggagcactcaacatctataattccttctaaatgcagaaggttaatgggaaagttccagaacattagtcaccatttcgttaaaaagtagcacttctagtggcacacccctgtagtcctggctactccggaggctgaggcagaggatcacttgagactggaaagtcgaggccgcagtgagccataattgcaccactgctccagtctggatgacacaagaccctgtctcaaaaataaaaataaagtagcacttctaagccaagtgcagctgtgcatgcttgtagtcccagctactcctactcctagctattctggaggctaagatgtgaggatcccttgaggccaggagttggagactgcagtgcctattattacacctgtgactagccaccgcactccagcctgggcaagccagaccctgtcagggaaaaaaaaaaaaaaaggtagctcttctaaaagaatggaaaggaaatcattc

SEQ ID NO: 475612 - DNA, 1000 bp, Homo Sapiens
gatgttctgaactttattttcaactatttaaaccactctacaaaatgctctacaacattaagaaaacctcagcagaatttggggtgggaattagactctgtttatctatcatcaaaatatcacgcaaacacttattttaagtgtttaacttaagatatttaactctgtggaattctttgtagatgatggtatatttaaattccacatatgacaatgaaaatttaccccaagcatacaactctttaaaacaaaataacacacattttttaaaactgtttcagattaagttgttttgctttttttcctagacatgaaaactaagctcaatctttttccccagtcacagccttgagcttatggcagatttgcacaaagtataccaatttcttcttggattgtccatctagtgatgccagtagttcatgccatcacaggtagaagagatggttggctaattccagactgggttctttatgaatgctttgtgccaccagaaaggtcagcttgtgagcatactgacatggtgctgggacactgactatgcccggccagttgtagtacaggtggcacaatttgaatgtaagtctctgcatatggtcgggcttcaagccgttgtcatcatagatgacattatagtaggtaggactaacagttccccggcaggccacctggctgatcagataaaagtcataccattcgttacgtgttgcttctgaatccacaacagtgccaagtggggggttctgtacagtgcggttcatttcggtaaagaatcgtggcatgcacttcttcctgaccacaatcaccgacagtcttgagctggtatttgagccggattctgccacactgctcagcagctgtgggacttcatattcaataagtgtttccagctgaccatcccctacaccagcacggtacacaattatccgtgctggcaaatcatgattgtacttgtaccatttgttgagtgctccagtcatgaaaactttcaagcaatctg

SEQ ID NO: 475613 - DNA, 1000 bp, Homo Sapiens; identical to SEQ ID NO: 344186

SEQ ID NO: 475614 - DNA, 1000 bp, Homo Sapiens
aagagcgacagcaaacatttattgagagctgtaaaatgtgtttcacccaattgtaatgtaaagaatcaaaaattttaaaaaatttccaaaaaaattacatgattgtagttggtaaaaatgcacccatttcaggaaggcccctgtgcctgtgtataaatgatgtgtcttgaacgctgctgggaagctctattgctgagattgagaagaccttagaaacggaaggacactcttcatcagaggacattaattcatttgacaagcatctagaaaatgaactacttggggaaaggaaatactatttgcttaacagaaggctatattttagctccattggggcgtatcacttagatttctttcgatccctcaatgttcactaaatatagtttaaaaactgagatgtgaaatacagacacaaaatggaaattttaagccaagcctacttttccccacaaaggcatttttgtgataccccaccatattaatctacagaatatttgtaaccaatatttgtgaactaattggatgttttgtgattttaatcacaataggtttacctgtttatatgtcaaatgcatgtgttaaatgaaaataaatctatcccttgggttttttgagtgacttaaaaagacattgaagtacatttaggtttaagtgatataattcttgtaaatattaaggtgttttaacttttaatataactatattgacttatttcatatagtcaaaaagtcttctcttttcaaatctatcatgttttatagatgagttttcctttagctataacatattcaattaattcatgatggcctccgaactggtaaatcaaatgctcccatcgggatgaattgatgataatgagatctccctgtttgccaacttccaacgatccgtgtgtgtgagactttcccagtgcataagctgcattgatggtggcagcggccaaggcctcaggcatggacattctcatgtttacacaggccagatgcatgaccattggcat

SEQ ID NO: 475615 - DNA, 1000 bp, Homo Sapiens; identical to SEQ ID NO: 344187

SEQ ID NO: 475616 - DNA, 1000 bp, Homo Sapiens; identical to SEQ ID NO: 344188

SEQ ID NO: 475617 - DNA, 1000 bp, Homo Sapiens
tttttttttttttttttttttttagttttgagggttattttatttctaaagccatatgtagtcaagtgccatcatatgacaaatggtaagtgcagcagtcgtaaggcatggcctaggcacttgggagcccacgacaaacagctgtcctgagagctccctgggaggagtaccaacatccgatccccattatgcagctctggaccccattagcctcccagctccagtatcctgcccattcccaaatgacccgatagacacagtaactggtcccgtgttgcgacacgattaggatttttgcataagagttcaagttaaacagatgtgagtcatcttattctttggttccatagcatttggctatgcaaatttcatattctcttggcttcgtttttctccagtgcccaacaccaaatagtggaagcagaaagaaatgtcaatggctgcaagggcacggggggaaccatcactcctatatgccttccactggaagtgagactggaagggtatcaggctggatttgttgacacctttgatgattctgtaggaggctttgccaatgtcttatattttgaaattcatggcaagacataagcaacagatttggcaagaggaaatattataacctgaaaaatgggacagattactagaaaagcagcacaaccagggagaagggaagggaaaaaaaggatgacagaataaaaggaaaagagagaaaagtaaaaaaggaaattgaagagaattaagtgttctggtgctgatgaagcttaagaatcaggaagtgataataacaataatagttataaaagtaggaatgagatggttagaaagcctcaaacaaaaacgttaggaaggaggggatctttcaggcattaggtgatccatctcctttctttatggctaaagaaaaaaagaaagagaaaaaagaagagaaatagagaaccctgcgtgtctgggcctttgggtctaggggattggactatgatctatgagactctttcca

SEQ ID NO: 475618 - DNA, 1000 bp, Homo Sapiens; identical to SEQ ID NO: 344190

SEQ ID NO: 475619 - DNA, 1000 bp, Homo Sapiens; identical to SEQ ID NO: 344191

SEQ ID NO: 475620 - DNA, 1000 bp, Homo Sapiens
aacaataatcttcagttttactgttctgcgagggttgagtacaattaataaaacaaactttggaggtacatcagtagttcctgaacattcatgtttacaaacatttgttaatttgcccagtcctgtcattttctgaaactgtctttgttgtcaatctgtttttgttttttgagatggaatttcactcttgtcgcccaggctggagtgcaatggtgcaagctcagctcacggcaacctccccctcccaggttcaaatgattctccagcctcagcctcctgagtagctgggattacaggcgtgtgccaccacgcccagctaatttttgtatttttagagagatggggtttcaccgtgttggccaggctggtctcgaactcctgacctcaagtgatctgcccgcctctgcctcccaaagtgctaggattacaggcttgagacatcaggcccggctgtcaatctttttaatcacctacaagtgatgtttacatctgtttgccctctcaatctttacaacttgacagtatgtgcctgctaacctaaaataaacatatgcttttctcaatatatatggagtttttaggctatacagtaaattatttggcaaatacaaagagatgatcctctggagtaaatcttgtcaacttaaccaacctaagttatttatcttcccatagtaatcccaacccaaaaccgctggtctcctatcccaaaaactgttacacaagctccgaaacccccaatcctgcccccagtccctatgtacacatcataccattaagtctcttttcagtctacaatgtgaaaaaaaggccatctcaattctattcttacaccaagtttcagtttaagaatcatgtaaaacatttccagttcaacaaatctttactcagtgcctctcaagcattctattttattttaagcattctattttaaattaataaaagttattaatattaattttaaaaaacctattgtgtatgattcattaatggttgtatc

SEQ ID NO: 475621 - DNA, 1000 bp, Homo Sapiens; identical to SEQ ID NO: 344193

SEQ ID NO: 475622 - DNA, 1000 bp, Homo Sapiens; identical to SEQ ID NO: 344194

SEQ ID NO: 475623 - DNA, 1000 bp, Homo Sapiens; identical to SEQ ID NO: 160836

SEQ ID NO: 475624 - DNA, 1000 bp, Homo Sapiens
ttttttttttttttttccttttttttttttttttttttttttttttttttttttttttttttttaagtcacttttgagatatttattattagaaaccatccaacatgaaatatgaattattaaaatgtttttctccatgtttcaaaccagaaacagtaattcagaatgcaactagcatcctaatttttaaaatcaaaataagatgaccagattaataaaacttagcattcacagtattcaatctagaaaaaatataattaatagaatgttaaagccaaaagaacatttgaaagacagaaagagagaaggggaggagagaaagagagagggaaaagagaaagcaagaaagaggaggaggaggaggattgagagatggagagtttgagattgagacttcttatgaaatatattttaacggcaattactcattaacaactgtgcattgagaatatttgaacatgttgttataagctaggggaaaaatgtcaaaacacagaaccaaaatgattctgtatttcctaaagatatactttgagaaacagaaaaattatttcccatttcactatcccccagtaccaaaagggagcattttatgatatgcacatctgtataatattttatagaaaataaatgccaaggtatttacaatttaatttactatttcctcttcaatttgttttttatagcagacatattaatttcattttgaacatgatatgccaaatatcctgaggttccaggaatgaagtcatgtagctccccaaggaatttcttcatggcatcaattgatatataacctgttaccatgttgttaactgggtaattctgtagagggaagtacatctgcttttctacaactggagttcttataaaatgcttttctgggcttttggataattcttttttgtgctctgttgctagttcactgttttccctaagggtctttatttcatttggtgttacttcatcatgcttttctatcagaaaatgttggtcttgt

SEQ ID NO: 475625 - DNA, 1000 bp, Homo Sapiens; identical to SEQ ID NO: 344196

SEQ ID NO: 475626 - DNA, 1000 bp, Homo Sapiens
ttttttttttttttttgcaaaacagcattcgcctttttttatttgttaagtggaaatttgtggcaaaataagaaaatatgtgttggataatatagtccctatataacctctcatgtccaaatttgaaaaaaaaaattgtcaagccattgacagcaaaatatgtactttagcagcatattttatatgggtaaacagtaatagccagttagacacttcatttgtgatttgtcctaaaaatagaaaatgctttttattttcctgagtcctcggcaaacaaaaaacatttttttctttttaattgttaaagtattcctgtttttctttttcctgggacaccctcacagttcagaacgttgtgtctcactgtcagtttttacatacagagatgaacaaacagcaccggggccaattttcaatgactgatcaaatatggcgattgaaaataaaacacccatcatctacaaagttgctcaagatgaaagtttcttacagtgctataaatgcaatatcaatttgaattgttgtccatacaaaagtatgaatttctattccattagtaatactgaatgattaataccttaacagcgataaaatttttagaacatttaaaaaatacagaggattccagttttacatcatacttctgacggattatcatactttctattttgtctgcaaaacttttacagagtacagtgcattgacatgataaaaccaaggcacaaaaatacagttacgataagtgtatataaaccctagcactttgtgccaattttggaaacagatcataaagtctgaaaaattaccacattctatttgattagtgaacaattaattgtgcagtaaatagactgttaaccaccattccattattaaatatatggctatcactatacaggttgtggataattcaaaaatagttttaaatattaaaacctgtaatatctaggtggtcaacgcagatattgagccttacgttatctaaataagtttccattta

SEQ ID NO: 475627 - DNA, 1000 bp, Homo Sapiens; identical to SEQ ID NO: 344197

SEQ ID NO: 475628 - DNA, 1000 bp, Homo Sapiens; identical to SEQ ID NO: 344198

SEQ ID NO: 475629 - DNA, 1000 bp, Homo Sapiens; identical to SEQ ID NO: 160837

SEQ ID NO: 475630 - DNA, 1000 bp, Homo Sapiens; identical to SEQ ID NO: 160838

SEQ ID NO: 475631 - DNA, 1000 bp, Homo Sapiens
ggcatgataaattggaactattttcttttctttctctttctttttatattttattttatttcaatagtttttggggagcagatggcttttggttacaaggataaggtctttagcagtgacttctgagattttggtgcacccttcactggagcagtgtacactgtacccaatgtatggttttttatccctcatcccctgcatcctttcccctaagtccccaaaatccattgtatcattcttgtgcctttgtatcttcatagcgcagctcccacttataagtgaggatgtacaatatttggttctccattcctgagttatttcacttagaataatgatctccaactccatccaggttgctgtgaatgccattattttgttcctttttgtggctgaatagtattccatggtgtatatgtacaccgcattgtctttatccactcattgcttgatgggcatttaggctggttccctatgttttcaatcgcaaattgtgctgctataaacatgcgtgtacaagtgtcttttttggaactagtttttttgcccaggctagagagcagtggtgcaatctgggctcactgcaatctccacctcccaggttcaggcgattctcctgcctcagcctcctgagtagctgggattacaggcgtgtgccaccacctggctaatttttgtatttttagtagagatggggtttctccatgttggccaggctggtttcgaactcctgacctcaggtggtctgtccgccttggcctcccaaagtgctggattacaggcatgagccaccagagctattttatatactatttactcctacatactctgaggtctcagttagctacactttatcttgttctcaactatgattggataaccaagaatcagcagacacttgaggaaggctcataatatagaagaagcagacaacaaaacaaagatgtgaccactgagtggagggatatagttcaaggaacagaagagagtttgaaaacatcag

SEQ ID NO: 475632 - DNA, 1000 bp, Homo Sapiens; identical to SEQ ID NO: 160841

SEQ ID NO: 475633 - DNA, 1000 bp, Homo Sapiens
gtggcaaaacaaagacatttatttttcacagcagtactagaataataatgatgtatttcaacattctaaggtttagagttctcttaaacaggagtgggctgctttgagatactgagctcccgggcactgaaagtattcaagcagaagctggacgccatgggccaggctttcttttattaaaaccgagatgctactcttcctcttctcaaagtgcctacagaacagctgagacctacttacccagctcgtttgtcactattagtttcatgactataaatttcatacagctttactgagggataacctatgtactgtacaatttacccattgtaagtgaacaatttgatggttcctagtaaatctatacagttctgcaaccatgactacagtccagttgcagaaactttgtgattatagattttttccccaaagaacattgttagcatcaagggtagatccaggtcccatgggccgtggtctccgctgacctaacagcaggcctctgtgctgtggctctttcctcatatcctctcctcattccttcttgggagtcacctgatgctgccctgccacatgctgcttggccttcctgggccctgggcacctcgcccctccccgagttgtccccgctgggcacctttgcttccttccctccttctttgccatggcttgggggcaggggcttggtcttcagcagattccaaggcagtagggtgtacttagaagtatgtgagccctgataacccagacctgtatttggctcacagccatgtggcctccagcaagtcaccttattttttgttatttctgttttgttttgagacagggtctctcctggtgtccagccattaccacaggcacagagatggattcctctacacttgggaaaccccaaggctgaccccagccagggatgcatgtgggttacttgggaatggagcagcagcaccacctagtggcaatgtgcagcagcatgctaattactggccaaatgcaggag

SEQ ID NO: 475634 - DNA, 1000 bp, Homo Sapiens; identical to SEQ ID NO: 160843

SEQ ID NO: 475635 - DNA, 1000 bp, Homo Sapiens; identical to SEQ ID NO: 344205

SEQ ID NO: 475636 - DNA, 1000 bp, Homo Sapiens; identical to SEQ ID NO: 344206

SEQ ID NO: 475637 - DNA, 1000 bp, Homo Sapiens
gagatggagttcccctctcgttgcccaggctggagtggaatggcacgatcttggctcaacacaacctctgcctcccgggttcaagcgattctcctgcctcagcctcccaagtagctgggattacaggcatgcgccaccacgcccagctaattttgtatttttagtagagacggggtttctccatgttggtcaggctggtctcgcgctcccgacctcaggtgatctgcctgcctcagcctcccaaagtgttgggattacaggcgtgagccaccacacctggctggggagatgcttcttatgagaattttacatgattattcatgaaggggtcatgcaggggcgttactagtaagcatgtgttgggaactggtctgggcacacatgtgccatgtcatttggatctaaagtctaacaaggaatttctggttaaaaaataaaatctccacacaggtgtgtggtttttttattattttaatgaacaaaatggtatattagggtgaattattagagaagtatacatgcttcttagtggggaatagctcctaccttggtaacctctggctgggccttgataagttcccttctggaacagaggaatgcagccacaaggccaggtgtagccagtgtagccacgctcctccttttgctgactcagcgtgcagcgtttccaaggaggccatcagcgggctgcatttctaaagattcctttcccaggggcttccttgcctgctcttgtctggctacctgcctaccctaacagtattccccctcaagagttggagaccctgaaaagctttgggcataaggacgtcgtgggtcttctgtaactacttcctgctgacgtgggacgaagaagtcatcagggtctccctctcttgctctctgtcagggaaggagcccctccgtagttgcagaatctttgcccactggcatccaagggagatatgtacttgtaggtgctgggacctccaaggaagattggatgatctctttccatttt

SEQ ID NO: 475638 - DNA, 1000 bp, Homo Sapiens; identical to SEQ ID NO: 344208

SEQ ID NO: 475639 - DNA, 1000 bp, Homo Sapiens; identical to SEQ ID NO: 344209

SEQ ID NO: 475640 - DNA, 1000 bp, Homo Sapiens; identical to SEQ ID NO: 344210

SEQ ID NO: 475641 - DNA, 853 bp, Homo Sapiens
ttttttttttttttttctttatgatcaccagtgacaagtgttttaccaacaaacacatgagtcgggggaagttacatggtgaggtgggagggcgagggatagagaggtccccctggattggcctcagccaattacatcccgagtctgggacccagccccactgtcttcccgctggaggctgcaacgattcatcttcagctgagtcagctggatgtagcggagcacattggtgtctgtgggttcccggctgcgggcctcctgcaggtagcgcagcgcgcgtgcgtagtcgcccaggtggtagaaggcaatgccggcacggtaggtggccttgaagttgccctgctgcttctccagtaccttgagacagtactcgcgcacgcgctcgtagtttaccagctccgactgcagcaggcaagccgtgagggagtcgtaacactccacctccgtgctctccaccaggcgccgctgctcctcgctgaggcgcgccggcccggggctgctggtgggcccgggggctggggcgggcaggccgctagggcgggccccctgcgccgccttcagctgcagcagcgctcggtggtacttgccgatggcctcccggaacttcttctctcgatagcagcgctggccctctgccttgaacgccacggcggcacgcaggctgctgtcgagcgccgcgcccaggctccccgacggctctggggtaggaccgggacgagccgagccatggcgggagcccgagcctgggcccgagcccggtggggagagggcgggaggcgggcgcggcggaggctccggggcagcgctgagcatcagcaccggggacagcgcgccgcgctgcattgtgggaaac

SEQ ID NO: 475642 - DNA, 1000 bp, Homo Sapiens; identical to SEQ ID NO: 344211

SEQ ID NO: 475643 - DNA, 1000 bp, Homo Sapiens; identical to SEQ ID NO: 344212

SEQ ID NO: 475644 - DNA, 1000 bp, Homo Sapiens; identical to SEQ ID NO: 344213

SEQ ID NO: 475645 - DNA, 1000 bp, Homo Sapiens; identical to SEQ ID NO: 344214

SEQ ID NO: 475646 - DNA, 1000 bp, Homo Sapiens; identical to SEQ ID NO: 344216

SEQ ID NO: 475647 - DNA, 1000 bp, Homo Sapiens; identical to SEQ ID NO: 344217

SEQ ID NO: 475648 - DNA, 1000 bp, Homo Sapiens
ttttttttttttttttttttttttttttttttttttttttttttttttttttccgggtgcaggtacagtttattcttcacaacagagaaatacaaagagcagagggtttgtaattcctttgtttcttgccccctttagtgttttccccccacatttgattttcatttgctccccactcccttttttaaatagaatgcaaactaccttcctgaagtgtctgaggggcacctgccctcacctccctgcctccaagatgcagactgagaagccaacagactgttttttcttttttaataaggtaactagttctaaatatggtggcctggaggtcccatagaaaaagcaaaggggtgttaacagtatgtataacagcgtatttacagggagtaacatgcggacaaaaagctacaatactgagtatcagacgacgcaagtcaaacaaagggccgggggtgggggcagagaaccccatgggcaaagaaaccccaggaaacgttaaactggtaaatcaatggcgagttaaggcttaaaaagtgtataaaaataacacagttaatattcaaaacggaactccagatacagaatatatagatgagtttctgtctagttttcttttttttcccggggggatgtagggggcttctctgggctctgtacatggttcctatatacaccgacacgcatggctttcagattggggtgtgtctgtgggggctgggggcagggtctgctcctgggacctgcctccccggggatcccttccctgctgaggggcctagggcctcggctggggattcccactccatggcagggaagacaaataacccctccctgggcactgcccccatctggaggaaattctggagggaggtcccagatccaggcccactccctccccatccccctgcccacagtctgggatggtgggagaggtagccgaaaggtttcctggccagcaccgaggtagactggggtggtcttcagggcagcaggggagggc

SEQ ID NO: 475649 - DNA, 1000 bp, Homo Sapiens
cttttttttttttttttttttttttttttttttttaagcgtacagggcattttattaaccgggaaggacggtgcggaagagcgagcaggacgcctcttcaccccgcgtaggcagtgtcgtcgttgctgtcactaaaggcggaggaagagagctcttcgcggggcgtgcagaccgggcaccgctgccgcatgtcgtcccagcacgaccagcagtacacggcctcgcagtccagcgtccggcacacgtaggactcgggcgtctcgggtgcctggcacaccacgcagcgccggcacagccagcggcgcaggagcgggcagccgcggtgcaggatatccgccagcgggtggcgcggagccttctgctgtcgctcccgcctcaggatagcggccctcctgagtttggtgaaggctgctcttttcttcaataggtcattgtagaggaacaggatccgcttcttctctcgcttggggaagtagaaggctgcgatgaccctccggagtcggtagccaaaagcctgtaacaggcagagacacactaacaggccaatcggtactgcagctctccagtaggccctggcatccaggcccacaggctggggcaggcagggcatgttgtttgattccatcactgtctctgaggaggtgttcagggccccaatggtttttcgaagaagccgggctagcagggagtctcccccgaccttcacctccagtttatgactgctgcggaaggagtactgcaggaaggagtggtggcggatggtgtcgaagatggagtagagagcccagtccaagccacacagcaccaccagcagcagcggaatgggcagtgtctccaggagctccctcaccacattgctcatttctgaggcctggatggtgggcttgcaagggaagatgacggttttctcctcagctttgcggagtggcagcagagtccgtttgcccagcttcttcctgcggtcatcgatctggcagaagtaggtactgatgtagatgtt

SEQ ID NO: 475650 - DNA, 1000 bp, Homo Sapiens; identical to SEQ ID NO: 344219

SEQ ID NO: 475651 - DNA, 1000 bp, Homo Sapiens
caaactacaaatttttaaacttttattttctccctatacagaagagatcatttttccgacttcactgcctgacttcctgaggctgcccagagtttgttgcaggctccgggctcagggtacgttcaattttcctgcttggaactgagagaagaactcaggtcttcttacagactgccaaagtccggcagggctcttttagaacagtcatttcacagctagagaaacggagacccaggccgggcgcagtggctcatgcctgtaatcccagcactttgggaggctgaggtgggtgaatcacgaggtcaggagatcgagaccatcttggctaatgcggtgaaaccccgtctctactaaaaatacaaaaaataagccgggcgtggtggtgggcgcctgtagtcccagctactcgggaggctgaggcagtagaatggcgtgaactcagaaggtggggcttgcagtgagccgagatcacgccactgccctccagcctgggcgacagagtgagactctgcctcaaaaaaaaaaaaaaaaaaaagagagagagagaaatggagacccagagaaataaagggccttgccaaggctgcacaggcatttggcagcaatttcatcagcatccagcacacatgggcttcgtaatacaatcaccaagggagccagttcttgaacacagccccttgatttttcttgccagagccccttgaactcctctggagactcctgccctctgcttgagatgctcctgtagcttttcttgctcaggtgagaaataaaatgtgatcctaaaatccctttggtatctacaggaggaggttgtgaagtctgtaagtggttgtattccagcttcattatttccccaccatgctggttccccagggctggtgccatgaaggaggaagagatcagagaatctatgcggagaaggtcttcttcttccagtgtggttgtagttggcattgctgcctctgggtaccaaaggtacccaaatgttgattctgtc

SEQ ID NO: 475652 - DNA, 1000 bp, Homo Sapiens; identical to SEQ ID NO: 344222

SEQ ID NO: 475653 - DNA, 1000 bp, Homo Sapiens
acctgacaaactcatttaatccttaatctgttttacaaaaacagaagaggtacagaaaagttaaggacttaacgggaggtggtaaagctgtggttggaactggttttctgtactcaactgctagatgcttctagacccaatgtcagaacatggagtagtaaacctgtaggtctggaaataggccccagtcctgtgcatgttcagatgctcatctccacattcacttgggttcagaaactcactgggggcaagtcagaactgtggtgagggcccaaaccctcatctcttctgtacgaggtgggggatcagcaaagccaactgcgggggtgaggaagctggcttccagtgaagatgtgctggacactgtgaaccaagttaacctgctcctgctttgatttccttatctgttacatagtaggacttcatagagatgtgaggatcaaacaagaaagcattggtaatgactggcacacagtggtcaataaaggctggccgttagccataccagccacaccggtatgtgtagctgtggtgtccctagctgcagctgggccctcaccggaggtgggtactggtactcatggacacttgctggattgatctctgccagtgtctgtacagctgcatctcttgcattcaccagccgcagaaagagctcagcctgacctgcctgaggaatcccattcagctgcccaaggctaaggctggggtccagaggaagggcccgaagtgggaggcgccagcggccacttagcacccgctgatcttggtcaaatagtccaagtgagacccaagcctttggctgtggtgccctagcccatgctagcccctgccagacctgcagctcacagaccaaagatactgatgatgagggtggtagtctgggcacaggctgcctgctggcaaggatggcacagttgcccatgggcccgggagcaggaggtgggggcaggcaaagggctgggggcaacgctgtggtccttcctgtatcccgtccatc

SEQ ID NO: 475654 - DNA, 1000 bp, Homo Sapiens
ttttttttttttttttaacattgtaacattaacatttatttagaatctcttttgaagctgtccttgacctgtttctcaagactggaattctgctgggtgccgtggtgcatgcttgtaatcccagcactttgggaggctgacacaggaggatgacttgaggccatgagttcaagactagcttgccgcacaacatagcaagattctgtctctgatgttgcttgccttgtgtttctaggcagaggacctgcccatgagcttctgcaaccagttcactctctgcttaggttttggttcggccctcgccatctggactagtaacagagtctgggaagcgatgatgcacagcgagggctcagggtcacacagcaggtctctcagatcgtcctctatccagtcagtacccatcctcctgagctcattgtgatccatgtacttcgataaaaggcctacaaacaagactgctgatcttctgatgggaagttttgggttcttggagtacatcagtgtttgttctaggatgttaattttccccttgcactttttttcaaagaatctgcagattgttcctgcttcagtaggtttgatgtgccagggatctttggagtacacttcttggggcagcttccacttcaggaactgggcacatatagttaggacttgcctgctctcctcagctactgcatcattttcatcctgagaatacagaagtagtgggaccaagctgtccaggacttggttctctatactcttcttatctgggttttttacagactttatggcggctccaaagagagtcacggagaaacgatgaacatcagatctcacatcaccaaataaggagaacagggtcctcatcatggcagccagggtagtgaaatccattgttctaacaagttgcaggagtatctggatggctgacagaacgatcttctcatcggtttcacgcaagctgtctacaatgtatggcaacaggctcttgatgtcttctctcatctcctgg

SEQ ID NO: 475655 - DNA, 1000 bp, Homo Sapiens
tttttttttttttttttttttttttttttttttttttttttttttttttttcagatataagaggtttattaaggaaaggctcccagagacaccagtaaataaatgggagggtagggaaagggattaagcccagcaagggtgtgatttcatgtaatgtcccagcctcaggccgatctagaggaaagggagtgctagagcataaattactcctcagagaatgtccttccttgaggcaagggagctgggcttttgactcgtagcccagtcagtcagcggccttggccaagaggacggagaactcccagaccctgctggctctccatatgggctgactggctccaataccaggtcacaggtgccagcctttaacctcaaagcacttaattgggattgggcacacagagctggccagagaccctaggggatctgggtggccaccaacactgctggtcatggcacagcacctccattactaccctgcacaccgcccggcaccagttacaggtctttcattacattctgctgcaagaggaaatgagtaatatcctttgacagtcctgggtttggcttttcatcatccaaagatgtacttccttcctccagtgggtagaagtgggtgtccctggaatgcctctgtaagacggagcagccgtcccggttgaagatcacccgggccatttgaaaactgcggagggcatacttttggctctcctggcctcttagttgagtgattttctgagacaggcacttgcagacagatgcagagagtgagtttgcagagcctggctgtggatgaccaaacatttcatagaatctatccagggatttccgaaggccatcatcctcttccttctctgactggcctttcacagcagggtcaagccagaagttctcagcggtccaggagttattttgttctatatttaagttactggtgtctggatccacatcagaagaataaggaaaagaatggaattccaaagaactgaaagcctcgctg

SEQ ID NO: 475656 - DNA, 1000 bp, Homo Sapiens; identical to SEQ ID NO: 344224

SEQ ID NO: 475657 - DNA, 1000 bp, Homo Sapiens; identical to SEQ ID NO: 344225

SEQ ID NO: 475658 - DNA, 1000 bp, Homo Sapiens; identical to SEQ ID NO: 160845

SEQ ID NO: 475659 - DNA, 1000 bp, Homo Sapiens; identical to SEQ ID NO: 344227

SEQ ID NO: 475660 - DNA, 1000 bp, Homo Sapiens; identical to SEQ ID NO: 344228

SEQ ID NO: 475661 - DNA, 1000 bp, Homo Sapiens; identical to SEQ ID NO: 344229

SEQ ID NO: 475662 - DNA, 1000 bp, Homo Sapiens; identical to SEQ ID NO: 344230

SEQ ID NO: 475663 - DNA, 1000 bp, Homo Sapiens; identical to SEQ ID NO: 160846

SEQ ID NO: 475664 - DNA, 1000 bp, Homo Sapiens; identical to SEQ ID NO: 344232

SEQ ID NO: 475665 - DNA, 1000 bp, Homo Sapiens; identical to SEQ ID NO: 344233

SEQ ID NO: 475666 - DNA, 1000 bp, Homo Sapiens; identical to SEQ ID NO: 344234

SEQ ID NO: 475667 - DNA, 1000 bp, Homo Sapiens
aaagtataactttatttctatatagctgaagattcttttcactagtacaaaaaggcttttatagtaagtccatgtgtttttaaagaatgaaaattgacaatttttataggtaactaaatttaagaagtttacctttttcctgttttgcttttaataatgtctgattagtatttacctataaatcattcaaatgagatcactgaaaatataaataatacaatatcaacaattttacttttggtgtgtctccagccatctattgatggccattttcagagtcctatttggtgtaagtaccgctgaaggaagaacaagatttgtcatgggacttgtacgtttctttttgctgatccaattttccattgcttccttttcatatgaatagccatctgatgcgatgaccggatctttcataagttctctagttattggacatataaattcatcaggaattcctgaagaaagggatttaaccttggtcctgagctcttcaattttcctcagcactttactacgcagtcctagagattcaattttcaaatcatcagccagactttcttttgtaagattcaacagttcttttccatcaatgttattcatcttgaaaataccaacaagatcttttaaatcttgtgcacaaagccatgttgagacatcctcctctgaccaatcttcggtaaattgcttcagctgatgttctgtgctccttgcttggcaaagtgtttccaggtcaaattgccagatgttcactgttttgtccattgaaccagtagcaagtaaaagggtattaggtgcaaaagcacaagttgtgacatacctggtgtgctgagtcaatgtgtgaagtatattctcagtattagtatcatatactatgacagacttatccactgaccctgagactagcatctgcccatcatgggaaaaagcacaagccagaacaggagcacagtgcccactcagtgtacttttatattttaattcaaaacctaagatatgggta

SEQ ID NO: 475668 - DNA, 1000 bp, Homo Sapiens; identical to SEQ ID NO: 344235

SEQ ID NO: 475669 - DNA, 1000 bp, Homo Sapiens; identical to SEQ ID NO: 344236

SEQ ID NO: 475670 - DNA, 1000 bp, Homo Sapiens; identical to SEQ ID NO: 344237

SEQ ID NO: 475671 - DNA, 1000 bp, Homo Sapiens; identical to SEQ ID NO: 344238

SEQ ID NO: 475672 - DNA, 1000 bp, Homo Sapiens; identical to SEQ ID NO: 344239

SEQ ID NO: 475673 - DNA, 1000 bp, Homo Sapiens; identical to SEQ ID NO: 344240

SEQ ID NO: 475674 - DNA, 808 bp, Homo Sapiens
ccaaactgtttatttgggctttaagctgaagcgtactcttgcaagacatctgtcctggggcaatatgagaagcacttgtggattattatgatcttattttttgttatacagtagtaggcagtttctccttctaaaagcaggttgagttatgctgatttagaggttaatgtttccttttcttttcctttttggtagcttcggcagcttaggtggtttggaagctcttggcaatgatgacttacactgcctaacaagaatagcccatttggaatttctctgatcagtgtcctcgaaagcactcatatgccaggcaaaagaagcgcgactctgttttccttgcatatccaggacatgaggttttggttgccatgggttttgatatctgtgggttattgaatcaagagaagcttgacttagttcttcatacttgatatgaaagccactctccagtcttgatttgttgataaaattatactgtggtattctccaaccaatttcaccgacgtacttatgtttatattttgctggcaagcttctatttgaggcaggcctccataaatatctgagatctccagttttttctaacgccagatgctgttctcctacataggaggtgtgctgatgaattttgggtaaataatcctttatgtagtctggacctgtaaaaatcatttgttttcccacagtagtagatgttggcttttggtatgatacagatgccatggctaaagtcttaaccgtgctactggattttcttcttcggcttcttcaaatcagttaagctgcaccagaaagaacgaaagactct

SEQ ID NO: 475675 - DNA, 1000 bp, Homo Sapiens; identical to SEQ ID NO: 344241

SEQ ID NO: 475676 - DNA, 1000 bp, Homo Sapiens; identical to SEQ ID NO: 344242

SEQ ID NO: 475677 - DNA, 1000 bp, Homo Sapiens; identical to SEQ ID NO: 160847

SEQ ID NO: 475678 - DNA, 1000 bp, Homo Sapiens; identical to SEQ ID NO: 344244

SEQ ID NO: 475679 - DNA, 1000 bp, Homo Sapiens
tttttttttttttttttttttttttttttttttttttttttttttttttttttttttttttttttttttttttttttttttttttaagcttctttgctttattatttttctggtacattcgtctccttaaaaggagacattagaagcagtaaacatcccagagatagtaactttcttcttcagaactttttccaacaaatcactccattggctgatgaaaaagaagatgactgaaaaggtttatacttcctggagttccactatcttgcgctgtaatttctttaggtctttctgtactttatatttctctaaatccatctttgttttctgtatttgttggagggagctgagagagtcatgaattgatttaaatcctgattgatattcattctgcattgtctctaattcaccccagatctgcttttccatttgttccatctttttggacaatttattttccatatgctttactttacttagttgtgtttcctgtttctgtgtgttaatgaaattctctactttgcttgaaagctgcagcagtttttcttccattttattttcagacttttccagtttctcctgtaggaccttcagacattcatttatatggcccaggtggtcttttctatatttgagaaattggttttctgtccattttttattattctcaacttcttcgtacagattacttgaaagtgaatgaaatttgaattccaaaaggttcatttcgtggcgataatccccctggaccatctttaaattcgaggtttgctcagaactggcagtttcaatctttcctaagagctgcatcaccttcatgtccaagttcttggaaagagtttccagggcgggcacgaattcttgaatggctttctcaatttgccggtgctcttgcctgaataagtgaatgtctccagaaagcttcacaatgcttgaatcacatctggctactcttcctcgaagatctccaactccttgtaggtgtttgatgtttatctcg

SEQ ID NO: 475680 - DNA, 1000 bp, Homo Sapiens; identical to SEQ ID NO: 344245

SEQ ID NO: 475681 - DNA, 1000 bp, Homo Sapiens; identical to SEQ ID NO: 160848

SEQ ID NO: 475682 - DNA, 1000 bp, Homo Sapiens; identical to SEQ ID NO: 344246

SEQ ID NO: 475683 - DNA, 1000 bp, Homo Sapiens
ttttttttttttttttattcttctcattaatttagtttcactcattcccttttggacattgagattttttgcaattataacatttgaaagataaaagaattatactgctggggccacagattataataggtgcattcagtgaactcttatcttctgaaaagtggccttgcttgttggtacagataggacttcagctattaacaccaagtctcacaagatggcctggaaggaggtgcagagttcaaagacagtccaagcaattctcagaagaggcgtgctcagaattcttaggataactggttcttaaaatatcttcttccaagaaccacaaaggtcagagttatgatatagatgtttatagtttatgaaagtgaccattttttaaaagcagcagcaatttgtttagggaaaggacaggataccatgttgggagtgcaccatagctagaggcattgtggcccacggagaatcactgggagatgagatggtagaaggttcctctcagtgtttttcaagatgtgactcacagatgggtgtaccctttggtatcgctcctactccaaccagcttagctggatgaaatcatctgcatgttaccagtgcatacctgtccgtgatcgttttctctgttttttacaaaggcaatagataggaaatacaaataaacacttgtttcaggcagtatagcatatcacttaacaacacaggctgtggagccaaatgttgggtttgattcctggttctaccacttatgaggttccagtaagtcttaatttcctcaacgattacaaccgctatggcccctagtgccaatcccaaaaccataattagaggtgcaatgaataattttccagcacagactgaccctcgcactaatctccttaaatgaggtctctctgggaggtagcgatatttgcatccaaatatactgaggtttgatgtgtggtctccaaaaaatcggagctggcggtatctctcaccacatcggtaacaaaaatta

SEQ ID NO: 475684 - DNA, 1000 bp, Homo Sapiens; identical to SEQ ID NO: 344249

SEQ ID NO: 475685 - DNA, 1000 bp, Homo Sapiens
ttttttttttttttttttctcagaagcaagtgtgatgctgcttttgtaattgggaattttaaaaaatcttggtctccacagtgacagaatccaaccaaattccttcctgggaagggcagctctggagggcagtgctccaggggatagcaagggtgacgggaaaggacggtgtgagcgggtggggcatggagtaagatcatttggggacctgggtgtctttagctcctcactggcttgggacaggccgtgttttgctgtggggatgggggaagccggtctcacaccttcctaaggcacagcggggtgtgtctgcctggcctgctgggctgagatcgagcaaatcctggttgttgagggtgtcaccaggaagagggggcatggtgtcggcgctggttgcggatagcagctcctcacggtcaaggtcgtgggcaggcggcaaggtgctgtcagagaacgtgtcactacagggctccctggcatctgcgagttcacggcagatgtgtctgttggcactgaaaatccaccatccgagctgcagctggagatgagggggatgcgagccgctggccctccccagagaataaagtaaaggcatttgggtctccttccacaaacaaaagcacaaagagacacgacgcagatgctgaggtgttaagtaggtatcatcgttcttctcctaacacgataaattatctttccagtcgtggttcctatgtcctcggcagcgctgccatcacggcgtggagacagtgacggggacctaaactggaaagttcttcgtgggcagagacggtgcaatgacaatatcgtcggaatcatcggagttgacgtcatccccaggtagaggtgccaaggcctgtggccctgagggagaggggtcaggaagagctgcgaggaagggtggggaggaggcgtccccgtgtgtggctgaagccgatctcctcctggtagaagctgcggtggtggttcttttaccggtagcactgtgcctggcccgggc

SEQ ID NO: 475686 - DNA, 1000 bp, Homo Sapiens; identical to SEQ ID NO: 344250

SEQ ID NO: 475687 - DNA, 1000 bp, Homo Sapiens; identical to SEQ ID NO: 344251

SEQ ID NO: 475688 - DNA, 1000 bp, Homo Sapiens
aaggttcatgggacttttatttttactgtttattttttgaaagccagtgaggatgggcaagtgcttggtcccttctgggctgcattcctatctaagaccagccctcacccgcctcccccagcccaccccctacctgccagcagctcagatcacccgggtgaaaaataccaccctgttggccagcgtccctgtcagcaccagctccagtgccaggccgcaaggcgatctgaggaaaggaagggccgtgattcccagcaggccgtggttcagccccttcctggcatcctccacccagccggaggggctgtccttctcccttcctgccttgttggaggggtgccgttctggggtctttcccagcccttcctttcctccccaggtgggatgctttttctctctgggtgggcctgtccttatatcagcaccaaatgatgcccaggtgggtggcccttgggcacaccgtccccgcctcccctctccctgcaccctccccttttccccggctgtcaggatgaggagggcacagcggtctcagaggtattgaccctgagggtaaatcggagaaaggaggccagggggatttccgcagctcagggaccgtcatcctgcagtgtcaggggcattttttctccactgggaagtcccacttcccctcctggaggcagatttcctgcagcctgggttaggtgctcagctctggcccctccagtgggacccttcctgtgcacaggtctgaggagtgcacctggccactcacctgtcttttcttctgcagccagcagctggcttggggcccaagactctggacttctgactccccagccagctgcctccctccctgggaagtcctgcccactccccccgccccaacagctggatcacagtggcatgtctgggaccccacagccagtttcttggctgcagagcctggtcattttagtcctctgtccacttgtgaatctgcagaactggcaggcgaggcccgaggaggtgcaagggg

SEQ ID NO: 475689 - DNA, 1000 bp, Homo Sapiens; identical to SEQ ID NO: 344252

SEQ ID NO: 475690 - DNA, 1000 bp, Homo Sapiens; identical to SEQ ID NO: 344253

SEQ ID NO: 475691 - DNA, 1000 bp, Homo Sapiens; identical to SEQ ID NO: 160850

SEQ ID NO: 475692 - DNA, 1000 bp, Homo Sapiens; identical to SEQ ID NO: 344255

SEQ ID NO: 475693 - DNA, 1000 bp, Homo Sapiens; identical to SEQ ID NO: 344256

SEQ ID NO: 475694 - DNA, 1000 bp, Homo Sapiens
gaaaatgtaacattgcatatttatttcaggaaatcgtcagaggtcacctttaggtcaatttaccacaccagaggaacaaagttgttcaactccagctctgctgaactgagccgcttatccacagtacagtatagaacttgaaggtttttttcccatcaggtcttcagttccaaatactgttatcatccttaataccgtctatgtcttctctggtgtgaatgatgtgatcgaccatgtagggttgaaggaggtggactccgcgttggtggacaaggtgacagtcgtttccatgcaggccaccttctatgatccattgcatctgtttgtgtaaactgagggctcaaggtttcttgattttcggtgaactgaggtaaaatgttaaggttataatggtgagaagcaaattcacttgcagatggattaccattttgagactggggagcacgtagtggaggagaattcatatcaggtggcacctttacaataatatatccagatgatggatcgtaggtcgtggttagagctggcacttggctacgaaccgagttaggagtaactacatcctgaggaggatatggcatttgatggtttactggtgatgatggagatggaggtggcgcataatgctgtttctgaggtataatatgatgaggggacgataccgctggttgactttgacactcaggataatagtcgggaggtgttggcttcttagcaccagaatctgagttattctgaatatgatcaactgttaaattgccatgttttctcgtaaaaatactaacggtttcccactggatgggaaaaggcagacttagagatagttctgggggaggagcctggatatccttatgtggctgattatgttgctcttgtagcatatgttgcacagacggtagtgacaccatggtgtgctgttctggtggaatatagcttagatggtccctgtcttgcagtcttttagggatgtcagagatttcagtttgtggcggagcaatat

SEQ ID NO: 475695 - DNA, 1000 bp, Homo Sapiens
ttttttttttttttggtgcatgaaaacagaactcaattttatttcatgtttgaaagtaaacatgacaaaaataagaatcaatttttaactttccaaaatgctccatgaggtttgcatggctgagacagtcccctctgctctgaatggtttctgttgtcttgaggggaaaataatgctttggtctcttgctactcgtcaccatgttcctcacgtcctcttgctgctttctgtaacatttcagacttcctctttcgcttccttctttgtttcttcaaacccgttacaactctgttgtcctgcctttgtaaatcatcggccggttcgctcctccagaaaagagagcggcaataaatgggcagacataccaggataaggctgatcgcaccaagcccaaacatttgcatcatctgtttaggcacatctctaaatggagcaaaacatttgaagctcgtggtccccgatgatgaaaaacagcatttgtgtctcaaacattcactctcactaagatcttgcagctcattacaaggctttgccacctgattttccctcagattgcaagttgttggaaagaaaaaattcagcaaagcttccaatgcggaatcttcttccagagattggccatgagcattttcactgttgggcaggatatgtccatttgcaagcacaaaatatgaggacccggagcacaggtagtaggacaggtagtagcacacgaacagcaggatccaaatggagagcatgagcatcccaaagggtttgctgacccgcatctttagagattcccgccatcctggctgaggcctgtcagccatggcggcctcgtatccaggatggctgctctcgggattcgactcagttgccgccaactcataagttgccagctctaagtgagccacacgcatggcacggtgacttctcctattcctccccttcgctttcctcctatgtgaagacatggctccgggtgccgcctcgctgagacgctgcctcacagcccaac

SEQ ID NO: 475696 - DNA, 1000 bp, Homo Sapiens; identical to SEQ ID NO: 344257

SEQ ID NO: 475697 - DNA, 1000 bp, Homo Sapiens; identical to SEQ ID NO: 344258

SEQ ID NO: 475698 - DNA, 1000 bp, Homo Sapiens; identical to SEQ ID NO: 344260

SEQ ID NO: 475699 - DNA, 1000 bp, Homo Sapiens
gagatggagtctcactctattgccaagctggagtgcagtggtgcgatctcggctcactgcaacctctgcctcccgggttcaagcaattctcctgcctcagccttccgagtagttgggactacaggcacgcaccgtcacgcctggctaattttttgtattttggtagagacggggtttcaccatgttggccaggatggtctcaatctcctgacctcgtgatccacccgcctcagcctcccaaagcgctgggattacaggtgtgagccaccgcgcccggcccacagtacagttttacaaagaaaggtgtagctccaggaaaggaaaggaataacctttaccattgactgtgctgcaggactctagccctgatctgctctcttctgggagcatctgatagaacaaacagaaacccctctcccactgttctcctgtgtccagagtgggaggcataactgctttgcctccagtcatcatctgggggcatatctactcttcgaggaccaggggttcgggaccctggaacaggatctgaattccaagctgacctcaggggtacatgaagactgctagatggtgggtacacaggatgaacaatgggagggtgggagggtgaatggaaaagatcactccaggactgagtgtgaggaacctgaaggcccttgcttctttctggtagtgtggcagtgtaggttagttgaggattgcaccctggagtagtcaggaatctggtcccaatatgctggttggtctctgaccagggtgcccaggagttgtctgttctggagcgatgggggaggctctggtagttcaaagtccttcctgtgtacttggccccttgggaagtttcacccctgtcacacatagccagaaactgctggacactccttgaagttcctgggagtctattgggctcccctgccatggtgggcatcaggacatctggggacaggaactgtggttggggaaggtagagttggggaccgaggagaaacacagaagg

SEQ ID NO: 475700 - DNA, 1000 bp, Homo Sapiens
tttttttttttttttttgccaatgcactaaaagatgaataatacacttcaacccactattttggtttgaccacgggtttgttgttaaatatcattctgaaaacacagtgatttagttataatttaacttttggcccttcagtgaaatgtttacaaaataatatatatattacagaagggctttcttattaatgccatgaaaaaacctttctcactacatttacccttctcacaaaaacactaatgccataggaacactactttcaattatttatcccactgtattcagatacatagaaaaacataaaatatggagaaaacataatatgatgtatttgcatgtccagcttctttttaatggagaggctgatcatatatacatggagtgtgaaagggaaggagaaacaggtaattttcagttgcaaagaactggcttaatgcatcaagttttgttattctgctatagtagaataataaataaataaatatgtagggtatagtatagctactttctctgtgaagaagttgataacggactagtgttttatgaagttaatttttagtggcaaagtttgattgcaagccaaaaatgttcaataaaaatgttgttctctacttaatttatagtctttttcttgtgaaatgatcattgaagtagttactaacaggtaatgaaataaaataccaattttgctagtgaaaaatagttttcaactgagaaaagcacttggcagaagacctagaaacatgcaggctaatgctacactctattgcagcttcaaataagttgtttttgatgccttttgagaagaacaaactaagatgaaaataattccttgaacatttatcagcattgctgtttaggtacccattagaaagtgattaacattcgatacctaccctttccaaaacacaaaatcactggcaagcatcatcacacactcctaaaccagcaacatctgagaagcacaaaacaccttcccttttgtctaataacctgt

SEQ ID NO: 475701 - DNA, 1000 bp, Homo Sapiens
aattgtcaaacttttaaattttattaaaatgtttggagtaatgcacggaatgaattccagacctacataaatacactggcagctgttggtaatttgcatttttatcagttttgaaagagcacaatgtacttcctgcatcttattttcagaatttgcatttttatcatctttggctatccactacataacatggagtacttgagtatctcattctttgaattttcatttttgattgtaaatcagatgatgtctggcaattttttctcatttttctctctctcaacctccaggtttacttgctcccatttcttcttggctctggatatatcttttcactttttgaatatgtttttgaaaaaggaattcgttttcgccaggctgaatcattatatgatgttgacgtatatttgtctggactgaggttgggtttgggttccctgttagcatggactttattgtaggacccatgcgtgggcctgctgcgggaaggtgcattcaacgcgacagtcctgacagcatctctttgaacgtggatataggatgcattctccgcatttcgatttttattattgcggtgataactcattttattttggggtcttggggcctgtactgctctctgcattccagagttaggaaagttctgtggttcatcataaatccattttcttttcttcacacctttaaaatgaggcttcttcactggctggacatcattcattgaagaggggtcctctctgcacttcatactgatattctcagtagcatttaatacatgcgttgtaggtactagtcgggtagttagggaatgctttggatgaggactgtccttgttatctttagtatttgaacattttgatatggtgatttctttctcttcagttaaagcttcactttcatcgactccaagaaatatgaccctctgtggaacataacagtcacctcctccattttcaaaagcagcaatgtcagtctttggtttcccatgcaatgatgtttt

SEQ ID NO: 475702 - DNA, 1000 bp, Homo Sapiens
atggaaaaaagagatttatcagtcaatgtaaaatggttaaacaattgcacgtgctcttcttttgtgagttctgtacccaaaataactttgtttacaaaaagagaaatctaaggcaaatagcaattttatccattgaataatactaaccatctgcttgttttctgcagggatttggaaggcaggagtggtaggacttgtgatttcatcaagcatctataattcaccaattctacagcaatacaaattttggatcctttttccatatagaaatgtgatgtcttcaccctctcatggaatagcagggaggttgcagagcaggcctcagggatttgagttctcttttgcttttctagtagctggttgagggtggactagattactttaaaggttgagttgactgcttattgcttttgtgactcagatgtcttctttttcttagaccctgaggctcgattaggtctggttgaccgagacctgggctgtctatccaatctgcctccagcggtggatgtattgtgtggttcaatcagaggacagtaaggatgtgcagagacatagggattctggcaccaagggctgcgattagggaaaacggttggtgggatttccttctctctcttaagaagaacttgagcttgttccacctgataatttgagatatctttcttaggttgatcttgtttttctttagttattgtagctgtagatgctgtccactgaaacacacgctttcggaatgttggagatactactgaacatctgttaaattcaacgtcagcatctaatttttcccacgcttgcttccagtggataggggtgtaccacgcaatggcttgaccgttcggtttgcacaggattgttatacaatcaggacttgctctaaacttgtcttgttccttccaaagaaaatctgatggaggttgatgctttgcttcagatgctgctgcccacactgttactgtggaatttgcctgcattacgatgtttggaaggaatcggt

SEQ ID NO: 475703 - DNA, 1000 bp, Homo Sapiens
acagaacaaaacatttattctttcggttatgttgcaaaggtggccccatgcatgcacctcacatggttactttcttcctggatctgaagtcatccaccttctcaggcaggctgtctccgcgcacttccttactccgattctccttcaggatataattgtcgagaaccagctgccgaaggctgctgtggtccaggggctgttccacatcatccaacctgtcgctgaaggggtcagcccccagaactggggggatgactttgatgggttctgggggcttgaggagggcagagccaccccagaaagggttgatgaagggtggcgggatctcagcctctgccccttccacttccaggatgcgcctgtaggtctccaacagcagcaggtcgttggtcttcttttcaatgatggcaaaatactgcggaaggttgatgtcagtgactttccccgtctcccctaactgcaccaggatcttggtggcgtcacagtttatcttcttgaacagtttctccactgagttcttcaatagatccaaggtcttgctgacctccccgtacttgctctcatacatatctgcctcctccgtggtcttcctcagtttatcctccagctgtctcaggacagagtggttgtcatcgtgggacaatttctgctgggatcgcaagaggatgatctcgtcctggattcgttgggtcctcttgtgcatcatctccatgtcgttgttgagctccgtgacatacgtgaaccgagcaaaattcttctcctccttggccagaaaatcttcaatgagctggtttaggttcccactctcagccagcttcagcagccggaggtgggccacctcatagctctcaaaactctctcccctgttcttcttgacatgcttctttgccttgagagcttcctcccttttggcctgctcctcgaattcattgcgatcattcagcttgacgagcaggaaggacttgagcttgctctcatgggcatagagacgctccagctc

SEQ ID NO: 475704 - DNA, 1000 bp, Homo Sapiens; identical to SEQ ID NO: 344261

SEQ ID NO: 475705 - DNA, 1000 bp, Homo Sapiens; identical to SEQ ID NO: 344262

SEQ ID NO: 475706 - DNA, 1000 bp, Homo Sapiens; identical to SEQ ID NO: 344263

SEQ ID NO: 475707 - DNA, 1000 bp, Homo Sapiens; identical to SEQ ID NO: 344264

SEQ ID NO: 475708 - DNA, 1000 bp, Homo Sapiens
ttttttttttttttttcttttttttttttttttttttttttttttttttttttttttttttttttttttttttttttttttttttatgtatacatcactcaaattttattaaaggcagcacaatagcccgctcattttttgattcagaaataaactggacttccaattctaatgccaactcatcttatggaatgtcaacacaaaattttctcatgaatctaagttactgacttgtaactaaaccatctctcttaaaatagtaccgcagactgtcttttaaagtagctcatttttatttgatgcaatctaaaaggcccaaactctgaaagaaaataagaaactattgttaactattattaacaaagtaatatatcaaataattcactcaaactcctacttaagaaacgtgtcatcaccaataagatagtaaaggctcttctaatattgctttgttgagacaattcatttcatcttatggcaggttgtaccagtttcacagacatgagacaagtgggaagaaggaaaagcagggccacagcaaaaattcccagtgaccaccatgatctgtctgaatcacagtagaggtgaaacatacaaaattgaatacaggacaatcacagcacttcaacgagttttaccctaacacgtatacattaaaatgttggtttttataatgaatcctaatactgtaagattagcaataaatttataaacaatggtcccagaaattttaatgagcaaaaaccactgaacaattacaccccaagtctcaaaaatatcaaggaaatataatccacaaagagcgactccaaatgtcaaaatcaataaagaatagtctctgcagtgcattcattgaattcaaataattcaataagaaatttaatttaacttcattaccaactttctgaaaagcacacccagcaagtccttgattagggttctttacattcttctgctgcatctttagtctcctgctcatctgctattgtattctctggag

SEQ ID NO: 475709 - DNA, 1000 bp, Homo Sapiens
gggagaataatgtcagtttactgaatgaatacatggctcgagtccattcagggtggagtgaggcctggcaggtgccctcagcagtgggaccccaggccactggacctggcagggcttctgggctaagggagcagcaccaggccagcctgccaggggctccacagtcccacgctgcttgacctgtgctgtctgggactagactggtcgctgtggctgcccatagatgctcaagccagaccccaaaagagagtggcacaaggtgaaaatctaactgtgaacgctttggtttcagtttcagtaaagaggaggagggagggaggcacttggggacgtagaaagaagggctggcgggagaggtctccgccgagctccacagttggcttccttgctagacgacctggctttgagaaatgctgccttcatttccatctcccaactccgaattttcattttcctctgttctgggttgtgggtaatttcttgacaacctctctctttccacctggttgtggttgagcctcatgagttctgcaaacctctgctcatagaggtgaagcagcagcaccaggtacaagcctgaattcatcagctcgttttgtgcctgagattgctggtgcttctggtagaactcaatcatgttaaagtcacccaggtcaaccagcaggccttgcttacacatctcacaggtcttcacggcaccaagatctgctcctgatgttattttcactttcagccactttttcaggcactcttgatgaacaaactgcaggcttcccacacagccgcaaggctccaggagggggttgcttggggaacccccggctatctgacagatgcgacacaagtctccctcctcctcggagtcctcctccaggagactttcttgcaatttcttgagtttctcagggtctgcctttatcttactggtttccttttcatctgtgaaaccagaggctgccatcctgctcccattatcattttgatttgggaaatgagacac

SEQ ID NO: 475710 - DNA, 1000 bp, Homo Sapiens
ttttttttttttttttcttttttttttttttttttttttttttttaaaagttaaatctccttttacttcaaaagtaaagaaaatcatgcaatgagatgatcctgttgggccttcagcacagacccatcctctcttccccggctcccagcagtccagggcaggtttctgtcctcagcaggctgagttttgttcagtccattcgttccttgctggatcagcacactctggatttctcagccctttcagtctgagtgttcctccctcatggccttcacaagccagtcctgttctgtcccctgctcagagtcactggtgtcactcacctccatggacagcagcttcgagtacttgattttccgctctcggggcagcctccgctgtatggacaggagcaaggccaaccagagcaacagggccacacagcaggcctggtagagcacagccaggctgaagcgcatcaccacgaagcccccgacaaagctgcccaggctacagccactcccgtaaaagtggcctcggaacaaggcactcagagccctctccatgcggggagtggccaggtcctctactgaggcccccacagcccaccacaaagctctgttgctaatggcactcaagatctgaatggggaggacggaccaccagctccagaggaaagagtagtacagcagctgcccagcgaggcagctcagccccagccccaccaggcccgtcctggacagtttcctaagcaatgtagctttgaacggatgaagcagaatttcccccagcaagctgagggcgaccgagaaacccatgaccagctcgccgctcccatggtccttcatgtgccagaacagaaagttctggacagtactgacgatggctcctaccaaaacagtggtggaggcgaggagaatgaggtgggggtcaccccccacaatggacagtgctttgacccttttgtagctgggctcccactgctgacagatgggaatgggaaaggcaatgctcaccagta

SEQ ID NO: 475711 - DNA, 1000 bp, Homo Sapiens
cacgaactcacatttattcacagacagacaaagggacaaggacagacctttgctcactggggacccccagggtctggcagttccaaagaggtgatggtgtccagtgtgtgaaacgggggacagggaggcgggggcgtccccaccagtctccatccctctggccaactgtccgccgcctttttttccaagtcgtcctgccttaagacacatgttggggtgagcggttcctaaccagcatcaggggttctgggggcgggcgatgggggaggaaggggcagtccagggccccccactccttagtgtcaagggcgtgaaggggacgggtgggtagacagaggaggtggctccttcaacttccctcctccattctgcaaaccggggagctcaggcggagcggcggagggcagggcggcgaaggtcaggaggccaggccccccagcccgcgcaggtgagccttgctgtctacctcttcctcctccatctcgaaggctgagtggtcttggctgtcgaaacaggaggcgctgaggaagacagggggagccggcggggactggggtggggtccccggagagggcggctcttccttaatgtttgcgaggggcagcgggagcccttcttcctcctgctcggccttcaggggcggcgggggcggtggcggcgacgtcggggcctgggcctgcagtgcctgcagcgcggcggccctctccagctctgcgcggtggcagcgctggtggcgcaggaggctgtaggcgcgcgagaagcggcgcgggcagcgggggcacgggtgcggggctgggccccccgcgtgcacctgtgcgtggcgcgccaggtcggccaggcgcttgaactcccgctggcagcgcacgcactggaaggggcgcgctcccgagtgggtcaccccgtgctgccgcaggtgcgcccggcgcctgaaacctttgccgcactctgggcaccagaagcggggctccccggcggggggccgagccggggcggcgtcgcc

SEQ ID NO: 475712 - DNA, 1000 bp, Homo Sapiens
aaaaaaaaaaaaaaaaaaaggaaataggacaactgaaaactttgccatattgcttatatacatagggttactctccactatgaactctttcatgtattcgaaaggaacgggaacacttgaaggctttaccacattgttgacatgcatagggtttctctccagtgtgagttcgttcatggattcgaaaggaacgtgagcaactgaaggctttgtcacattgtttacattcatagggtttcactccagtgtgagtcctttcatgcattcgaacagaactagaacaactgaaggccttaccacattgtttacactcataaggtttctctccagtgtgagtcctttcatgtattcgaatggaactggaacaactaaacgccttaccacactgtttacattcatagggtttctccccagtgtgagtcctttcatgcattcgaaaggaactggaacaactgaaggctttaccacattgtttacattcatagggtttctctccagtgtgagtcctttcatgcatccgaaaggaactagaaaaactaaaggctttaccacactgtttacattcatagggtttctctccagtgtgaattctttcatgcattcgaaaggaactggaacaactgaaggctttaccacactgtttacattcatagggtttctctccagtgtgagtcctttcatgtattcgaacagaactggaacaactgaaggctttaccacattgtttacattcatggggtttctctccagtgtgagttctttcatgcattcgaaaggaactggaacaactgaaggctttaccacactgtttacattcatagggtttctctccagtgtgagttcgttcatggatttgaaaagaactaggacaatcaaaggctttcccacattccttgcatttataaggtccatttccagtgtgcattatcatatgtcttcgatagcttggaagagaaatgaatgctttcccacattccttacaatcatagggtttctctcc

SEQ ID NO: 475713 - DNA, 1000 bp, Homo Sapiens; identical to SEQ ID NO: 344265

SEQ ID NO: 475714 - DNA, 1000 bp, Homo Sapiens; identical to SEQ ID NO: 344266

SEQ ID NO: 475715 - DNA, 1000 bp, Homo Sapiens; identical to SEQ ID NO: 344267

SEQ ID NO: 475716 - DNA, 1000 bp, Homo Sapiens; identical to SEQ ID NO: 344268

SEQ ID NO: 475717 - DNA, 1000 bp, Homo Sapiens; identical to SEQ ID NO: 344269

SEQ ID NO: 475718 - DNA, 1000 bp, Homo Sapiens; identical to SEQ ID NO: 246591

SEQ ID NO: 475719 - DNA, 1000 bp, Homo Sapiens; identical to SEQ ID NO: 160852

SEQ ID NO: 475720 - DNA, 1000 bp, Homo Sapiens
tttttttttttttttttttttttttttttttttttttttttttttttttttttttttttttcaggacagcaaacctgtgtcccagcaacacaggctttatttctatttctttcactggctcccttgagagtctcagcagagctcctcgtgggcattcagcctgtggtgactcctgctcttggcaggggctggtgtgatgtgcagcaactctgacagagcagggaatcgagtggctagtggggacttcatggtgggtcaccgtggcccacgtccacggagtggctgaccgaggcctcctctccaggctctgggaggctctagactccatcctcatccttgtcctcatcctggtcttcatccttgaactcatcctcatcttcatcttcaatctcggctttatcacggccctcattgtccatgtccttggacttggggggactggaacccatgccggtgcaggcagacatgtagagcttgggctccaaagggctgagctgccggctggctggcaagttggtgtagagggagcggcagggctctgtggcctggtcctgggcagtgtgggtggctggttcctgctgcacagagggtgtctctgtgctgcagtgggaggtgctgagccgggaggcctgccgggcccttttggactcctccagtttacgcagcaggcagctccggtgggtctccgaggacaggtggatgcgggagccttttaccttctttaagcccagggaaaggtccctgagcacgtgggtgatggggaaggagaagaagcccagctgcttactgaggtccttttcgaactcgtacttgcggatgaccaaggaggctgcctgctgggtcaggaagtcggcgagctcctcataaaggcggttggagaagtgagacatgctggacttcgacgagatggagggcagcggcttcttcttcgtgaacctgctgctgctgcaggggctcttgagtttgaatctggtggccacctgggcactagacatggagg

SEQ ID NO: 475721 - DNA, 1000 bp, Homo Sapiens
ttttttttttttttttttttttttttttttttttagaaataaatgctcactggtgatttattgcatgggctgggggaaccgtccagagcaagaatgggcaagggagcagggcgtgagggtcccagggatctctggaggccactgaaccagcccttcgggggtccctgtgcagggctctaatcatagttggggtcagcctgggcctggcgtggggtgaggtggctggtcaggtagcgcatggctgagcggatgccctccacggtcctctgctccactgtctccagcacacgggtgatggtgcgcagggctgagctggtccctgacaccagcccagaggagaaggccgagctgacgcttcccaccaggctggggaccgagcgcaagctgggccccgagctgtgcagcaggtctgccacagtgctgtggccggaatccaggaagcctgtggctatggccatgcccatggtggtctcggaccacaccaggatgtctgccagggagctgatggagccctcgcccctgtccagcaggctggtcatggagcgcatgtagctgttctcctcactggccgtgtacaggctggggtccaggggccttctccccagggccacctcgtgggggccaggcgacggggacacactgcctgctggaggtggagggaagaaccaagtctgcaggtctcctaagctgtccaccacatttgcccccattgccactggggactcatcagatggtaaagcttcagcttcagggtgtggggcctttggatgctcagctttctcctcagcagacttggtggtgctggcagcctgagggccatgctggccattggcacctgctgtgacatggtcagcatcactctcgacgggctgagcctccatgtgctgggtggactgtagctcagcactcggggcagagggggctgactccggctctctctcaggaacactcgccatttgtgacatcttgtctttacccaggaggtgacttgggaaaacca

SEQ ID NO: 475722 - DNA, 1000 bp, Homo Sapiens
aattgggggtaattttttaatattagataacaatgcgatacatttttacctgaaatgtaaacaggtaaaatctgttatgatttgttccataacagagttaatattctgtgattcagtcatttcagctgaactattgacaagttttccttaataaggcaaaatccccaactgtgatagatgcataacggtagccgctccacttaagcagtacagtttaacccgccaccattcgatgtcttaacatgttccaagaagaacaatgtcatcttggttttaaggtgatgcatcttgtttttttctgatagaaaaagaataatgtgctttttattctcctagagatttggtgtctgtgaatggttgtagctctgtgacatttaccatacatttctcagcttccacccatcaatttgctgagaaaaaaaggtatgctacaaatcgcagcaatagagcactttaaaaaggtaattttcagcattttggcacctaaaagggaaactttcatctgcttacacaggccagaagcaaagacaaagattgcatgttgttcttacagatgacttaaatcatctctttgatgataaaaatatttttaagccgtgaaagttatgagatattctgggtaagcctgattatcaaagaataccacaaatagctttggagatcgtgtattgtttgtcactgagtcaaagagatctgtgggattgtgaggattcttgggtggaggggtgactaatcctgcacgtccctttgtgaagactccagtaagtactcgcacaacgtacatgtgctttctcccattgctgtctggcttggagtaggtgtccttggcagaataactggcatccacagcaaaataggttccttttccataggatacagcatttttcccagcacaacttctattaaagccgtgctgattgacatatggcactgagtctgcatctgtcccatggaagaggagtctctcattattcttatggtcattcttgatatccatttg

SEQ ID NO: 475723 - DNA, 1000 bp, Homo Sapiens
caggtatttccttttattagctcttacaagattcctgttggaaagctgagaggtcatggaaacatttgtctacaacctccttgaagaatgtggtgagaaaaatatacatacatatatgtgtgtgtatatgtctactttgtgatgagtctgaggttgtttcctgctctgaaggggctcagaagtgcttctggagggcagactggatattcttcagcaggccccacttagctcggttcttcccatgtccatctggtgttaccaccttgcagatatcactccattgcccaggaccattatcattgatggctctaactttaaacacgtattctgtgttgggggtcaggttgtgcagctccagattttgctgcattatgtcccgaatttgtccacagagctccatttgtacgttgttaggaggagaagtaatgacttcatagaattccatctcaaaagagtccacgtcttctgctggacatgtccagtaaaccttggcagctcttgggtacaccagagtctggtagataacaattgggcctggggtcttcacagagccatcgttgaatgagtaccagttgtggaagctgctgctgttctgtacagactggctgtctgctccagcactccagtaggtgtagaggccgtctgtgggtttggcgggggtggctgactgggctctcccacaggcctccagacccaccttggccttcttgtcagtgttgctgaaggacaacatggaggagcttcgctggtatatgtgctggttgccgaggctgtgggtgctgaaagtgaccttcctggcaatcattgtttctgagtgcacggggtagggggagggcagggagtcccctgaggagcgtaccttcttgggccctgtggggaagagctcatggatggcactggaaagctcaacaaagtccaagggcacgtagtttattgagtgcagccggagctgtgggtcaggcctgtaggtggtctggatgccgtcctcgatctggtccac

SEQ ID NO: 475724 - DNA, 1000 bp, Homo Sapiens; identical to SEQ ID NO: 344272

SEQ ID NO: 475725 - DNA, 1000 bp, Homo Sapiens
tttttttttttttttttacgtcagtcaaagctccctttattgggtcataaagtataataaattgtccttcactacattctggctgcctaataaaaagacctattggtcctcccttggaacttagagttgattgagtcaagaccttgggggacaggactgaggttaatactgcaggttggcttcatcctgctgctgtgtctgataatagcctgcattaattgctatatgagaccaaatgaacaaatttggtactgactaaacaacccgactgtcaggttaatcagagtagctgatagagtggcatactcatgtgaaaattcaagtttggccaagaacatctcaggctgaggagcagactgttggaagagactatccactatgggctctgagtgtccctgcatacttactgggtatgtcaagaatgcaaggactttgtctttacctagtccatgtcctaggcttgtgtttacactaagctatcttcaagtatggggtaataactccctttggacaaagaccaggatttttttgcttactataaaagcagttaataacccaagcttacaacataacccactgtgtgcaggctttcatcatgggccctttgtgttcctcctgtgggaactagaaaaatgaggaactgaataaaaccaacatgaagctctggctacagcttttgctgtgagcgataagtcctttgtttctgacccaggtgtcttatgcattctgtagcatcccacgaaacagtaacaggctaacttgttagcttataagtagggtaaaatctcagaccatgcacagttattgacagacatcaactattttcttcttggcaatagctggcattttaggcaccatgacttggctatcaatatatttattattagcatgacatattatgaaaaattattttccaaagacttagccagtaacactacaaaaatagaaagcccgttaattcctgtgaatttatctgtgtgtgtccatgtccagtaattat

SEQ ID NO: 475726 - DNA, 1000 bp, Homo Sapiens; identical to SEQ ID NO: 160853

SEQ ID NO: 475727 - DNA, 1000 bp, Homo Sapiens
ttttttttttttttttgtagatgtccagatattttatttaaaatattaacacattcttctgaccttgggctgaaaaatatcctgaaaaaattctgaagtagagggttttggtggagaaagaataaagaaaggaggaatatgttctttggcacctctttaacaagctcattagtaaagtcccggggtgggggcttgtcaccaatgaatgaagagctgcaagagaatgtatctttctcaggatgaagaagaaaaccagtcaaagggcaatactttgttcatctttctaatcgtttacacaaaatttggtccatttcttcatttaccagtcagttctcctaaaataaaaaacaaaactatacctttggttacagcgttaactcttttggtgtaagagctgatgcctttgttttgctcctcaggtcgatttctcattgtcttcaccaatcttctgaacccgtgaatactttttgcatgatgatttgaagcagccaggaggccaagacagcggccaggagaagcagcaaggaattgagccttgtacatttttctcaaaaaaataaaagatggggaaccaccatgctcgagataagaaattagtctgtgaagagaccttcaagttcttttcattggccattgaatggtaccaccaaaacagtcgtgttgtgatataataagcaatgatcacatcgatagtgtagtgttcgtgtgctacaagaatgcagatgatcccggcagcactcagcagccagcagattaaatgataccaccagaagtgacgaggcgaatattctttgatgaacaaataagtcagtgtcagcgtaaccgtgtgaccgctgaagaggaagtctccacataagatatgtgatccagttatggacaatccaccaccagaaatcaatcgtagaatccgttgaacttttgcctgagagtctccattgagctttggagcacactggaaatgcattccaggcacaggtagagtagtaacatacattgtaat

SEQ ID NO: 475728 - DNA, 1000 bp, Homo Sapiens
aaacagctataatagtataataataccaaatagatgatacaggctaatgccaagaactcaaacccaggtaacatcatttcaaaacacttcctggagaggttaggacttgtgtgggtgtgtaaaggaaaaggagagagaagcaagaattcagattagaagaaaagctccaataaggcaagaaatcacaagacttagccaaagtcttaatataggagatgaatgtgaattaacatccaaaagacagaacagcgaactgatcaagtttgaaggaaccttagcagtgatcaaattcctatccttgcagatgttgcaacacatccaaggttacagggtgtatttatggcagagccaaggcaaaaaaagatctcctaacttcaagtcctgggctgaggactccagaggttgaggtcaaaggtgtttggtaataggttgtccttgagagttgatgagcaggggactgagaggatcagcacaggacttttagatgttcaacctagcagtggtgtggagtcaagaggatcagttctaagacaattacagcagactggctgtcaggcacacaggatgtgactaggtgaagcaaaagaaaagagagcaaagggtgaactgaggaagcacagagcagaataatcaggaggttccctgagtgggagaccaggataaggatgagaccatcaggaggggaaagggattcctacagaactgatttttagagagagcaatatgcatgcttaacatactgcctagcatatagtgagattttagtaagtgtttttcaagtgaatgagttgtgttttcaatgtgttgagattgagctaaagacaggaaagtatctcaaaagggaactatcctgaggcaatcagaaatatgaggtttggagctggggagaaaagtcatacgggaaagaagtagaaatctttgctatagatgttattctgaataaagtagtgaaaatgaatctctagaaaggggtaagaatgggaggaagaagaggaggggg

SEQ ID NO: 475729 - DNA, 1000 bp, Homo Sapiens; identical to SEQ ID NO: 344275

SEQ ID NO: 475730 - DNA, 1000 bp, Homo Sapiens
gcaattagaaatttaccatgtattgcatatgaatcaaaggaaagtagaatttctaaaagcacctcagcatcagcttacaattagatatctggaagaatactcacagtttattatactggcaatgcataaaacgccactgatgaagaccctgcacatgtgtgaagggtatcaagggccccgtgaatgacctgagaaggctttccattacctacatccctgctcatttagtctaagccatttgtagagattggtactattcgccagtctccagaaaatgacagttcatacagaaagctatatttgaactgcctcgttctcattttccaaatgtaattttaaaactgtccacttagatacctaaaagcactgcttgtttttccattttcctctccagtaattctttcaaactctcatctctgtgcttgaagtataagtaatcagaaaaagaggggccccgccgggtactctgaaaagccctgagactgagacactcatctctgccggcacagtctctctcctggccgccctctgccccaaggtcacccttgctcctcttctcccattctcccttggatgcatcctccttctcctccttgcaggcttcctccagcacctcgggggcgtgctccgacttggtggacagatcctcgggtgtgcagagctgctggctctggggggccaggccagggctgtagggctccacctcgtagcagttatcctcctcttcctcctcgtggcagtggctgccctgggcactctccccgtctgactggaacaccggcaccttggcccggcgcttctgagagaggtcaaagggctcctcctgctccagactcctcaggacaccggctgtctgtgccagggcgattctcccccttcccagaccttgggaatgaaggccccgctccatgactccatgcttgactttcatgtggcgtgtcaggttccccttcagggtgaatttgcttgggcaatagaggcacttgaagggtttgctgtc

SEQ ID NO: 475731 - DNA, 1000 bp, Homo Sapiens; identical to SEQ ID NO: 344276

SEQ ID NO: 475732 - DNA, 1000 bp, Homo Sapiens
ggaattattttgtatttattatataattaggtatacaacccagttagaacattagaatattgtactttttctaattacactatacagattcctctgatcatctcccttattgtggtcttaattctatacataattacattaattaccatgagagaaatgaagctagataaggaaaaaccttgtgagaaagtatacatatttttaaagctaagagaattataaggtatctgatatcaggtgcagagccttattgctttccaaattaaaacattccaaatagcatgttgattattgaactgccttcagtactctaaggacagaataaaattataacaatggtcaagcagagaacagggcagcgtttcactttgagtacatccatattggtaggctcagacttatgtgaggaaagagatcagtatttcatcacctccttgctctagttctgtgtggatagatcagagaacccaggtttctttttcagtgattccatttctcagagccctattctcctccgttgaagagtcacatctttagaaatcgatccaaaatatctttatgatattttatgagactttcatttatgtaaattcaaaacacataaaagacttcatgaagccatataaagatctattttagagaaaaaatagaatgagttttatatgagttgatttgaatttgccacttgtcatttatgagacattaaaaacaaactctatactgtcatgacgaagtgcaaaaataaaataaaaactaactctataacttggttctttttttttttctaatcttgagatttccatagagtgctgtggtataataccttgatgaatacagtccatgttaatgccaaaaaaatgggaagaggtcaaatttcctccactgatggtaggtagcccacctgaatccccaagttctttcactgtcttgagatagcctccaaggatattttaaaatatgagagctttcttcagagatcttcttcctttatgttcccaaa

SEQ ID NO: 475733 - DNA, 1000 bp, Homo Sapiens
ttttttttttttttttggcatataaaaccttatttttctattgaagagaaacactgagaagcaactggttagcatgtggctaagagaaaagggaaacccagggagtttctaagagttgagaccacactatgctttggacatggatttcccttgttgtgcctggttttgcatcaggagcagcaagggtgaggattaggtgaggcaggtcactatgcctctcgtaattgaggtctttttccctgtttggagttttcaggtagagtcatccccaaactacattttcatatgcacatcatttcactggggtcctttaagggttgacagccaggaagtaacaggtatccaggagagtgaggctctaaattccctttgaaaagacagtcctcctggtcacatagtccaggaaaaccagagagaaaaaggagcaactgtaatgattcctgcaaagctagctctgccattcagtcctgccttctgaaagaacatcagtaactctgcagggcccgctgattgggctgacatccttcctcaagcagtctgtgagagtacgaaaacaaaaggtggcaagcaacatcaaggtcctgggtgtgcaggagtggccaagagagcttttagccttcggtgtagacagaggagagctggctaggacagcggtccacggtgctgatctgcaagaaggtagcatcttcagccccgctgcggagagactccccaaagaggctcgaggaacttgaaggtaaatcatacactgtaatgcccgagtgagtcgagaaggctctgtggaaaacatcaaaactggcctggcccatggatgtagggactaggcagtcctcaaacgaaggcaccacactgcaggagctgacaggcggcacaattctctgggaatcggggtagtgtgggggacagaacttctgcagctgcccataaaatccatggacatggataccatttggttgaaaagaagagtttgtttctggctgataggacttcaggtgtgaac

SEQ ID NO: 475734 - DNA, 1000 bp, Homo Sapiens
gagaaccactgctgtttattttgtgcatcatcaaaactaaagtttctactacagtaagcctcggtgtttatttttacaaaggaggcatatagcaagtagaaccaaaatcttatatggtggtgaaaacatattttaaaatatgatcaaattgaaattataattataaattactcagtttctgtgcagcaaagtctgatttcaactgaacctcagctactttcaaagttatttctctgtaaagggcaccactcacttttaggttcgtttgcaacattttcttcttttctctctgaagttcttttctgtagggatggatattttcccttctgtctgataaagcagccgcgacgacactactctttcctttgctcacttcacacctctgcataaaattgctttcatgtttagctatggcagaagaaagagaactaagggtgactagttccttctccaaagtaaatgccatattatcaattaggaaattctcacttcctgattttagatttttgaggaaacagtttatagggagaattctgatgagattatgaaggcactggaacataactgtttgattcctggaatagattattaaaatcccttcgaatggtgttctctgtttccaagtgaagagtgtcccatagaaacttcccggtctttcacaaaagtacacttctggaaattctttgattatttcacatttcatatgttctaagagccacaccttcattgaattcagggcatagccgggtgatgtgatttgaaaacaagatttatggaatgctgcaagaagtgcaaaaagatcttccatgtgctctataggtttcttctttggaaatgtcagtaggtacttcccagttgaaagatcttctagacttaaaaaaactctgccacacacaacataacgatctttaggacagttaccactttctctctccataatttgtagcagtacagtgcaacaaaatttactgaatgttaaaagtggtgaaagagatgttac

SEQ ID NO: 475735 - DNA, 1000 bp, Homo Sapiens; identical to SEQ ID NO: 344278

SEQ ID NO: 475736 - DNA, 1000 bp, Homo Sapiens; identical to SEQ ID NO: 344279

SEQ ID NO: 475737 - DNA, 1000 bp, Homo Sapiens; identical to SEQ ID NO: 344280

SEQ ID NO: 475738 - DNA, 1000 bp, Homo Sapiens
ttttttttttttttttactttaatactttttattatttaatagctcaagcttatcaccttgaaaattgtaatatatcagtaacaaccaacattcaggtaagacatcaccacacattcttctcttcaacaaataaatgctaacttgtggttcaaagtcaaaagatttaatttctgagaaggcatgtttaaattcatcatctagggatattctggaaatatgctatggatggaacttttatcaactgtccaggaagaaatgtattattacttcctaaaaatgtttgaacaaaagctattactttgaatgatgtattctccataggtaattgctgtttagacatcagaaactagctcacacagactcacacttacacatctttgttttactcttctttataacaaagacaaattcaaaaacaaaataagatattccacccccaaaaggtagataatctttttatctaaaaaaaaaaatccattctggaaaactatttttatggctcctcagaacttaggataaagactatatccaataacgaggcttcaaaacctaagccatgttccactgtttgcagttaccttggactttaactagatgtgcaagttgacttctgaccatggggaatcctctccatgactggattatggattgttgaggccatggcagataaccagttccacagaagcaacttcatgttcttctgaggaagatccatagcactgtggaacaaggaatatcaataagcgatgacacaagagcctgcaaatgaggttaacaaaatataaccctcaaaaatgaactctgatggtggaaaaatctatgaggaaaaatattgttgaaaaaatacagggattgaaaatggcttcagttatgttaagagcactggtgaacatttagtagcgttagaatgtgcttcttacgcatgtaataaactatctcttgattccaagctcattaagtggccaagttgtataaatttgtttcaaaaacaaacgcttt

SEQ ID NO: 475739 - DNA, 1000 bp, Homo Sapiens; identical to SEQ ID NO: 160854

SEQ ID NO: 475740 - DNA, 1000 bp, Homo Sapiens; identical to SEQ ID NO: 160855

SEQ ID NO: 475741 - DNA, 1000 bp, Homo Sapiens
aagacaacagtaatttatttagctcctgattgtgtgaatgggcaatttgggctgggatctgcttgagtggttcttctggtcttgattggcctcattcatgtgttagctgccatgttggttgggctagtatgacttcagctaggaaagcatgtttctgcttcatgtggtctctcattctccagcatgctcactcaacatgttcatggctgggtaaggttccaacagacatttataaggcctcttgaaacctaggcttggaactggcatacagtcacttcttccacattctattgatcaaatcaagtcacagtgccagcccagattcaaatggtggggaaagagacttcatttatggaagggaggagctgcaaatttcattgccaagaggtgtggatacccagaaagatacatttgacaaaccatctatcaaagttactgtcagaggtatgtttttggaaatatcatttggagtgggatgtgtcctgtatgactggaatcgttttctatttgtaacagagaagcgtgccactccttgctcccatagataacccaatgccgaaggatatgagagagagagatgtccagtttgtgcctctcccagcttcttgtccagggatccttggtttagattttgatacactacttagaaaaggtggagagtttctttaagatttcatccacagagggccgcacagagggatcatgggcccggcactcatcaatgatctcccgcagctctgaagggcagtcttcacccagtggctcctgctgccgcttcacagccaccagcttgcggatcttctcagaattacagccttgaaacgggatatctccagtggcgatttcccagaggacgattccaaagctgtatatttcagactttacatcatattgataaaatacatcttccagttcctgaggtgagagatatgctgtagatttgactctgtctgtcttttctctcgtagttcccaaactcatggaagtctgtgttttcctc

SEQ ID NO: 475742 - DNA, 1000 bp, Homo Sapiens; identical to SEQ ID NO: 344283

SEQ ID NO: 475743 - DNA, 1000 bp, Homo Sapiens; identical to SEQ ID NO: 344284

SEQ ID NO: 475744 - DNA, 1000 bp, Homo Sapiens; identical to SEQ ID NO: 344285

SEQ ID NO: 475745 - DNA, 1000 bp, Homo Sapiens; identical to SEQ ID NO: 344286

SEQ ID NO: 475746 - DNA, 1000 bp, Homo Sapiens; identical to SEQ ID NO: 344287

SEQ ID NO: 475747 - DNA, 1000 bp, Homo Sapiens
catgtctgcagtgttcttgtttatttgtttactagttcatcgtctactcaagtagaatgagcaccatgagggcagggattttctcagctgtgtccaccatggtatcatgaactcagtaccaggcttggcaaaaagcgtgggactccttagaaccaggtatgattctcccaaacaacccttgctctgctctgaggctgtcgtactgatttgcaaagatctgagccgggggtggcagaagcctggtacccaggggattgggggctgatgagagacttgggcccaggtcacccctaaggttcaagagatccctaggagtggggtggtagaacccaggcccttgagggaggcactgctactacccaggcgtgggcggtggggctgggccaagcccacgtataatgtctttcctcctccatcttctatcttttgtccctcgacattgtctgtcttgatccttatgcactggggatccgagtgtccaggagctccggcttggcatccactgtggcaggtgcagggtcctgggcaaggaccatggctatgtcaggccctccacagatgatggtgaaggtttgggattcctcaggtccaagggtctgggctgttgtcaggcgctgcagaccccggcgtgcccgtgccagcaggctctccccgtgtagctgctgtgccagccgttccagggcctgcagctgcgcctggtgccgctcctggcaccgttgcagcctccgcacccggcgttgcagtgctcccagcactgggcccagcccggtctgggcctgttgggcagggacttcaggttgtgaccgctcaggagttggcgcaggggccaggggggtcaggagcatggtggccacagtcttggggctccccgatgtggggcccagcaccactaggcgcactgggccagagactgggatggcagggctctggggcaggggtgtattcttctgtaggggaggcggcggcgagactggcttctgggtgcttcgggtcctccgct

SEQ ID NO: 475748 - DNA, 1000 bp, Homo Sapiens; identical to SEQ ID NO: 344288

SEQ ID NO: 475749 - DNA, 1000 bp, Homo Sapiens
gtgaaaaactactttattcccaaaatgcagacttgatagcttgctggatattagcaggtggctacataatttttctgagcttgagagaaaggatacatattgctgactgtgattttttttaaataccaattcggtaggggaaaaaaggattcagttgaaaggtgaaaatgaaagactgctatttccacttagtatccattctgaaaaatttgtatgttttcaaaagatgttatcatagttagaagtaatgttgaggtgaatacagaaaatgctatataataggaacattttgtgagaagagaaaatgataccaaataaaacttatggtataagaagaaaatgagcaagacagaaaaggatatttttcaagggtgttgaaggctggcatgagatgtaagctattcatgcttagctgactgtgtaggtcttggagacgatttacaagaataaacacttggttttatcagtctcttctccaaggcaaaatcctcaccttcctctctaaatcaacagttctcagaatggtgttaaagagcccacctcatgctaagcttcctaacaactgaccgggtaggtcagcagaaaaagttctaaaactagaaaggagcaggaatgaaagtcttaaaatttgtatgcaaacgtaaaaactaacttctacgccagaatgacattctctgtcagaggtaacaaatacaaaagtcttaattttagtgtacacgacgctaagatattgttagataggtattatgtgttgttcagagaatattttttataagtgtgctttttccctaaaaaaagagacatattaaagtgttttttctctcctcaagtcctttatgtataaatatgaaatacagagctgtcctgtcagtttcttcatcatgttatacgttccggggatcctttccgcctgtgtcgtctgtggcagttttgttggagaggggtttgagtttgaacaggcttgagcagttcggctgtttggttggctgtaaggttttgg

SEQ ID NO: 475750 - DNA, 1000 bp, Homo Sapiens; identical to SEQ ID NO: 344291

SEQ ID NO: 475751 - DNA, 1000 bp, Homo Sapiens
ctgggccacactgagtgaattttaatgcaggatggaagcacacagatgggtgatcaggtctctctttactgaaacacagaacatgtgccaaggtgagtccaaggacacctctgggaacaggtgaagcccctccccatacatacactccggtggatgtgagcgagggtcctgttgccacatctggggttaggggcttggacatgctgcccttcatgggaaccttctgggtacctctcagcacagtaacgcagctgcagtctgtcggtgggggcccaggctaggggcagcaccctcttttggcatacgggacatgcctggctgcagctgatgtccgttagcctctcctgacacgcagtaaggagacctggaagtgaggcgcgtgggcgtggagttcccggtggagctgctgcatcagcctttctgccactctggggtcagtgaggtcttccggggaagccacactcagccgcaggaggaggaaacctccattttcacctgcactcacgtctgtggtcggcctcgtccgggcagtcgtgggcgtggctgttgggggcttcatcgtggtcttcgctgaggttgtgatcttggctaaggtgctgttcgtccctcggctgctgttggttgtagtcggagggacagaaggaagagggtccctgctggtggggaagggccccttggttgcgatgtccatggtcggtgtctctgaaggggtgaagttcttgagggcggcttccgaggggctgtaggaggaagcagagctcccagcaaaggaagttgttttgcccactgctgacccagcctctatggagaccggagctgctcctgagactttgacgtaacttggtgtctcaacagagagggctgaggacagggtctcggcagaggctgtgacctcagtgatgtgtggttttgcttcagtggagtcaggcagagctggtggatcggaggtggacgaggccttcaccccttccgtggggatgagatctatgtctgaggcccc

SEQ ID NO: 475752 - DNA, 1000 bp, Homo Sapiens; identical to SEQ ID NO: 344294

SEQ ID NO: 475753 - DNA, 1000 bp, Homo Sapiens
tttttttttttttttgcagatttgctttattttaattttcaacaccaagaacaaagccagtcaaaaataaacaactaaataacaacaataatttgccacctactgctaatattcagtcccaaaccaatggttgatttttgcgatactaagataaaggaccaggttgacaataaggtattcttcggtctctctgatccacaccagctccacgtgcactcttccttccgcatcaacgtagtccacgttgtatgtctgtcccaagaagctagagctgtcagagggtgtggcaggcgatctcaggcacaccggggaactgaaacaccaaaagggtttcccatgttcatccaaaagagttacgtccatcatggaacaactctttatacagccatcaaaaatatcagttttccacgagaggccaacttttccaataagaggtaggtgttctctgttattttttaaatgtataacaatgagcttcacatgtccattttcaatatttcctctcttggtgaagagattgcgaaatgtaccacataggtagaaaaccccaccgctgtgcagatcaacatggagttggtagccgtgcagtccatactcggggctatcatccaaaaaggggctatgtggaggcagttcataggggatagtagccgagcctaatgtgctcctctccacaaggtgatgaaaatgaagatttgccataacaaaagccagttcttcctccttcttccacactcccaccaggaggccagggtgcaggcagaagatccgaatgagtctgtcacagccaatcatggtagatatggtcaaatgactcagattgtactttgcaattaaagaatgccatcggagtctatgtttggtgggagttttataccagtcggtaaaaactggtgtcatgccacataaatctaaggttgacaatgatgctaggcatggccattttttgccataccatataacagtaactgatgtgtcatttatggaaagatcaacatgc

SEQ ID NO: 475754 - DNA, 1000 bp, Homo Sapiens; identical to SEQ ID NO: 344295

SEQ ID NO: 475755 - DNA, 1000 bp, Homo Sapiens; identical to SEQ ID NO: 344296

SEQ ID NO: 475756 - DNA, 1000 bp, Homo Sapiens; identical to SEQ ID NO: 344297

SEQ ID NO: 475757 - DNA, 1000 bp, Homo Sapiens; identical to SEQ ID NO: 344298

SEQ ID NO: 475758 - DNA, 1000 bp, Homo Sapiens; identical to SEQ ID NO: 344299

SEQ ID NO: 475759 - DNA, 1000 bp, Homo Sapiens; identical to SEQ ID NO: 160858

SEQ ID NO: 475760 - DNA, 1000 bp, Homo Sapiens
gggacggagtctcactctgtcgcccgggctggagtccagcgacgcgatctcggttcggttcactgcaacctccgcctcccggattcaagccattctcctgcctcagcctcccgagtagctgggaatacaggcgcccgccattacgcccggctaatatttgtatctttagtagacacggggtttcactatgttggccaggctggtctggaactcctgacctcgtgattcgcccccttcggcctcccaaagtgctgggattacaggcgtgagccaccgtgccgggccctctctcttctatttaaaaggataggcacagcctttggaactgaatgtctttcctcaggcctcataatagaaaatgaggaaagtccattctgacaactggctgccttaggcaacagaatttgggattcctacccttccagctcctgttgagtcaaaggcaaaggcaataacccaataaatgtggtgagacagtaaatggaaactgacataaaaatagcaataaaagcctacttccttcttgacaatcaatacataatggaatgggtatgattttacaccataaaacatcagagaataatagaatatgggctgaagaaagctcagaagccacaacattttccccaccttttgattttcaaaacgattcttaagatttgtcgggagtatttgttttcaattgtttcagtgaggctcagttttgaccacatgcaaccaaaatagagaatttcatggaggatggtcacaggattggcttagaaaaatgtaatcctgtgagctgtcccctttcataaataataaggttccgacggctgcaccgaatgttcctcctttcaacgaggttgggccgaggttgggctcccagctgctgggacatttttagtccatcttggactctcacctctgcctcctgctcagctgtcagaatgccaggcggctctgcagcccaaagcccactccgttttaaacttgctcgtttgcaatcacgtaacccgct

SEQ ID NO: 475761 - DNA, 1000 bp, Homo Sapiens; identical to SEQ ID NO: 160859

SEQ ID NO: 475762 - DNA, 1000 bp, Homo Sapiens; identical to SEQ ID NO: 344303

SEQ ID NO: 475763 - DNA, 1000 bp, Homo Sapiens; identical to SEQ ID NO: 344304

SEQ ID NO: 475764 - DNA, 1000 bp, Homo Sapiens
agaaattgctaatatttattgattcttttaagaaatatcacttacaaacttattttctttatgtaaaagatgttgccatttttgtgatatagaaaatattgataagaaaaaaatcaagtcagtttaacagctatgctttttcattattagtttctaatatctattctcatgtgtattgttagtataattgtaattaaaacagttccgcaggatgcagggttctgagatagaggcatgcagagttagtgaaaaaaaaaaaagcagctcaaagtcatcaggttcagtctatcatctaagaggcagagtcgttgtacaggtagccttagtacatagcaagatgttcagtagaagattcagggagcagcaaatgctgatgacagctgaggtaacagaagacaggttgccaggaacagtcactaggacacaggatctacccagaaattatttcatcacgatttcttctattccacctgtgcctgaagcaattgtagtgacaataacgtgatagaaaggacacagtgcgggtactccattctatgtttgggtcatgtgtctcaagccaatggattccaataatcagagggtatcgtggtgcatgaataatgtcaaactggagctcttcaacatggtttccaatttgaacttggacaggtgatgtttccttagttatgggtccattaataagtggatggccgtcgacagtttccagcatcagagggaagatattactgcggatgggcagcttctctcgaagaaccacagtatgatcaatgctgtttctgtaggagcctgaatctaccattgcttgctcaaagaattatcttcttcccagttggatttcaacagtaagccatagtgtatgagacatggatattggaagagagggggacgcatatttgtagattggcccacgtggggtcccccttactggcaggcctggatgtttcccgcctgcagggcctgatgaggcttgacagggcaatctctggcaaaatgacca

SEQ ID NO: 475765 - DNA, 1000 bp, Homo Sapiens; identical to SEQ ID NO: 344306

SEQ ID NO: 475766 - DNA, 1000 bp, Homo Sapiens; identical to SEQ ID NO: 160860

SEQ ID NO: 475767 - DNA, 1000 bp, Homo Sapiens
cggattttagagtatagtaattttaatattttggattctcaacacttgggactatggcatttgggattgcgtcttttgggattcacacacatcccaggcagactcattggctctctgcttcccatttacaatgtgcagctctttctccccctcagtttcaagccctagcccctctctccagcccctgcatgaggagcagctaggtggttgcagcttcgcgctgtctttggcggtgggctgcctgagctggtgggttcaggcaaggatgcctccacatgaacatgctaccctctgcatgcctgagtcctgccaccccccacccccaacacagtccccacatcagggacaaaagatagagatttgagtcctaggctctcctgaaagtggtcatgaagacacatgcagttcctggtgcatgtgagcctgtcctacagatggggctcagccatggctggcccagaggcccccacttctggctggccacagaggaggccctcacgggccaggaggctgcagcggcattctggggcacttgcagagacccccccttcctgctggctgttcaaagtgaggcccaggctttctggatggtggccctgggaactccaccgggcagcaggggctgagcggggctcagagtccagctggctgccgtgtgccacctgctccacagcctctgtgctgagctgcaagggctggtcctccacagaggcccaggcctggacacctagcccggtgggctccaccctgagccagctcaggtcctggacacgatctcgacacctctggtcctgtgtgctggctgagtagggtaggccatggatggtggtcatgctgggggagctgctggactgtttctgctccagcatgtcagggcccctggcccagcgctgcccaaagagcccactgcccatgtcttgccttggaggccatgcggccgggggctgttcgtttgagctgatcttcagggctgccacacgggccacacagcctgccagca

SEQ ID NO: 475768 - DNA, 1000 bp, Homo Sapiens; identical to SEQ ID NO: 160862

SEQ ID NO: 475769 - DNA, 1000 bp, Homo Sapiens; identical to SEQ ID NO: 344309

SEQ ID NO: 475770 - DNA, 1000 bp, Homo Sapiens; identical to SEQ ID NO: 246592

SEQ ID NO: 475771 - DNA, 1000 bp, Homo Sapiens; identical to SEQ ID NO: 344311

SEQ ID NO: 475772 - DNA, 1000 bp, Homo Sapiens
tttttttttttttcttttttttttttttttttttaactttaaaaatgttttttttatttaagtagcacaaactccttaagagacatgggcacattatccctctcaatcctagaaacgtgaaggagcaggccataccacctcagaatccagagtgatgtgtatgggtctattatacatgtttataaatgttgccgggtccatgaattcttcggatttgcacaagtactttatgatttgttctgggaggagtaggtcaggtgcaacttggtgtaagttatcgcctggtcctttagtgcctactttcatagtctggcaaaggtagagtgacagtttatgagtttgtgtgagaaaatctgtgatgacctcctttagggactgtgactgtgtcacatcgtcgagatacataactggaacttttatcactgaaacatgccattgcataaaaagcctcattggaatgttatgagaaatgactataattttcatttgttgaataaaaaatactgtttcatctttgacatggccaatataatctaaaagaactttgtagagagtgtcgctggaggactcgaggatatgcagaatggaagtgggatagatgagcagcaatcctgtcactgcttctcctaggtgatgtttcaaaactgactgaaacatttgttcatagtagtcagcaacatcttttctttctacatttgcttgtatcttggccactagaaacatcctatcaagaaggaatttctttaggtgtagtcgttgtttctcttcttgaaagtgcaggtaattgctacgtgggacttggagaaaaagaagaggttccagtggcaaaggccttttgctgcccttctggttatggaccgaaaaggacatgaggagtcttatttatttttccagatgattccagcttttagcttatcataatatttatgctgccagggtacctctttactgatgaactcgtgtttttatttcttcatttttcttttttttcctgtgcttc

SEQ ID NO: 475773 - DNA, 1000 bp, Homo Sapiens; identical to SEQ ID NO: 344312

SEQ ID NO: 475774 - DNA, 1000 bp, Homo Sapiens; identical to SEQ ID NO: 344313

SEQ ID NO: 475775 - DNA, 1000 bp, Homo Sapiens; identical to SEQ ID NO: 344314

SEQ ID NO: 475776 - DNA, 1000 bp, Homo Sapiens
ttttttttttttttttttttttttttttttttttttttttttttttttttttttttttaaaaaaattcccccctttaattgaccaaagtaaagccatgacatttcatttggtaacctgtttagaattataaaaatcatttcatttggcccagcccatactgcccaagacaaaacttccagacaattctgatgccatccagttttgttcttacaaactgcatattaaaaaaaaaaaaaaaaaaaaaatcttcaacgtcctaaatgtgatgtgctcagtgcgaagcatatcagagctggacgtgacatttatgtccttgacaagcctcgattatccaggtcctttaccttgtatatcctgaccagccaatgttctgtggtatatgcttcctccaggacatcaagctcaaagtctttattcccaatctcagcatttcggacacggtcaaagcctggaggacgcttggcttctgtgtaaacctgtccaaagcgatagtaacacatcttgtacatgaggcagttgagcagcactggagaaccttcacggtccacacggaactccccagttggagtataatagtcattctccttgatatgtttgcctgtatctgtgctccctccaatccggaccatccaaagaaacttgttgatatcatcagaggaatacccagtgaggcctccaaaaatgaccagcacatagctgacatcgagctccctcatgatctcataggctttttcctctgtggacgccattgcctgccctactcgagaaatatgggtattattccatgtgttattgtccactaaaattgttcggtttgccatagctgtaatctgatagccataatcccaccaggacatgaccttcgcatcctctggagtattatgacgaagccaataatatgcttctcggaagtcatcaaatatgatcctactgccatccccaccacgggcagatagtacaatggacggagaagagtaggcctcactggtcacccaggtt

SEQ ID NO: 475777 - DNA, 1000 bp, Homo Sapiens; identical to SEQ ID NO: 344316

SEQ ID NO: 475778 - DNA, 1000 bp, Homo Sapiens; identical to SEQ ID NO: 160863

SEQ ID NO: 475779 - DNA, 1000 bp, Homo Sapiens
ggtgtcaactggccccagcctcctcacacctttattaaaactctgagtttaggaaggctgctaacgctgcttttcaataggtacgaactggctggggaaggcgaggacgacaagggaaggcaggggattctcttttgcccagtgttcggtgtcccaaactcggcgtcccggtgcaaggccgaggcctcagaccctgctaggcttcttggggtcctggctcctggccggcatgaaggcgtagagctcctcgatgagcatttccatgcgcgcggtgacctcggtcacggtgtcaatgaccagcttctgctgcagcttcagcttgttgttctcccacagggccttgttctcctcctggaagcccctgtgctctgcccgtagcacctgcagggtcctgttctcctcctgcaggagccggttctccttgagcagggcctgcagcgcctgcctcatctctctcagcagctgcaggggctggcagccgtcgggcaggcccgggcccaccttggcctcctcctccccggagggcccggacatgttgctgaccatcttccgcagggcgcgcagctccttggagtcctcctgccgggccggaggccctttgggctcctcgaagcgggaggagaggccggagccctggtcctgcagcagcccggggctgcagggctcctcgtggggtgagggggcgggcttgctttcctcggcaggggcggccgtgtcctctgcctgcgcccagtaggcctgtttctgctccagcagctgctgcagcgcgcgattctcctcccggaggagctgcagggtgctgtcctccttgccacggggcacctgcagggcgacgtggtccttcttcaccacctccagggacgcgctgtctttgtgcagcagtggcgagggggcccggctctcctctcggcccagcgaggccttgtgctcctcccagaagacctgtaggatcttgttctccttgctgagcatccggttctcctcgcgcagggccttgttc

SEQ ID NO: 475780 - DNA, 1000 bp, Homo Sapiens; identical to SEQ ID NO: 344318

SEQ ID NO: 475781 - DNA, 1000 bp, Homo Sapiens
ttttttttttttttttacagcactattttaaaaatagctattcaacataacaatcttaactttaatgcaccaaattatggttttcaacaatttaagtgagcatatcctgtcacccccagcacatgtttgatatatacttgttatatatagatggatatagcaatatccatttgtctacacacacacacacacacgcacacacacacacgagtagagctacagggccctgcttaatagtgtgttctgaatttcatgttcctttaattgtcactgggtttatttatatgcagctacgatgtcatttgcagagcttactgtatttatccctgtcagaactttaaaagccacagagcttgtggagggtcaccattatgtctaaggacagaccctgtgctcagatgggcggactgcgctgtgaggtcagtgagaggtgcccatcacccaggcataccccagtgtgggcagcttttcccagtgctgaggtttctgttactgtcagacccaaagaattttgtttatttaaataactgttcatacgatttggattctatttatgtaaaacatagattcccccaaagaaattcaataaataaaggacttagccactgaatcaaggaagcagaactccagtttttaaccttccaatgggactggggctagagccgacccatttcaatttgtactgcaattggtcttccaggaggcagagggtaatgaccccacagacgggtccaggacagactgtctctctagtcaacagcggctctctgtgtgtcattggatgaggctggagctgtagctgaatccatagctgctggaccgcgacaacggctgctgggcctcttcactctgttctggggcgtagctgggaaatgtctgtgcacgagacatctttgacgaaccaaacccatgaccttgcaaactgtagatttcaccaacgctgttctgacgagtgatgtgatgccagtacgcgctgcgaggaagagatattgatttggat

SEQ ID NO: 475782 - DNA, 1000 bp, Homo Sapiens; identical to SEQ ID NO: 344319

SEQ ID NO: 475783 - DNA, 1000 bp, Homo Sapiens
gcttggaaatggttttactaaaaaggcaccaagtcatattttttaagtaaattcattatgtaacttggtagccttcagcaaaatgggtgagaaaaatattacattacaatctattttgagaggtattcataataatgtttatatatcaatacctaattacaggaagataagaaaatataactacctttgagaacttttttaagaactttacatatatatatatcatgtttttataactattcttacaaaatgtaggtattactacaaaaatgctgcaagcatacatacacacgttcagcttagatttttttaaaaaaggaaaatcttaattacaaaaaatatgctaatagaaacaaaacaatttctgagttactctatagatcacgtctgctatgatttgttaccccaaattgtctaattgtctattagcatatcgtgcaatattaaattaagctactgatatttgcattattgcacatctaaatcctctttttaaagagaaaaccaaaaaatggaatattatctaagcttgcagaaaaaataaaagttgttttgtataacttatttgaatcatattgctcatacagaataaaattgaccttctttgttaaagaacttgatctcaatcattttccaagctagcgcaaaataaaataaagtcagacacttttttttttctgcaaagcattcatgctattatgctgatacatgtttgcttacaatctcaactatgggagactataagcctaactatctacagtgggtaattgtgctaattatttttcacaatggcacatctcactgcacttagattgacttaaatcatagaagctgctaatttaaaatcctaacataaatgaagatatctgaggttgagaattaataacttatgggtaggagaagatactactagtaaatttaagatttctaaggcacagaaggaaatctggcaaatcttgtgtattctaggtgtagaaatgaaaattaataatggctttac

SEQ ID NO: 475784 - DNA, 1000 bp, Homo Sapiens
aaaactagtctttattacatttgcttgtcacttaacttgcttatagtttataattgcacagggaaaaaaattaacatcaaaaagttgcagttgattttaccccaacaggcatctgtccactttaaattctacaaacattctttcttagggaaaaaatctattttttaaagtttactaaaattcatgcagaatttactaactactttttaaaaagcaagagcttcatcatggtgttggaaaccaaagacaaaatttcaattaaggacagtctgatatttatatgtttccaaaaataaaactgcattataaaattaataagttaatgaattgaaagagacacactttgcctaagataaaaaattcttaatttaaaaatcattatagagtgcaatgaaagaaacaaagtaagactatataaatgcatttttgaaagatgttgaagatcctcacttatattttaatattttgctcatatatagccaagagcaggagagaaagccaacctaggatcaatccaaagttttgcaggagaaacatcatccagggtcgttgtgtttgaacatgagtcatttcaggaagcatttcaaccaaggataaatataagaacatcccagcagtgactgtgaagatccagtcttgaacacatggatcagctgacacggaaaggccaatgtataatcccatgaaggcagttagggagcttataaaattcatcaggatggcagtcttcatagaaagtccagagcttaagagcacggcaaagtctcccatttcatgtgggatttcatgacacaagatagcaatcgtagtggtcactcctgactcggatgatgatgagaaggctgctcctatggctaggccatctgcaaaattatgcaggctgtccccaaccagaatcatgattgctaacaagctaatggctttacattttctgttggaggctgtcatactgcctataggcatttcagctgcctgtgaatcttctgggcttttcttgtca

SEQ ID NO: 475785 - DNA, 1000 bp, Homo Sapiens; identical to SEQ ID NO: 344320

SEQ ID NO: 475786 - DNA, 1000 bp, Homo Sapiens; identical to SEQ ID NO: 160864

SEQ ID NO: 475787 - DNA, 1000 bp, Homo Sapiens
gagacagagtctcactctgtggcctggctggagtacagtggcacaatcttggctcactgcaacctccgcctcccgggttcaagcgattctcctgcctcagcctcccaagtagcagggactacaggcgcatcactgcacccagctaatttcagtattgttagcagagaagatacaaaccagtcatggccagcataattcccttgcaggcagagaagagaagattttatggaagtttgctgctgtttcaggaatctctcacaatgctttaaaacccaggtaagatcattttctgcaccatcttttaagagactgaggaatttgccatacctgacagtcattttaatgccaagctgctgcacagatgaaagactttcattcttcacatttgcatcagtagctgtatactccactgaagggaagtagcattcagatgggctttcagtgagatgaagcacaaatttttcaagtaattctattaaggcctctccactgattatatcaggtttggctttcatcattttgcaaaattgtctttggcagttttctatccattcagtttgtttatcagatattttgaggcataataaaagcttgtcaagatcattgtcttgttttataccagcatttcttgtaatgtctgacagatagcagtttggcaatggatgtgatgaaaacattggccaaggatatggattatcactcttttcgagtaacctcggaggcaaaatccgttccaatggcccaccaacaagatttattctaacaagaacatgatttctctccactgataagccatcaattataaagtcccttagaccaaagatatgtgattgttcatagttgaataaagaacgaatcttagcttcagaattcaaaattataagtctatcaataatatcaataacacatgttgggacttcacgaagagaatattctgttttattaggaagatcttgattccttacaagctcataaatagcaggataggataacaagttca

SEQ ID NO: 475788 - DNA, 1000 bp, Homo Sapiens; identical to SEQ ID NO: 344322

SEQ ID NO: 475789 - DNA, 1000 bp, Homo Sapiens
ttttttttttttttttttttcagaaacacacagctttatattattacaaaaaagaaaaacacctcaccttgtctttgtttcgcagcacagacagaaatcattttaagacagaggatcacataggcagttgtacacccagctgacaaacactttgagtctggatttcctcccccaaccacattacatcagctttgacacatctgtaaaacatcttctctgcagaaagtcagaccctaaagatcaaacccagggaggcaccctctccccaggccagctactctaactcataaccctctgaagacacttggtaaaggcaacacagctgacgagagcagtgctgcctcagcagtagtgggctctggccccgccaaggcagggaggactagggccgagcttctgagaagccatccagataggcaagggagaaggggagggggtgcagtggggataaaagaacctgatgaaatggaagaaagcattaccttgggagttaccattttgaattattatataatcagactctagcctggcatcacggagactccaagagccacggacaatgggaaagaagtgtacttcttgaatgcagttcaaagttatctgaacttttttcactgtttctagattccactttgcttgggaaactacaagaacttctttaatcagccatggccttccaaaaagtagagtgatgtggcaggcaagacagggacaagcaggcccacctggtaaaggatggctctgacattagaacctgttggctgccctctccactgccagggaaggaagctggccatgcaggtgaagaaaggcaccagccctgtttcctgcctgaagggcagcatcaaggtcatagtgtccaaaggcccggaagaggtcagtctcagatgggtgctggcagagtcctagccaagtggccaggctgaatccttcctgagccacctgcaggaagagtcaggagggcgaggctctggccactgccttgcagctcacagctggt

SEQ ID NO: 475790 - DNA, 1000 bp, Homo Sapiens; identical to SEQ ID NO: 160865

SEQ ID NO: 475791 - DNA, 1000 bp, Homo Sapiens; identical to SEQ ID NO: 160866

SEQ ID NO: 475792 - DNA, 1000 bp, Homo Sapiens; identical to SEQ ID NO: 344325

SEQ ID NO: 475793 - DNA, 1000 bp, Homo Sapiens; identical to SEQ ID NO: 160867

SEQ ID NO: 475794 - DNA, 1000 bp, Homo Sapiens; identical to SEQ ID NO: 344326

SEQ ID NO: 475795 - DNA, 1000 bp, Homo Sapiens; identical to SEQ ID NO: 344327

SEQ ID NO: 475796 - DNA, 1000 bp, Homo Sapiens; identical to SEQ ID NO: 160868

SEQ ID NO: 475797 - DNA, 1000 bp, Homo Sapiens
gctttgaatcgctagcgtttattaaattctcatggagtacaacctgcatctctttggtcgatctattgacacaatttctccaattatagaagagcactgagggggcggtattaggggaaaaggcaagtccacgtgatctaagacaatgggatgcagcggaaaggagagcgctgtaaaaggctcctgatccatccatcccatgataaggccactgtccaaccagcctgaccctcctctcaatcttgggttctgtgataaaggctctgggtttgggctgatgggagaaggggagtcacttctggtaactggcagcactgggaggccaggactcactgtcgtcagaatgactcggttgcatattcatggaaacctcaggtccaactttaatcagtccactcttgctgggcaaaggggagagagggcatcctgaacatgttttcaccagggcctgaaatcttaacagcctgacatcacaaggctcagattccagtggaaagatgggtgatacacacacacataaataagcaagataatttcagagagagaggcaagagatgtgaagggtaagagacttggctgagcctggcgcgggaaagttgcgaatccctctctgatgatgaagtgtagctgagacctgagttatgaggaatgaatggtgcttgaagtcttggctggtttgggacaaagctcctgtttcagctctgtctctggtaaggttgttcaggagcacgagatgctgctcctcccagggttctgccatctgtcccttttcttgtgacattgtctgaggagagctctgcaagactagggtcaccgctgcactcccacccggcagaacagtgcagggcccaccacaagcacctgttggtggtagagcaatgccgtccagtctttcatcactgtccgcgatctctgctgagcctctttttaaccttcttctggccagtttaatttgatcctgtagaatctgcacccaatctcttgggccgggaagcttatc

SEQ ID NO: 475798 - DNA, 1000 bp, Homo Sapiens; identical to SEQ ID NO: 344329

SEQ ID NO: 475799 - DNA, 1000 bp, Homo Sapiens; identical to SEQ ID NO: 344330

SEQ ID NO: 475800 - DNA, 1000 bp, Homo Sapiens; identical to SEQ ID NO: 344331

SEQ ID NO: 475801 - DNA, 1000 bp, Homo Sapiens; identical to SEQ ID NO: 160869

SEQ ID NO: 475802 - DNA, 1000 bp, Homo Sapiens
gtttgaatatttctttttattttggggagctggtgctgtattagtcaggtcttgcattgctgtaaagataaacctggggctcggtgatttatgaggagaggtttagctggctcacggttctgcaggctgtataggaagcatggtgctggcatctgctgggcttctggtcagccctcagaaagcttacagtcatggcagaaggcgaaggaggagcaggcttgttacattgccagagccggaacaaaagacagagagttgtgggggaggtatgacacacttctcaacaaccagatctcgtgagaactcactgtggtgagtgggttcatggcacccagccatgagggatccacccccagaacccaaacacaccaggccccacctccggcactggggctcacagcttaacacgagctttggaggggacgtgcaagctctgtcagaggcccaggagtgcaattgctggggtttatgacttcatttttcaagggactgccaggctgtttccacagtggcttcacctgcatgaggtggtcaggggtgggtgaaggggccccacgtgtggctgggcagcagtgacagggcttggtcaggagccaacaccctgctccttgcagtgaacaagaagcgcacagcccgagagagccctaagtgttcacggccaccctgtacctacacagctgtggggtcagctccagggaagtggcctgctcagcctcagtcctctgctgggagcccattgttcgtggatttccagaaagaggggtgccaggtgcacactcgactcactgagtgggccgctggtccgggcacagtggaggcctctgctgggacgtaagatactatgggaaatactggcttcaagaaacccaagaaaccctccccacggagcaccttggctgctggggctttgtccggccgcggtgggcgactagggacagctcgggtgtggggtagctgcggctggaatcctgcggatgaagtgggagcagccctcatcaag

SEQ ID NO: 475803 - DNA, 1000 bp, Homo Sapiens; identical to SEQ ID NO: 344333

SEQ ID NO: 475804 - DNA, 1000 bp, Homo Sapiens
gctgggaacagcctttactgcccacgccctacacggcgaacatgcgcagagcctcctccgccgagcggcactggttcagctggatctgcacctctacggtcaggggctcagggtggtaatcgccttcgtagatcggaatcacggctttcggcttttcttttttggcaactttcttaatcttctttgaatccctggccaacgtcagcctgtcagatgtcaatgtgcggaccacgccgaagttgcacacggtggacaccaggggctccccggcgagcaggggctccaggatcaccaggccccggcccagcacctggaggatgggggggttctgccggagctccttgggcggctctttcttcttcttcagcaccttccactccttggccggctctttctctcctttccccgtcctgtctttctccttccctttcttgtctttctccccctttcctttcttggcagacaggggactgtcaacagcaggtagcaccacaggccaggagagaatcttctcctccacgatggtcacggtggtccccgccagcaggaaggccttcagtgggaccaggtccctgagagagtgctgcatctcgtaactgcaggggatgacctcagcccagggcttgtgggcagtgctgaagaggacagtccctggggacgggcagagccggggatctatacgcagcctcaacttggccagctcttctgcagaggccctcggcatctgcaagatggtcgaaggccccgagatgacagacagctccgactctcctgactcctccacctcagactccagagacccttcgacctcttcagtaacctcttcaacaatgtcttcgatgacgtcttccacgacctcttcaggagattcctcaactaataattctaagctgggagagggcttgacgatctcggccaggacgcccgcggactcattcatttcgccttcttcatctttcacaaaatcataggtcacgtaatagttgtaagtgatgaaagg

SEQ ID NO: 475805 - DNA, 1000 bp, Homo Sapiens
gccataaagcctttaattttatctcagggactgcactccgggtccaggctggggttgtagtgcctgtcaggctggctgccggtgggttctgtccttgggggcctctgaggagagtgctccattctcacccccattgacctgtggctcctgggtttcctgggggtgccctctctgtccacctttcctgcctcagacagcagctgctcctcatccagccccagtgctgacagcacctgggagaagcgccgagtgacggtgagccgggcattggcctgcatagcctgctggaacaggaagggccgggcctgcaccctgtgctggatgccttgcagctccgcctggtactcagcaaagcgctgtcgctcctggcgcctcagctcctccagcttgcgctgggccgccccagggccccggctccctctgggtgcgtaggctgccaggcagtgggccacctgccgctgtacatgctgtgtccgggcccgccgcagctcggcctgctgccgctcctcctgccgctgccgctcccaggcctgcagcaggctcctggtggcttcctgtcgtttgtggaaggtgcgattagggaggttggcagacacgaaagtttcatcgtatcccgaggcataggcctttccattccgcttggaggcctggaaggcagccctcaaagtcttccagggcagcttttgggggccacagtccaggtctctctgtagctgcctgtgcagcttctccaggtcccatggcccctgcagctccttggcccttgtcttcctccattgtcgccttcggaggttgttgaagctggggctgctcccctggctctggccctgcacttctccctcatcggaggcttcctctccagaaatctgcccctttctctgacaaccagccctccttctgcagggagtcctgtgctctccctcctcagcctcctctgtggcctctgaaaattgctcctcctctgagatcgaccccctcctggggcgctggggcagcaccc

SEQ ID NO: 475806 - DNA, 1000 bp, Homo Sapiens
ttttttttttttttttgtcaatttaaggtatttatttaaatgattctgtttctcagaattttgattttagtctgaatgttctgatagttgaggctacaaaggcaaaaagtatagaaagacagtggtggttaatttgaattcccaatcttgcataagtagaaatccaaaagaatttaacttgagagaaggaaaatgcagaagtggattcatgggaaataattatttcactgagtgtgctattctttattttcaggtggctcatgcctgtaatcccaacactttggaaggccaagcgggcggatcacttgaggtcaggagtttgagaccagcctggccaacatggtgaaaccccatctctaccaaaaatataaaaaattagccaggcagtggtggcatgcacctgtaatctcagctgcttgggaggctgagggaggagaatcacttgagcccgggagacaaaggttgcagtgagctgagatcgtgctaccacactccagcctggtgagtacaaaactatgaagaaaaaaaattatttcttccaggcatgatctacaaaaattttcttattaatttggaagaaatagctcttcggtggtttaatggatttaaacagcattgttacatcctaaactataaagatgtttcaaaaattaacacttgaaatagcttctaatctttaaaagctggttccatttaaaataatataattcatgggactttggaaagttaaattttcatgagatattaaaaatggaattcagtgaatccatgaattaggagtctataaatgcaaaaacaccatttttcctggcacaaaattagactgtacattgctgtattacctcatttgagagtgaagagaaggtggaggccaagtcatccagggtaactggagaactcacaggaagggaaggagctgaagtatatttgctttcatccattttctctttaacatcttcaagcagcatctccaatttgaagatttcaccttccacttttc

SEQ ID NO: 475807 - DNA, 1000 bp, Homo Sapiens; identical to SEQ ID NO: 344334

SEQ ID NO: 475808 - DNA, 958 bp, Homo Sapiens; identical to SEQ ID NO: 160870

SEQ ID NO: 475809 - DNA, 1000 bp, Homo Sapiens; identical to SEQ ID NO: 344335

SEQ ID NO: 475810 - DNA, 1000 bp, Homo Sapiens; identical to SEQ ID NO: 344336

SEQ ID NO: 475811 - DNA, 1000 bp, Homo Sapiens
ttttttttttttttttcaaaatagtatcttttatttatatatactttttcaaatgacaaatgtgggtgactttagacatctcagctccttccatgtacaggtacctgccctcccttgtagaagttctcccccatcttctgaaattcccagctgagaaagcttaagttatctgcaccaaaccattctgtgcataatttttaaagcaaatatatagcgcctcattatgagtcatttgagatgagttagatatgcatagttcagttagcagtacaattaacattggctatttctcgaagggagtttcttagcaatcttgaggaatcctaatgatgcttgagagttctgtctttaactttgaaataacctttcaaatccgaagccaaaggcctactctgaggactagaagtatcttcgtgagtatagttgtcaaaatggaatttctctcttcttgaaatataagttgtttttgaagggtcattatgctgattacaaattttatcacttaaacttaaatattctcgttgaagatgccgcatctcaaattccaaggtatccctttcattttctatgcttcttacgtaattttctaaaagtattttgtcttcagtaagtctactgatgctgttttcaaattttatattttcttgactatgtttctttagttcttcttttagaatctgattatctgttttggtttccattaccatttttgataacatttcacattccttgccaatttctgacaagctattcttataaatacttgcttctgattttgcattttttatttcttgcagaaaattctcttcggcagtagattggtaggtttgaatattctcaatttctctttccataatttgtctggcagcagtagattcttgtaatgttgtttcaaggttgagtttttcatctttaactgtttctattatttgaagaagtgtctcttgttccgtttttgccaatctttctttctcttttagctggattatctctagctggc

SEQ ID NO: 475812 - DNA, 1000 bp, Homo Sapiens; identical to SEQ ID NO: 344337

SEQ ID NO: 475813 - DNA, 1000 bp, Homo Sapiens
ttttttttttttttttgaaattatcatctagtatgtttttatataacctactattcacaatgacatgtagaattctctctgttattcaacatatgttcttgttcttcaaaatctgcaatatctgtagtctgattcttggagactggctcaccgcaattgtctagcagagctttagaccaggaagtgccacacagcaagtagtttccatcacagtcttagctagtttattcctgaatcctcccatatcttacagaaagagcaatgagtcttttgtaaaccactcccaggagggtgatggtgagcactattattccacacaccaggctgaatgcccatcgtggtccccagtgagcatacacttggctgatgaacataggcccaagaatccgggctccacttccagatgctgttaaccagcccatgtatacaccctgaggttttggtcctagaatttttgaatatagagtataggacataagattgcagactggatagcctaatcctattagcacagctgatgtaaggaactgggccagatgaatcaccggggtgtagaggcaccaggcttgttcaatcgagcaaccagttggtctttcattgtcatcttccattggagacttccaaagaccaataataatttccccaaatgtggtattagggattgaattattgtgcaaatcttcccactgtattttgggaaattgatttccccaaggtaacaagataaagaagccaacccatacaacgatgagtcctcccagtagaatagcacgctcgccaatctttttggaaagcaacttaactcctaagaaaataacaacggcttcaaccccaagagcagcaagtattatgccattatataacacagcttgttcttgagtccaggcatacatatccattgttaatggagtaatgatggtttcaaaaagggcaaagataaatagagtcacaaaaaacagaacattgatggccacaacagcaacctggtcaatatttcctt

SEQ ID NO: 475814 - DNA, 980 bp, Homo Sapiens
ttttttttttttttttgtaattaaaaaataatcttaagactttattctactgccatccattttccatactacagtacattttttgagttaaaaacaaacattaaatttaggtatcaggcaagagtgtagaagattcagtaaagaagcaaagtgatgataagttatattaagcaataaactattcctttattttaacatttgagaatttcttttgtatataaatgacattaaaagattctcagaagaagaaaacctaagctgaatggattaaaggctgtctgctgaggtgctctccccgttggcttcagaaatggatttttgcagaggttctttacacatttctcttcttttgagcagagagagcaagattctcctcttacgtaaggaggcatatttgcaaaatttcctgcaggtccgtagttgcatacaaatattgcagttgaagctcccccaaggttaggacacattgcaactgcacaaccgacataaaatgaattggcccaaactaactgtgtataatggccacagactctggagcatgatagactatcaaaatcataaaattgggtttcattataccaagccgtaatggcatgtcttggtgtgaatgactttattccacctaaccagatattttctccaacatattcaaaagctgcatagcatttatatgatttatccaaacagtcattatgttcaaatttgcactggtttgcccatgctttagccatctttgctaaacctttatcccaaatcatgtatttcatgtcggccgcgggagggttgactttgccacgccattcgttgtgggcttctatgcagttgtctataaagtgtgggtcagtgatggatgggattttggaagatgtagtggctaccaaacacagacccaagatccataaacaactgaatttattcttcagagccatggaaggatgtggaggatgcggaggatgccctgactgcgcggaccagacgct

SEQ ID NO: 475815 - DNA, 1000 bp, Homo Sapiens; identical to SEQ ID NO: 160871

SEQ ID NO: 475816 - DNA, 1000 bp, Homo Sapiens; identical to SEQ ID NO: 160872

SEQ ID NO: 475817 - DNA, 1000 bp, Homo Sapiens; identical to SEQ ID NO: 344339

SEQ ID NO: 475818 - DNA, 1000 bp, Homo Sapiens
ttttttttttttttttatgttacattatactttatttgaagacaaggggttgggaccctgtggaccggcctcagtggtcagacctgcctccgtgaggagtgcggtggcgtcccgggggctctgtgcctgccctggctgtggctgaggccctgaactggcagaccgtcttgcatctcctacacagctgtgtcgcacacttcttgatcctgcggccgcgtgctgtgcgtagcagcttgggggtcttgtaggccagccaaacggaccccaggatgctggagatgatcagtaggatgacgactccagcagagaccagctgcacggggaatgctccatacacgtagatgctaaagatggtctccagttgacagtagctgtagtacggatccacgatcgaaatgtagaagacataaaagccattgtggccgaaaatgatctggtttgctgtccggccgcccaagatctgatactggacgtctggccacctcaaaggggcattgttgttggggtcgtggcagctcacatagttctctctgttccagaagaagggccccccgaattcctttatcatggtggtccagttctgcggctgggaggtacacatggccgactgggccgtcagggaataggagtatgagaactgcccgttcacctccagtaacacatactcggcgtcgatgacctcctggaaactgtcttttcgccacagctccaccacgggcttccatagggtgtcatagtagacgaggagaggacagcccagctgctggtaggagtaaaacacgtgcaggtcctcggaggactgctgcccctggaagccggggtcgtagaattccttctcgatgatgaagctgtaattgtcttgcagggtcaaggggtccaggatgcccatggaacaggcggaaactttgttctggatgacgatctttttatccaggtcgcagccaactgaaatcagtgccgacagtggcttgatatccacacatgaaatttccttgtttgc

SEQ ID NO: 475819 - DNA, 1000 bp, Homo Sapiens; identical to SEQ ID NO: 344341

SEQ ID NO: 475820 - DNA, 1000 bp, Homo Sapiens; identical to SEQ ID NO: 344342

SEQ ID NO: 475821 - DNA, 1000 bp, Homo Sapiens; identical to SEQ ID NO: 160873

SEQ ID NO: 475822 - DNA, 1000 bp, Homo Sapiens
tttttttttttttttttttttttttttttttttttttttttttttttttttttttgtacatcaagttgtatgtcatgttacctgattatataaaaatgtaaaatgaaaatgaattatcaattccttttaacattcctagtaaacaattcagcagtagacatgaggcacaaaatcttagtaaaatatgacacagggagagcaataatgtaactcttatttaaacttaacttgtcataatttgttattaatatacaaagacaacaaacttttaaaacattacatttactaagattctggcaataagacacagcataccaggcttgccactcaacttgttattgtaagtctcagcttcaatatgaagccgttttttttttttaatcaaaaccctgctttttacatgctaaatatcttggcaagtaggccattaaacatagtaatgaacttaagacagcaagagtgaggagttaacaaaagctaaacattgcagcctaaacaaaattcatacaaaaaaataaactatcactagttacataaaattttcctgactggttaaaacttagtataaaacatgcattttagaatctttagctatcaagttcaaaaagtaccaatgtctatttaaaataattcctctcccaagccaaagtgtagtcaaaattaattcaaatgacataacacattctaatgctaaaaaatattcattattactaaagtggaggtaaatcccagagcttttggggctttctcatgctgcaaatggctgtttctctggttcactcaaagcagcatatgacagcatccaaagatgacactaagctcagtaaagggcaagactgctggtagccagctctgacctccccgtgaagcatggctactgtgtccataatacaggatgtgtgaggatcaaaggcacactattctgctagctaaagagatagcaaaccaccccccaaccctaaaagctccttccccaggtaaataaaagtatacgagggga

SEQ ID NO: 475823 - DNA, 1000 bp, Homo Sapiens
ccatgaatcaatctttattggtgtttgcagcaattgaattattggcataaggcacaatgggcttcaaagcaaatgacagaaagaaaatacgattgtacaggtggaaaggctcttcagggaggtgtcccagagcaactgtgaccctcacaaagaccctgcagctaggacccagcccaactaagacaggctttgaggacctgagagtgaccaagccatacctcagggaatctgaaggggtcccacagttctttcaaagacaagcatttctagcttccttgggagctcttccagcctttgagtctttgtcatcaacagcagcttgatgaccatggggaccctgtccctctaagccagcctgctctccctcacctgtgcctgttcagtggaagcctcccctaccaggggcagattaaggcccctgcagagggaggcaaaggggagagaagagcaagagttgataagcagactggccaagcccagtgacccccatgaggatatgcaaccccccccacagcggtgggtcttcccaccaatatttaggaggttaaagaaaaggtggcttctcagtgggatagctcctgccgcccttcttctgaggaggggtcctcctctatgagctccaggtcaaactcatcttccagggaccctcccacaggcagaaggcgaaacttcttccctttcagggtgcatgtgcggtgctcaaagtccaggatagcattgtggtcctggagcacatcagtgccaatgatggcttcctcggcactcgcattggccactaggaactgtgccttcagcttcagcttgcctagggacaccgctgtatcccagacacccaggatcttcatttcagcaccattggccacctttaccacattctcaaagggctgcagggtgtccagatcgccatcagtgacctcctcccacaagtttgggtggaccacagagacctgggccccagagtccaccaggaacctcacgggcactttgccaatcttcccct

SEQ ID NO: 475824 - DNA, 1000 bp, Homo Sapiens; identical to SEQ ID NO: 160874

SEQ ID NO: 475825 - DNA, 1000 bp, Homo Sapiens; identical to SEQ ID NO: 160875

SEQ ID NO: 475826 - DNA, 1000 bp, Homo Sapiens; identical to SEQ ID NO: 344346

SEQ ID NO: 475827 - DNA, 1000 bp, Homo Sapiens; identical to SEQ ID NO: 344347

SEQ ID NO: 475828 - DNA, 1000 bp, Homo Sapiens
acatctagatttaattgatgaacaaccaagttcttaagcaattagacatgaaagaaatattctggtgacataaactttacaatggtgggtgggggaggaaggatagacaaggaggctcagcaaggtttttactggagtccaggtgagaggcttagagtcctgggctggatgtgtgtttgtcatgcagagccacagtgcctagtgggggcctctttggccactgtggctgggggatgagaagagggcagagatgtcctggctgcccctctgttggacaggctggtcattccatcattttccaagtcccttttgtgcaccatggcctgtgctgactagagttgttacagaggggcacactcctgatgtgcatccagctcttatagagctgatagctgagtacattttatgtactgtggactgaagcagagtcctttttctaaccagagcagaagtggactgaagcagagtcctttttctaaccagagcagaaattccttgggcactgcagtcccatagccgggttaccttggaggcttcctgctttactgtgtgaaaatccagatggccaggctgattgagcacagcatcaggacaaggcagaggcccagcagcatccactgtcctttagcagcctggcagggttccatggctatgcccaggaagcaggcattgggcagtgggctgaatatctcagtgtcttgagtcagtgactgtttttccagggactgcagcctgcaggccagccccagcaccaccagagacatgacaaagcccagggccaacagcacccagtacccaaatttagcctggttggggtccagcttcagactcaggaatgtcactttgtctgtgtctttttcttcaaaggaacagctgaagtctggccagcctaagatgtccccttgctgcatgttctgtcaccagccaggtcagtaggggtttgaagtaggtcatgaagacatttgtagacacctcagactccccagtcagcatctttagg

SEQ ID NO: 475829 - DNA, 1000 bp, Homo Sapiens; identical to SEQ ID NO: 160876

SEQ ID NO: 475830 - DNA, 1000 bp, Homo Sapiens; identical to SEQ ID NO: 344349

SEQ ID NO: 475831 - DNA, 1000 bp, Homo Sapiens; identical to SEQ ID NO: 344350

SEQ ID NO: 475832 - DNA, 1000 bp, Homo Sapiens; identical to SEQ ID NO: 338579

SEQ ID NO: 475833 - DNA, 1000 bp, Homo Sapiens; identical to SEQ ID NO: 160877

SEQ ID NO: 475834 - DNA, 1000 bp, Homo Sapiens; identical to SEQ ID NO: 344354

SEQ ID NO: 475835 - DNA, 1000 bp, Homo Sapiens; identical to SEQ ID NO: 344355

SEQ ID NO: 475836 - DNA, 1000 bp, Homo Sapiens
tttttttttttttttttatttcaaggcacatttaatttaatatcaagagtgcaatacaaaaggcccaaatacaatgaaggaacacattcccccattaacaccaacgacaaagctcttttaaacatgtgcctgttgaatggaacggggatttcataaaattcactaaaaaaaataatgcagtgagtctcatcacagctaatatccttatacaatctagttgtgaaatgaatgtttataatgcttcaaacagtttcaacctgaagtttgataccacaccttcatgtttgtacagtcctcagtaagattatctacagtttttgcaaccattcaaagaacaaaccattgaataaaaccacattgattaaggctcaagcaagtaatatagagccccaaactaaatggttaaatatatgcgctacttgtacggacatctattatttgattctctcatgactattgaaagttggttctcagcaaataaaccctttaaaggcaaaattcacctcatttgagttttgacccagaagttcaacaacaatcatgaagtccacagtcttattggcaaaactgatacacagtgtctctaagtcactatgctcaaggttaagagcgatgcatattccgtttttacattttactggaattttacatgttcaattcatgatttaaaatctctaggttttcattccttcaaactgtctgaagacacagtgtgccacagacttaagacttctgtttctccctctattttcttcaaacagaaacatttctcaagtgtctacatgttctagaaggggaatttttcggaggtggccacttcttcggaatagtccgacgccatcaggcctctgaagcaaggggaaggggaaaagaaaaaagctgaaacacaaggttcatctggtaagttttacattaaccattacaagctggacagtgtaagaatgtggcttttttttggctcaaaaagtctgagtcttggtgtggaaacgagtacttggct

SEQ ID NO: 475837 - DNA, 1000 bp, Homo Sapiens; identical to SEQ ID NO: 344356

SEQ ID NO: 475838 - DNA, 1000 bp, Homo Sapiens; identical to SEQ ID NO: 344357

SEQ ID NO: 475839 - DNA, 1000 bp, Homo Sapiens; identical to SEQ ID NO: 344358

SEQ ID NO: 475840 - DNA, 1000 bp, Homo Sapiens; identical to SEQ ID NO: 344359

SEQ ID NO: 475841 - DNA, 1000 bp, Homo Sapiens; identical to SEQ ID NO: 344360

SEQ ID NO: 475842 - DNA, 1000 bp, Homo Sapiens; identical to SEQ ID NO: 344361

SEQ ID NO: 475843 - DNA, 1000 bp, Homo Sapiens; identical to SEQ ID NO: 344362

SEQ ID NO: 475844 - DNA, 1000 bp, Homo Sapiens
tttttttttttggcagcttaaagcacacatttattaagtcacaactttgtaggtcaggagtggctcagctaggttctctgcttagggtctctttaggttgaaatgaagggattggccggcggggctcttatctggaggctggggaagaacttacttcccagctccttcagggtgctgccagaatccagtgccttgcggctgtgggtctgagggttccgattccctgccggctgtctctcagctcttagaggccgctcatggctgtggtccccgtgtcctcaaagccagctatggaggatctccctggtgtcaaatctctgtcatgctgtgaatctgactttctccagaaaaagatgggcacacaggccagatgggcagcaattggtttgcccatcactgcgtgccttgcgcccagccctggccagggccaagaaaagtaaatacaagccaggaagggagtggggagtgtgactccctgggactcatggcagattcctggatgagggttggtggagtcagagctggtgatccccaaagaggagaggagccagaaggtggtgggtggggggtggggtggcctttagcttttttaggcatcttggcctcgaggcagaagggatgtggggtataggcaggtgcctggatgaaccaggaggctgagggaccccagcagctggctccaggtcagcctcaccggctagcattagaagtgacgcgagcctgaatccaggggctatatgtggccacactggtgtagacccctggacggttgggcagggcacaacccttgccccagctcaccacgcccaccaggacccagctcccagactgcaggcaggtcagaggtcccccagaatcaccctggcaggcgtccttgtggccctgggggtagccggcacacagactcccaggcagcacaatgcgctcagcctggggcacgtccgcgcccacgtggtagaggccgtcgcaggtgcgcgagtccagcagcggcacccttact

SEQ ID NO: 475845 - DNA, 1000 bp, Homo Sapiens
ttttttttttttttttttttttttgtccacagtagagtttaataaaaatattcactgaaagacccccccccacccccatcggcccaaagctgaataagttagttagctgtgtccctggtcctttgcgatggtgtgaggctacatcctcccccagatggctacgatgttggagtccgtcagggcggtgaggtaggtgaaggaggcattggccaccactgtgttcaccatggtcttggtcaccacctggccaagggcccagggctggggccacttcaggatctgtgtgggggcctgcagggctgccggcagcaggggtggctgcttcaggatgttgctgacgtcgtagagccacacgttgccctcctcatccccacagagcacaatccccttatcagggcaggcgctgagcgagaagtaggccaactcggtggacgaccattgcagccgcgccaggaccaccactgccaccgtggactggctgccccggcccccccacgtctgcctccagctccacaggcagatggtgcccaggccgctccccttggaggccacgatgtcctcattcacaaatgccagcccatccactctccgtccagatgcctcggagccctcagagaagacgaattccacttcacacaccctcctcttttggggctggtccagccgcacgtcccagcagcagcagccgccctcgcagccggccagcaggcgggcgtccgggcaggaggcgacagggcagaggcgcagggggatagaggtggtgtccagtgtgagcagctggctggcctggaattcgtagtcctggttgggcaccccgatgtcccagaggatgatccgcttgtcataggaggccgtgaagagatgggtctcgtgggcggggctgaagcacagggtggcgatggccttcttgtgggctcggatgaccccgcagcagaagccggcacgcacgtgcagcagccggaccaggccccgtaggcctgcagccgccagcacactccag

SEQ ID NO: 475846 - DNA, 1000 bp, Homo Sapiens; identical to SEQ ID NO: 344363

SEQ ID NO: 475847 - DNA, 1000 bp, Homo Sapiens; identical to SEQ ID NO: 343262

SEQ ID NO: 475848 - DNA, 1000 bp, Homo Sapiens; identical to SEQ ID NO: 344365

SEQ ID NO: 475849 - DNA, 587 bp, Homo Sapiens; identical to SEQ ID NO: 344366

SEQ ID NO: 475850 - DNA, 1000 bp, Homo Sapiens; identical to SEQ ID NO: 160879

SEQ ID NO: 475851 - DNA, 1000 bp, Homo Sapiens; identical to SEQ ID NO: 160880

SEQ ID NO: 475852 - DNA, 1000 bp, Homo Sapiens; identical to SEQ ID NO: 344370

SEQ ID NO: 475853 - DNA, 1000 bp, Homo Sapiens
tttttttttttttttttttgcccaggaaatgtgtaatctttaatataacagtggtttttgtgattttatctgcagtgtcccatttgaagccatttacattattaataatagtgacaatccctggactctgactcgtgcagttggctgatgtcttctgtagagcagtccaagtcacagaagaaaactccagcttgaccagaacagaattgtcaagtctgttcagacccctctgagtgtcaccacaaggaatcagccaaagttctttttttgaggagtggttcaaagtgtccacctgcactagaccccattggtgtttttgcagggcagaccgtggtgtgtttgcatactggggacagccactcctggctttctatttccaagcttctttgctagtgcctggtggctaggatcctgaccgtgagccccaccatcagtgtggctgacgccgcccccagagcagccccacggcggatgaccagctgtttcactgatagtctgctggtaggagctgaaagggcgtgggcctcctctggagtcctgaagaagtccacgtggcactcagaccttgaatacgttgtcaaggtaatgccaggggaactgcctgtagccactgaagataggactgctttctcaggcccaggtctggttgcagtgctctctgctctctgctgctgctgccggcctgaatgtttcttagcctcctctgcagcaagcttccagtccagccgggcagtataagcaacaaaggcagcagttgccaggaagacacaggccagcatgcccagccagaggcccatgattctcattctgaccacaaaggtcagaaggatgcccagtggtaggccgatgatgtaatatgtgatggcattcacagcggcaccaaaggcctgcttcccagttcctctcagaactccgccatagacacaacagatggcctcaaacacgtgaaagacactataaaccggcaagacctggctcaccagggcaatgacatcttcat

SEQ ID NO: 475854 - DNA, 1000 bp, Homo Sapiens; identical to SEQ ID NO: 344372

SEQ ID NO: 475855 - DNA, 1000 bp, Homo Sapiens; identical to SEQ ID NO: 344373

SEQ ID NO: 475856 - DNA, 1000 bp, Homo Sapiens
ttttttttttttttttttttttttgtggctgtaacttgctttatgtgtccagcatctccgtgagcatctggtgtctcagctcaagtcaaccctggccagactccaataacagacacaagaactgagaaggtggccctggttaccaaaaaccagaggaccctcattaacatccccaaatttcaagccagactgaaatctgtcagaagaaatgagggtcccagcctacccccgacacgggtggaacagagtaggctgggcccagctagagcctgggcctgggctgctgcacctgcggggcccacagactgaggaggcggtcggcctccctccatcccgacagcagagccccgtgcgtcgtggagtaaaacgtgcgatgtgtggcttcccccgcaaacaggatctggagctgggcgccggcgccgtctgcagggaggggctgagccagcaggtccaggtcgcccccagtactgcccacggccacgtagctgtaggaccccctagtgtacggggcgctgtgccagcgagaccgcaggacgctcttgggcgcggggagccgtgggtttcctgtcactctccggagcacttgggtgagacacagaagtacttcttcatccgacagagtctccatgaactcagactcaagtccggcaatgaacccacagagaacgtggacagacgcaaaggcaggcaggaccacaaagccaatgagcttccggaaccaggcgtcctgtagctcaggggcagcatcctccaggggcgacgtgtcctcccacaccagctggatcagctggcagtctggctcccagaagggctcctcaaactccaggaagattttgttgttggtcccaaagcctatcttcctgattgcttctgccttctcagccggcaggggagggtcaaagaaggtgtccaaatgttccctaagaaaacctaagggcacggtgacgatgacatggtgcgccgggaaccggtctccatcctcacactctaccgacactgg

SEQ ID NO: 475857 - DNA, 1000 bp, Homo Sapiens; identical to SEQ ID NO: 344374

SEQ ID NO: 475858 - DNA, 1000 bp, Homo Sapiens
ttttttttttttttttctatgcttggctatattcagagcacacaagctttatttagcaacaatggcagtatttcatgagaatgagctgcacaatagtgtaaatgccattttctgcacacagcctgggagcagatggttacagcgacagagcccagaccccacagtcctcccctgcccttcctgacaggctccggctacttctggcctcattattgtctcagccacagcccaggtcgctgggccagaagggagggtgcaggctggttccgctgctcaggctctgtcatcctgcttcttccttctcaaggccacctcgggagcagctggcaggcaagaatgcccccctcacacacagggaacccaagtccctgctgactcaacctcttctttttttttttttggagacagagtctcgctctgtcactcaggctggagtgcagtggcgccatctgggctcactgcaagctccgcctcccgggttcgcaccattctcctgcctcagcctcccgagtagctgggactacaggcacccaccaccacgcccggctaactttttgtatttttttagtagagacggggtttcaccgtgttagccagggtggtctcgatctcctgatctcgtgatccacccgcctcggcctcccaaagtgctgggattacaggcgtgagccaccgcgcccggccttgactcaacctcttctaccgctgcaaggccttttcctcagtgaaagtttcacagatgggtttcgataaaataaggtgatatttataaagcactctgcaatcactcagtattagtcctgccccccatccagccccctgccagccagcagggactaggatggccttataaagggcgcaagaactgcagagacaaagcacaaagggagggcccgggcccagaacctgtcagggctgcttggaggtcaaatttcctttcagctctagtgcagggtgcatcccagcaaccgacttaaccagatacagagctgatcatctg

SEQ ID NO: 475859 - DNA, 928 bp, Homo Sapiens; identical to SEQ ID NO: 344375

SEQ ID NO: 475860 - DNA, 1000 bp, Homo Sapiens; identical to SEQ ID NO: 344376

SEQ ID NO: 475861 - DNA, 1000 bp, Homo Sapiens; identical to SEQ ID NO: 160881

SEQ ID NO: 475862 - DNA, 1000 bp, Homo Sapiens
tttttttttttttttttttacaattagatattaatttatttttttaaaagtagaacataaaattatataaacactacagtaacaagtaagaaaaagtaaataatgaagaaaatccatatgcttgggtcatggaattacaatacaatttttaaaaataactttcctttaccaatagacattgttaaagacaataaataaaaagtataaaataggctgggtgcggtggctcatgcctgtaatcccagcactttgggaggctgaggagggtggatcacctgaggttgggagttcaagaccagcctgaccaacatggagaaaccctgtgtctactaaaaatacaaaattagcctggtgtggtggtgcatgcctgtaatcccagctactcaggaggctgaggcaggagaatcgcctgggaggcggactttgcggtgagccgagatcgcgccaatgcactccagcctgggcaacaagagagaaactccatctcaaaaaaacgtataaaatgaaaacaatgagagagttacattgtcagtggttcttaactgaagtggactttagaatttgaaaacactatacctaagttctactttgtgaagattgtgaggtggggttggggcactcatatacttaaaacacatacatacacaacaccccaacccacccctccacactgaaatacacaggtgattctgatgcatatggataggtaaattttcagcataaagtttcacatggagaataagggagatagtctagtgagaagctgagcattgcctatgaggcactttgggtgatgaagaccaggctgttcttagtgtgcacctggactgctgcagccactgtctttagcatttgtagcttgtgggcattctgaggcatcgccctctgggcaggatttctccacaaggcggaaggcctccaggaactcattgatatcaatgtggccatctttgttgaaatcaatgctccgagcaaggtcacagatgcagtcatctgtaat

SEQ ID NO: 475863 - DNA, 1000 bp, Homo Sapiens; identical to SEQ ID NO: 344378

SEQ ID NO: 475864 - DNA, 1000 bp, Homo Sapiens; identical to SEQ ID NO: 344379

SEQ ID NO: 475865 - DNA, 1000 bp, Homo Sapiens; identical to SEQ ID NO: 160883

SEQ ID NO: 475866 - DNA, 1000 bp, Homo Sapiens; identical to SEQ ID NO: 344382

SEQ ID NO: 475867 - DNA, 1000 bp, Homo Sapiens; identical to SEQ ID NO: 344383

SEQ ID NO: 475868 - DNA, 1000 bp, Homo Sapiens; identical to SEQ ID NO: 160885

SEQ ID NO: 475869 - DNA, 1000 bp, Homo Sapiens
tcacaccagcgtgggtttcaagtcatctttgaagttcacaataggcttggagcgggcccacagcttttcccaggaagccagccccccagtaggctcagggtcagtgtctgatgtgccactgtcactagagtcagaagagctctggaagcagatttcacagtagggccggtggcagcggcagaagaactcatctgagctgctggactcagtatcaaaatagctgtgttgagaagacagggaggcacagcctgagggcactgggggccacagctgccactgttcaggcaagtcaggtgaggctttggagaggcatggggcagcaggacttggggcccggccagaaccagaaggctggcgaagaaaggctgctttgctccctctagccccctcgggctctgtctggctttgtttgctgccctccagggtacctggtctgtcttgaggatctgaaggtagtgaaggcttcctggaagaaggtcttcgtactctggaatcagtagtttgtggggccaggctggggctgtccccattctgcacatgtagcctgctgtgtgccccaggaacagtcctgtttgcccgatgccccacagatgagggtgcagagccaggaaagtgtgagcgggcccgctgagctgcccgccttctcctcaccatgtaagggctaaagcccagctccttggagaggggcatcttttgggggctgaaggcagcactgttcttccaggtttgctgatgacaagagggggcggtggagagggaagcctcagggcccaggcccagatcttgtaagacctcctgaagtttctccctgattactgaactaacccgtgaccgccgctctgggggctcctctgagttctccagatgcctctgtctctggggatctgagccgcctctatctggtaggagactctggctggggttcatggggacttggtctcctctttctggacccaggctttgctcagtccatggcttctggctacaacctgagtctaaa

SEQ ID NO: 475870 - DNA, 1000 bp, Homo Sapiens; identical to SEQ ID NO: 344384

SEQ ID NO: 475871 - DNA, 1000 bp, Homo Sapiens; identical to SEQ ID NO: 344385

SEQ ID NO: 475872 - DNA, 1000 bp, Homo Sapiens
ggttttttttttttaatagtaagatgtagacattttagtataacaaatgttttcaagttgtttgggaaataaataagctaggaagcaaggtttaaataagaatggtttggtttggtgctgaatgatgttgttagtacaccgcaattcaagtgttggctatgcatttgggccaatttagggaagtccaaaacaacgcacattcgctcagtagtgtgagagattaattgtaggcaggtcccatcttttttacagtattcaaacgttcaaccttaagaccccaccagggcgtctcattccaccgggaactagagaagcttgacttgtgtgatcacctcctgataaatggactggggcggaacacagatccggaggtgggggcttctcttcaccaagcgcaaagcctaccttccagaaggctggctgcacaagcggccgccctaaatgcggtcaaagcgggcaaattcgccgtgggtgccttccttccctacctccggcccactctggttgctccttcccaggtgctccaagctctccagagtttctggtggtttaaagtttccgcttcacgcccagactgctctaagggcaaacacgacccctttcctcttctaggaccccttccgtgaagtctgttccaaccctgagcctctccaccttcgagattggccgcagatgccccgacgggatggcctggggagccgaaagctgtccccagccccggacagctactgcccacgccgcgcaggccagcctcacacagtagcgaatctccttcacgcgacttcctcgcaggcctgtgaacccgcaggggaggcggaggtcggttcaaaccctgcgagagcccctgcccagcgcggagtcctgcacacggtggaaagtccttacgcattagcgggcaggattaaacgacttcacaccacgaggtgcaagactgggcttcggggccttcctcggtgttgctattttaaaagaagctgctcagtaacccagaagaagatga

SEQ ID NO: 475873 - DNA, 1000 bp, Homo Sapiens; identical to SEQ ID NO: 344386

SEQ ID NO: 475874 - DNA, 1000 bp, Homo Sapiens
tttttttttttttttttttttttttttttttttttttttttttttttttttttttttttttttttttttttttttaactttgtacattaacatttattttaaaaaattgataagaacaacatgttaaatattggcaaaactaagagcactcaattcgactatccgtccagctttcacagaatttacttctgagcccacaagactcaaattgtataaggatagagtctgtttcattcatcaacatatccagcacctgacatagttttacatggcacagagtgggtgttcaataaatatttgtcaatgattgaacagaaattttcagcaccaaatgaaagaaacacatgactttgaacaacggcacgagaataccaactgtttgattatgcaacgacaggatcttttggcaaaaattctaggattacttataagtagatcaataattagataataatttcctccaaaaataaaggaattctcatggggaaaaaaaaaaagtcctaacatcttatcctaaaagctattctgtaaatcttggaatataagctaggtgaaaaccacaatactaaggaaggcaattccaaaactactgtgttttacatatttattaaagaatccattctttctgataatactcctaacacaggtgaagatatttttacaatattttaccaaactcctaatagaaaatgtctaatcagttcatccttttagtccctgaatccatgtttgagcattttaaagatggaagaaacctgtaagactcatatcattttaaaaaaattgacttaaaacacttattggataactaatacatttgtaacagcatcatgatttgttttgctatctgtatttcacccagaactgctgaattacagaatgaaactcaaatgaaagcattcatctataatttcaaaaattattatttgaaatttttaaatcaatagtcataacatcatcgtgttccgaaattagaaaattattagcacatatacaaaca

SEQ ID NO: 475875 - DNA, 1000 bp, Homo Sapiens; identical to SEQ ID NO: 344387

SEQ ID NO: 475876 - DNA, 1000 bp, Homo Sapiens; identical to SEQ ID NO: 344388

SEQ ID NO: 475877 - DNA, 1000 bp, Homo Sapiens
atagattagaagatctgaaatgttataaagcaatatacacaacgaataaataatttgcacaggagagtcatgtctacattacataacactgtctagtatgggaatacttaaagtaaatccagtgataatggagaaagtccataaaaatgctaacctgtcttcccttgtatgaaattgttcaagtataaaaatccaatacagtgtaaaatagtattcaatttagtttaagaataaaaattgcaagtattgcagtttcagaagaaaaatgtaaagcagcatttaaaaactacataatagtgttaaactaatgaattaccaatgaatgaaatctacacaggcaaaatcagaggaggaagcatgaaactagcaatatatcgtttaaaaaaaaatctaaaaactaaactaaaatgtgttaatgtaagagtactctcttatacagtgcacatatgaatttaaataaatccaagtcaacatctttagttgaataggttaatatttaatacgctacatctagacttactaaataatttatgccatgagatgaatacataattttacagtgtcacatctaaagttcctttctttagagtgcagcatagtaaaacttaaaaataaatatcttaaatagcattactattaaggcacagtataaaccacattatcattaacctttgaagaattgtaatctcagtaaccttgttgtctcatgtactgtagtcactaataaatagttttaaatatgactctgaaatagatactaaagtgtaaaattacttaaaaagggaaaaaaaataaatgtccttaagacagttctgcaaactttgcctgcctttattcataagccacgagtcgacacaataaatagaaagagaaggctgttgtagtaaaagcctgatcctatttcagaatcagaattgctgacaccagcagatacaagtttcccaaaattgaaacaggatggggagagggattagaatgtgacaagctcatcaaacaagca

SEQ ID NO: 475878 - DNA, 1000 bp, Homo Sapiens; identical to SEQ ID NO: 160886

SEQ ID NO: 475879 - DNA, 1000 bp, Homo Sapiens; identical to SEQ ID NO: 344390

SEQ ID NO: 475880 - DNA, 1000 bp, Homo Sapiens; identical to SEQ ID NO: 344391

SEQ ID NO: 475881 - DNA, 1000 bp, Homo Sapiens; identical to SEQ ID NO: 160887

SEQ ID NO: 475882 - DNA, 1000 bp, Homo Sapiens
ctgtagctggcgctgatacaatacaatgtttacctggccaaagagggttcgaggggacaagctggcctcacaataagatgcacagtgttagctaggtcatcgtgacaggcatgcctcacaccaagacggactatcaagacctgagccgacctgacttacataaatgacaaacactagtgctttacaaaggtggctggagttctccatcttctaaaatcaacatccaatccccttcagtcagcatcttcagtattcccttgaggactggaaaaccaaggcagctacgtccatctgtaacgcacccgcaccgggcaggcacgagatgtcacgtccacctggcaccatccaaagagggtaaattggagaaatcacacctttcaaatgttaatctgacactgtaaacagcagttgagttctcatttacatgggcaaagaaagcactttaaactattttcacaactttcctacggaagaaaaggaaacgattcagacggttaatggctaagttttaaacaaatgctctgcatcactacttggttaagaaataatacaatttttgcccttgtgtccctttttcttcttggattttgttgtcctctgaccaaactgaggggtgggaagtgcagatggtggactagaaaggtcatctgtatagtaggcaaatctctgtggccggggttgagggattggttgtccaagaaaatatccttcttcttccgagtcggaagaggaggaggaggaagaacaccaggaatcatcatcctcgccgtagagtcccagaaaccgattcattcctgggttctgcaggccataatcgggagtggcatgggcgtactgtccgtagagatcagcattctggatgtatgcttggatctcccgggcacttttattctgtataaatttctcatagttatcgggggtgtacagccgcagtctgtccttgggagagtattttctttctgtaacaagattcagggcattgtcggagcgggactttcta

SEQ ID NO: 475883 - DNA, 1000 bp, Homo Sapiens
aagaaatcaggcaattttaatcacaataaaacaaaatttgtgtatcaaagaaattataattatagcacctaagtggctcagctgtgaacaattatatagtcatatgaacgtattaatccaattatattaccatatttggatatttgtggggaaagatagagtatgtgcctgggtggtgcgagagacctaaattctcagtttatctaatagaatgttaatttaaaatgtctaacattagacatattacagttatgaagaaatagcaaggtcactggaataaatcatgcctctgtttaacaggaatttggtgtaggatggcatgacccaggaggtttttgtttttatataagcctgttttgttgctggaatgaactaatagctctctacataattttgataaaattcataatgtgggaagcattgaattattgactgtgtaataccatctttcatcttagaatatcaaaagtactttacaatttattcccattacatctctgaagagtaggcatttctaatactgttttattgatagttgctaaaataatgaaagaaaaaaactttcttctgcttgtaagtggcagacaattcagaattgaagagctcctctcctaaataatacaaaatagctttcaaataattcatccttcataatctattactgtacaggttataagaggttagaaatcatacccagtgtgaaacacagcctaagtagtttcataaaaatatcacttgaagaaaagatttcagacctggcattcaagtcataagattaaacctcatccccttcattgtccagaacaaatcctaacattactgggtcttacttttaatagaacgattgccactctatgtagtgtaattactttggcaaagttattacatttctatagctgaaaactaaagcatgaatcctattgtgatggcgtctttttccatctcctgggaagacaattctaacaaacaactctattatatctatccagtttgattttgt

SEQ ID NO: 475884 - DNA, 1000 bp, Homo Sapiens
aacaagtctagtttcttttattgcagaaaattctttacatctaatatatattccatggctacaaattccaacccgtttcccccatgattccattagagatgtcttctactttccaaacatcaccaatgagaggcataagacagtgcattaatagttcatctggagattccctagtggtggttaacaagatttcatcacagtaaaaaactgtgataacaggatccaagagaagttgccgaaaagtttaagaaggaactcaagtgatgtccaactttgcaaaccgtgcccaatgacaaaagaaagaaaatccaatttggttcctggaacactttacattgtaattcatttcggcctcatgagactatggaaattggtaagcctgctactgtgaagagaatggtatgcaattaaacatgcatgttactgctttttgttttggaagaccatgctgccaatgtttctattggatgtgtccaaaaatgactggagagatcaatacaaagccaacaatgtttacttctgtgaccacagaagactactgagtggctgcagagcaagtcttgattattttctgtgaaatgtatgtttatcccattttctgatgtaaaatttttcaaggtttgtgatttttcttttacataaattttagtgccaagctccatttggtgaatgtcttcagaatgaggacactggacaagcttctcttcacaggtggagtttctggtgtctaagaaggcttgaccgcctgctgaagtttctcctgcatatgctacaagtatatggctgctcacctgtgtgggttctccggtgtttaataaggtgggagttctgactgaatttttttccacattcatgacatgtgaagggcttttctcctgtatgagttctttggtgtgtatgtaaatttgtattttgactgaagcttttcccacaccatgaacatttatatggttttattccttggtgtgttgttaagtgcttattaagatctgaactccat

SEQ ID NO: 475885 - DNA, 1000 bp, Homo Sapiens; identical to SEQ ID NO: 344393

SEQ ID NO: 475886 - DNA, 1000 bp, Homo Sapiens
gaaagagaaacggtaacgttttattactttgtcaacaccaaacaaaacactgttaaccactgtgcaagtttaattcagaagagagagatgtttctcagagtaagcctgggatctttttagccatttggtacgacaccatttgttcccgaatgaaagactagagaacacagtttctctgagtctcttttcctcttctctgaccttgataacttcacatctctgggactgtatgatgaaaagttctacttgcccaagcacagccttctatgaaagactttgaaatggcctctcagcatatactcctggtaacgttggctcaccttacccagctgaggagcctctggtgtacaggaagacagggtgccatacagctgaagaaaaggaactagtgagatgcttaataaaatccagagacagttcattgctactgaagtaatagggttgtttgagtgatgttgttggactgagagtaagaagaggagagttccagtctcagctcagtgcatggggcgtttctcatctggagtatgattctttgcttctactcagttcaagctcctcaccagtaaactttaggtttccttccaagtttgaaattctttgttttttatgattctctttcaagaggccttgatgacttggcattaggagagttgttatgagttgtgggttcccagcgaaagatggatttgtgtataagcagatcctgcagtcttttatctgtgggagtattgaccaggaagtctctggccgttcagcacaggtgtacggccacactgggtgcagtggagtggtctgcaggttcacagtctaactgttttccccttgaccttggtttagtcttgttctctaaatatcagtcataccttaaaatgaaagcctgtaaacccttacttaagtctatagagtcagaaagagagagactcttttgctgacattactgcagcaaaactggcaagtctcatctgagctcctatgctcagctcctatgctgggatca

SEQ ID NO: 475887 - DNA, 1000 bp, Homo Sapiens
agttgcagtaggcaaattatatttttaagctgaaccctaagaaattgtccaaaaatatgtacaatagttatgcacagcacttatgattgctgaataaatgcatcatataaaatttagttcagtttttagcaagagtgaacgatttcttagatgatttttctcctggtctcatagtgcagagtattcacaaatggaccttatatcttctccagacaaccgtcatccccaatttattcacctaggcaaatcttagttcaaaagagtttgtgagaaaggctgacctacaggactaaaaccgtgcttacattgtaggaaaataaaagaaaatgtaatcgaatggacaataatttttaaagcacattattcaaggaggaataagccctgtaacagaatccataaaacaccatgctccatcagtctctttttgctaacagaatgaccaagtattctctccaattaattttaatagcaaaccaccatttcctaaaatgacttaaatgggttcaatcaagtaggagaatgaatccaagggaaaccactgactaggggtataaaatgtgccttacatcatattgcatacatcaaacaatcaaagaatttaggcttcaaattacaagaaaaaaaaatacctttaagtcttaccctcaaggtaagataggaaagtgggaaatgctgtctgctcactggcattccataaaatattcactgtaatttctggatttccaagacacatctatctagcagaggtggtttgtcaagtctgagcttttccacctgtccacccctgtagcaatggggctgatgttcacaacctgcagaccatcatcagcattcatggcaccccgacagataaccccattaaactctctccctgactcaggtaaacacttcacaatgtgagaaggtgagaaagacattattactgaaataaacctgaaagctgctctaagtctatagagaaagtgtaacactcacaaatataaataccattacacactat

SEQ ID NO: 475888 - DNA, 1000 bp, Homo Sapiens; identical to SEQ ID NO: 344394

SEQ ID NO: 475889 - DNA, 1000 bp, Homo Sapiens
tttttttttttttttttttatttccacaatatttattatgcaccaacaatatgccatgccctgttctgggcaccagggatgcacagtaaacaaaccaatctctgttcccaaggagctgacagtgtggaggcagcaaatcaacaagacgacaaacagaaagatggttgcagatggtgagacatgctgtgaaggaagcaacagggtgatgcggctgagagaggcagaggctgcagggctgctttacggggaatctgggagacctctctaaggagctgacctgcgagaagaagccctgtggaaccatagcaggagcagcaccatgaagagctagatagaaaatgttgaatgaagcccaggcttgagaaacggcaccagagctgtggtcagaacacgggagcagacagtggaacagcagcgaggtggtatagcggggtcccctctgcccactgccacctgtgggcctcataagggcaagctcggcccatgaaggtagcaggtatagcttcagggaagtgtcagaaacactggaagtgttatagcatcatctgcaattgactcattgtagaaatggaaaggaaacagctcttgccttccagggctattgtaggactcactataacatctgtattcttccagtgcttatgctattgcctggcacacagggagagtgaaatgagtgcttgcaattaacatgaggcagggacttgttcatgaagcagctggcaggtcctgctggggttaggcctgtaagtgtgaagggcagccacagggttggaggcatcatctgagttacactttcagaagattatctggttgtgtgtgtgtggacaatggatgcgtgcatggtgagaggcaggaatggagggagcgaggacatcagagcagccaggtgggagtgctgctgcctggaacggtggacagaggagagcaatagaagaggtgcagtctgggaggctggctgagatccccacctgctcagctgggcttattcccagccaca

SEQ ID NO: 475890 - DNA, 1000 bp, Homo Sapiens
gctttaatatgcatttattcatttcttatcatttaaattggcttttactcatttgtgaggaaagttgggcaatttttcacattttattatgcttaaaattcatttttatgtatttttgtagagactggccacagagatatttatatttatgttgtttccttgaaggcttctggcttcagcatcatgcaaagaaaagccttctcaactttgaggttttaaagtgatgctccaatagaaaaaagattaaataaagcatttctggagtgataaagaaggtcaagcccgttccatttgcaagcatttggcttgttcagaacttttcaggaatgcgtgtcttgggtgtagagtggcataagtgtatttctttcccatctggatgcctggttaaaatggttgttcccccttccattgaacaattacgaacagctccaatctcagcttctggtgaaggctggagctcccgatctgaagggcgaggtcggggctctggtgggagcccctgcaggatgcccccctcttcctgatgttgtttgccacccattcctagggcctcgtcgatcctctgtaggtagcttccaaataccagctcctctgggtcttgttaaaatcctttatcaatgcccatctttctcagcaggggtgacctttaactcagctttgctgtcactacctgacttggataacctccaaaggaaggttgccatggcgatccagcattcagctcaagcaaatctggtttctgtatcttattaaatgttcccagtcctggctgactctcataagatgcctcttctggtgcctctctatgcttccgcaattgaatttgcaatctgtacacacatcagctacacagaatatctgctttgggtcgaggatgtgtcttatgacaagatggttgaaggttggtagaattaagtggccttcagggcttttgagctgagatggtgttaacaatgttggcttcagcatcaaaccatccactcgtgagctttggcatctt

SEQ ID NO: 475891 - DNA, 1000 bp, Homo Sapiens
ctcttgcttttgctattttattttcttctgtttctgaagatggggtgatgttatcctttaggtatctggcatgtgacatcatgtaatttgtttggtagttactgtgttctcagtttcccaggacacgtgggagtggctaagtatttttaatgattgtttccactttttattttatatttctgtttctcctctgtgagatggtgagtaatgctgtgcctaagaagggagcggaggggagtgctatgtggattcagtatttccttgaagatcagattttaatattttttttggtggaagattttctcctcttcctccgttccatcttcagactttgttcccttgacaagttcttactcactgatcccctggtgtttcctttgccattagcctcagcactgaagctgctgtaatcccagctgctctggaggctgaagcaggaggatcacttcagcccaggaatctgagatcagcctgggcaacatagaaagaatcaaaagtgatacagtctaaatgatcatagtctaaatgatcttcatcctgtagatacacacagttggttctggaaccattgctgcaaatccttctccagcttggtggagaagtcactatggagctggcacattgctgctgagtcatcccctccttcacctcataactcatcatctaattgtgtttctatgttttcagaaagttgaggctcaggaaaagtaagcaactttctctccacctctcagcaacctatgcactatacttcccttatcttttataagtatccatcctgtagtttctagatcctcagtgaattatgacatcactaacactcccagggatgtagtttgaagagtataatttttttcccctagcactcagtacttatactaatttctagatctcgagacctgattgattgtcttgagcactttcatattcagagtgatcctcaacagtgaagttttaatatttctttcttgataataggagataaactaaatatgtgttt

SEQ ID NO: 475892 - DNA, 1000 bp, Homo Sapiens; identical to SEQ ID NO: 246593

SEQ ID NO: 475893 - DNA, 1000 bp, Homo Sapiens; identical to SEQ ID NO: 344399

SEQ ID NO: 475894 - DNA, 1000 bp, Homo Sapiens; identical to SEQ ID NO: 344400

SEQ ID NO: 475895 - DNA, 1000 bp, Homo Sapiens; identical to SEQ ID NO: 344401

SEQ ID NO: 475896 - DNA, 1000 bp, Homo Sapiens
catttaatgcttttattgttttaacacagataagctatggccatgtaatctgtaatctctgatttccaaaatgtgaaccaagaagtataactcaacttagtcttataaaaattagatattttccctcatggaaaaaaaaatcagaaaatactacatggtttttttgttttttaagttttttcctatactactggtttaaatcactgtaacagaacagaatatgtaagcacattctggaaccttacatctaagattaactacttatatttaccttaataaatttaaagcaaaatacagctctttatccaaacagacttctttcagaacaatctttccaaaatatttaatacagtgattttctgtttctagaaaagactagagtttccaatccttcccacctgaacaaaaacaccactctctgactatcacccaaagagaaaagaagaaagaaaaggcctttaggatgcagtgggcacagactgtaacacccagacacagaggaaagtcagtctgcggagggagcctggaatccagcctccacagcttcccgaggggtgtgctggaggccacctgtggacatgctcaggtgccgagcacaaccagtttgtggagctggtagagaaaggtgttcttccctctgctgctctcacggtcggcctgctccatgaccagctttggatcaacctgattccactcgtagggcttttcatgccacttgggaacaatcttctcccttggttttgactgacagaacaaacctaaaagcttctgacgggcaatgtcttgaagctgcgcaactctctctggcccaagacacttgcatccatttggtccatcacagactagcttgttaatagcagccctgagaatattaaccttggactcgtaggactcctccgtgagctcggcatagccctgctggatgaggacgtctcttatgttgatggcatcctggacccctgagtactggtacacatccacgtgcaggacgctgtgcacc

SEQ ID NO: 475897 - DNA, 1000 bp, Homo Sapiens; identical to SEQ ID NO: 160888

SEQ ID NO: 475898 - DNA, 1000 bp, Homo Sapiens; identical to SEQ ID NO: 159991

SEQ ID NO: 475899 - DNA, 1000 bp, Homo Sapiens; identical to SEQ ID NO: 344403

SEQ ID NO: 475900 - DNA, 1000 bp, Homo Sapiens
ttttttttttttttttttccttaaaatgtcatactgtatatgatttattatgttaacactcaaccacatcatattatttatgttctgtatattctgaaaaagtgctgcttgactgacatcgtcctttttcttttgtaagaaatcaacaagataaatgcttcaacaatcaaaaaaaaactttaaaattctaacattttccttaaaagatttatacttttttgataaataatcaaagatacagcacccttgtctttcatttgatattaatacatgatgttgcactcaaccattcttattacccaaaaatatattccacaatactatttttaaaaccataggccatcatgcgtcagacatcacaagtatagctaccatactgtcatatttgttttcttcttaaaggtgcaatgcttgtaaatgggatttttttaaatctaactggagttttattctttagcatataataaatttaatgagaactaatctaacaatattttattttactagaagaaataataagactttagattaactgtttcatatttaagaatacagcatttcttaatggttaaacacgccaaaattttaaaataatccagagaaagagactttcactttggagttaaaagcatggcagaaattctctatcactcactgtttcatcagtttgtacctcacaaaatgcatagacaggaatttaatataaagaattagttcatttatacagaaaacatatcttaaacacttctttttggcaaaccaacataggtaagcagctctggaactgcaaaatgaaaatttgtaaatttttagcaaactaaaatttatttttaggttattattcaactgtggttgtaatttaaaacctgaggctgtgcactggttgttagcttaaaattacctttccttataacattgtgcttccattgtataacaaataaaaattaacaagaactagaaaaatttgttgttgaacagtgctaggacatacagacaaaaa

SEQ ID NO: 475901 - DNA, 1000 bp, Homo Sapiens; identical to SEQ ID NO: 470555

SEQ ID NO: 475902 - DNA, 1000 bp, Homo Sapiens; identical to SEQ ID NO: 344404

SEQ ID NO: 475903 - DNA, 1000 bp, Homo Sapiens
ttcttttcaaagatttaattagtcgaaaaagcacactttaagatggacatattgttcatttcagctaacctgcgcaattacaaactcgctacagaagaaatgataagaaacaaaatactaacaatgaacattgtggcagatagtgtggagggtgaagcattgtagaaaatttgaggttcttctgtctccatgggaggttttagaaaagcatctatacagacaccatcagcaatacacacatcaacagcatcagtgtcttttacatcagctttctccttacaactcaaggtgctataacagctgcaataaaatttttcagaaaattgctccaggtcttcaagtgtcggttttccacgtactgtgaactttccacctttctcaagttgaatagcaaaattatctgggttgaggtgaagatagtcacttgaattccagtttttccttatacacactccttgctcctggcaaagcacttggctacacattttggctgctagtgtgacgttgattatgtaaggattcagtatagtctccatgtaattgtctaggagcaagcaagatttcatacttcgcattatactgagggttccccatattacaattccagaagcacccagagcaacagtttcgccaaatgtatacacaagttcatcttgagaaaggaatttcaaaacttgatcagtaaaaactatgcgggtatatgcaaaaaccggaagtggactttttgcatcaggtattttggaaactctgatggcttcccgaactcgattgcgcacatagagtgtagcagctacaggagactgctgagtgttcaaataaatggatgggtaaagagcagtgctttcattccacaaccagctgagatcatcatttctttttatttctacattgaagcaacttccattgtaaccgggtttcttatagtgatggttgtaacaatccggaaaaagataataaccccacaagtgatttggccgaagtaattttcccaattttatag

SEQ ID NO: 475904 - DNA, 1000 bp, Homo Sapiens; identical to SEQ ID NO: 160889

SEQ ID NO: 475905 - DNA, 1000 bp, Homo Sapiens; identical to SEQ ID NO: 160891

SEQ ID NO: 475906 - DNA, 1000 bp, Homo Sapiens; identical to SEQ ID NO: 344406

SEQ ID NO: 475907 - DNA, 1000 bp, Homo Sapiens; identical to SEQ ID NO: 344408

SEQ ID NO: 475908 - DNA, 1000 bp, Homo Sapiens; identical to SEQ ID NO: 160892

SEQ ID NO: 475909 - DNA, 1000 bp, Homo Sapiens; identical to SEQ ID NO: 344411

SEQ ID NO: 475910 - DNA, 1000 bp, Homo Sapiens; identical to SEQ ID NO: 344412

SEQ ID NO: 475911 - DNA, 1000 bp, Homo Sapiens
tttttttttttttttaaaaggcatgataggagtttatttacagacaagacacagcaaccagcacccactcaggctctgaccaggggaggtggtagacaagaccccagatatatataaatatacatataggtcccagcaccatcagcaccagaacgttccccagccaggtccctgccagaaggaccaagagtcaggcaggattgaggacatagaaaggagagggccccagtctttgccaggtatcagtgatcacctgttatggtccccatgtcagaggaagaaactatccttggccttgaagtgtggacactgaggagcatgaggacggagagaccctctggaggcgcccccattcctgtgtccagcctgtgccctcaatgccaaggccacagaagcgaagtgccagcaggagcagcttggggaatggagacactgcaggcccctccaggaccatccaggagccaggcatggaggtggggtcctaggccatggctgcccatcacacaggagcctcccccagtttgctggtggcacttgtgactcgcttattctcccggaggtttcggaggcgggcgctgaggctgctgatctcttccacataggcctggggcacccaccccttctcaccatctgccaggcggaccccttccagccagccgtcactggtccaggtcctcactgacaggatgtcagtcttctccaaggtcagctcatctgggtgcagtgccttgtatgtcctaacacactgaacctgggggcaatcttccccctcactgatgacctccttgtcctcctgggggctggaggggcacaaggctgagatccatcgctgcttctcactttccgtccgggcccgcagcaggaactggtgcttcatgtgctgcccgtggaggagctggaggaggaacacgtggccggggatgccctgcagcttcaggctcaggtcccgcacctgcagctcagccatcttggcatggacgaaaacggcaaacttccctag

SEQ ID NO: 475912 - DNA, 1000 bp, Homo Sapiens; identical to SEQ ID NO: 344413

SEQ ID NO: 475913 - DNA, 1000 bp, Homo Sapiens
tttttttttttttttttttttttttttttttttttttttttttttttttttttttttttttttttttttttttttttttttttttttttttttccaccagtatttgtcactttattttttttaatgacaaaaccaaaaacagacatggggtgggtagctgggggcccggacacttgggaccctgacccctttgtccctgcactcagccctgtggccccttcctgtcctgtctcaggccaggctaaatatgtgccttcctcagggctgtggggcaggcactagggggcctttcccttcctttcctttctcaggccttgctcccccaggatgacccactcttaggggggtggtggcatctggacaaatgccaccacagcaggtggggtggcaaagctacctggaatggatttgtgtgctgatttttaaggattattacagataattaaacagaacggtcagccttctgtggtcttaacccctgggtatttttctgttctccctccccatctactatcccaggcttgggcccaactggtcttccacgatgtcacctttgccctccaaggcagtcttccccaggtggtgcctctccccctactcagagcccagcctgtctttaagagctgaggctggaccctcactgggagccctggcagagtttgggtgattgctatgggggcagctatttctagacttcagaacctgccatctggggtggccagagagtgttgacaggccacaggaggagccaggaggctggtgccccttcccctgaccttgggccacccaaagcgaggctttggcaccagaggcttggctaggcctggcttgaagagatcaggagagggaggcagccattaagttaacaacaggttcttgtacaaaaatctcaccaaggaaatagtgtagatgtggcagccagcagtagggaaggagagacctgcccatagccactttattccccccccaacacacacccccaggccccagatccaaatgg

SEQ ID NO: 475914 - DNA, 1000 bp, Homo Sapiens
tttttttttttttttttttagtctttaaggtacccagagtcctcagagaggccagatggcagctgagttgtttgggattagtgagtctgctttggggccaaggacagccaccaggaaatctccagctgggcctgctttctcttccctgcttccttcccacccgactctcacctctgtggaaactcccaaagtctcagaagtcgtgatttttccattggctgctggggttaaaattgagccaccaatgccttcctacagagaagggggagggtggtggatgaaaaagtgaaattcctgctcctgaaccttatacaggagatttcttacccgagggaatttgaaactgttccggaggagaatttccccagcccagcctaatttttaccaatctgagaaattgcacctcccacttcccctttccccccttgaatgatctctgtcaggctgcctgggcgctgctgtaacttctgaaggttacaacatagaacaccacggttgtcaggtaacaatgacggaaacacttgctccctgagctgagcattgtgttattatatcagaatagcctctagcgagggagagagtatatttcttcataagggggaggagagaagcaggcacaggcctcctcttccagctgtgtctcttctagctggtcaacatcaggattgggcctgtgatttccaccgtccgtgaaagaaaggcagccctcatcaaccacaaatgcagagttatcttgagggtagatggtgtagtattgaggaggacttgacatggcggctgctgcccctccagaggttatgaggccgcaggggctcaccacagactgcaggtagctggtatttatccccataggctctggagaaccataaggaggagggatgtactgcaccacagtggccccatggaaggtgatgggttggttgatgccagtgaaaacaaatgatggtcctcctggtgtctgttccgagtccgggaccctttcctcactttctttgcacaa

SEQ ID NO: 475915 - DNA, 1000 bp, Homo Sapiens; identical to SEQ ID NO: 344414

SEQ ID NO: 475916 - DNA, 1000 bp, Homo Sapiens; identical to SEQ ID NO: 344416

SEQ ID NO: 475917 - DNA, 1000 bp, Homo Sapiens
tggagaagaaggaggggcaaaacttcctggggtcaaaggagtctggagggaggtgggaaagcgaggcccctgcccaggtcactgccggaccctaccccggcgggtgcggaggggacctgaggcccgggcctgtgcctgcgccgcctcgctcatctccctgcggatgtcaccaagtgctgtcgccggggactccagcagcctctggaagaggctgggtcgtccggccggtggctcccggcactggaaggtgacggctgtgccggcatcagccttcatctctctggagaagccgtcagaggaaccatcaaagcagcggccaatggcgatctccttggccaagcgtgggctctggtcagtgacagtgtagacgccatagttgtggcccagagggtctaggggggccagcatggagaaggcagctgggtcctccgcgggcaccggtggggggtgccgggtcaggtaatcccgaaggagtccgttgacggccacgcgccggcagctgccctggggcataatggtcaccagcgtcctgtccacctgccgctggtcgaacagcatcccgctgcacttgaactccacgcaggctgccgaggtgcccggacgctcggggtctcgcacactccgggcatcccgaagtccgtagagctggccgcgggtgcgtgggtggctgccccctgcgttgtgggagcggaccatatactcctggggaccctggatcttcaccttgaggaagcaggcccggaactcctgcgggttgggccaccaggccaggagatcgccagtccaggaggcaggtgtgccctctcggaaggggaccacgttgtactcgtacttgtccgcctccaccctggcgaagcggaagtggctggcagtcaccggggccccctggcattcccgcaggctgcgccacgggtacacaggcccattggcctcggcggggtcacctggcctgggcttggcgaggttgatgcggaagccgttacgcttgaaggcgggatcg

SEQ ID NO: 475918 - DNA, 1000 bp, Homo Sapiens; identical to SEQ ID NO: 344417

SEQ ID NO: 475919 - DNA, 1000 bp, Homo Sapiens
gttgccaaagccatcatgtgatttattgaccctccactgggacaagggggaacagatataactttgtgattttattataaggaggctgggttaatatttctaggtgaaacaagctactataccaagttcaaacatctgaagagggaggttaagaaaccctgagtgtggggtgtaaggattattctgtcctggggctgtacagacgtcgtctgaggcagggagcaggagaagaaaggacacattgtgacccatttccaacacctcctgtgtgtagaggcggaagttccttgcctggtgtagaggtatattgatctgctgaaggagagctttcactgccatctggagctcgtagaagaacaattgcatggggcagtcagaagtatgatccacactttccatagattcagagccagaaagcttttggatccattcccattcctctctagaaatattattgttttcacggatcttcacgtggcagagaatgttgggcaacttttgggtaacaagaactttgatttgatccacagagctacagagctttaggtaacccagatataatccaggaaagagacgctgatgactccttttgtgataggatagaatatcctggatggttatcagtagaatgtctaaagctgttggctcctcaggtgttgatagagactttctctggctttgcagctttgagatctgcatccatttgccattaaaaaatgaataaagcatctccacctccctgatggtgactatgagtatgtttccatgtcgatctttaatgggctcatagtaaactcttcccaagttgtgtgtcccaagtaaattctgtagctgtgctgttgctgcgagcatcttctgccgagtttgcagcactgtggatgaggatgaggatattggtatgctttgcctcagccaccttatatcttcccacatacaagacagcttcgtgaaccacagaaaatcttgtgtaatagaactggtgtgagagtcatctatttca

SEQ ID NO: 475920 - DNA, 1000 bp, Homo Sapiens; identical to SEQ ID NO: 344421

SEQ ID NO: 475921 - DNA, 1000 bp, Homo Sapiens; identical to SEQ ID NO: 160894

SEQ ID NO: 475922 - DNA, 1000 bp, Homo Sapiens; identical to SEQ ID NO: 160895

SEQ ID NO: 475923 - DNA, 1000 bp, Homo Sapiens
tttttttttttttttctttttttttttttgaacattagaggtacgactttattaaatctgtactttctgacccatttatccaagtttagtgacagtttgctctaaactgcttttttaaaaacaataatatggtaaatttggattttgtggaacttaaactatctcatgtcaaacacagtgcaattttggatttcaggattatgacagttgtgttagaaacaggctacctgggctatgtctgagttatgttggatccctgatgtaaagtttgacagtgtatgttgtgttcaaaatcaacagttctaaacaagaatctaaagatcccctagggcaatctctggactttggggggtccacatactctggaactgtgtaatgtgaatatgtatgttttgttctattttcctaggagatgatccacagcttttatcagattctcaaagggcttataaccaaaaaaggctaggacccagagcttcatgtgtttaaatagggaatcttccactctagtcccctttatcacagtgtgttgttcagaacaagatatagaaaaggaaaaaaaaaatctgctttgctcttcaaccctcttttctctaggctatagttaaagatgtttatatgatagactgacagcccttatgtctcagctgaaattgatttactatcaaatcagcattaaagggaccagcaaagattctgacttttatttattttgctgaagctttcataccattccaggaagaatgggcagttttggccagtcaagaaaagctgacagtggccaagggagaacctctatattcaatttacagaatgggtgcagtttttaacttgtagggcacaaagtaaatttgatattgtcccatctgatccctgtccctgcatctaattaagatggtgtcagtttgaggaagtcattgtcaaaggctgctaatgcagtaaaggtgtgcctaactttcatcacatccagcatgggaaattgtggctttttggaaatgac

SEQ ID NO: 475924 - DNA, 1000 bp, Homo Sapiens; identical to SEQ ID NO: 344423

SEQ ID NO: 475925 - DNA, 1000 bp, Homo Sapiens; identical to SEQ ID NO: 344424

SEQ ID NO: 475926 - DNA, 1000 bp, Homo Sapiens; identical to SEQ ID NO: 344425

SEQ ID NO: 475927 - DNA, 1000 bp, Homo Sapiens; identical to SEQ ID NO: 344426

SEQ ID NO: 475928 - DNA, 1000 bp, Homo Sapiens; identical to SEQ ID NO: 344427

SEQ ID NO: 475929 - DNA, 1000 bp, Homo Sapiens
ttttttttttttttattcttagtaagtttcattcatctcctcaggcagccccagtctgagggggacacagccccatcttcagggagctccagtctgagggagaagcagccctttcttcagggagccccagtctgagggagacacagccccgtcctcagggagccgcagtctgaggggagacacaacgctgtcctgagggagccccactttgagggagacacggccccatcttcagggattcccagtctgaggcagacacagccccgtcctcagggagccccagtctgaggggagacacagccctgactcagggagccccaggctgaggggagacacagccctgtcctcagggagccccagtcggaggggagaaacagccccatcctcagggagccccagtcggaggggagaaacagccccatcctcagggaaccgtcagtctgaatcggagacacagccttgccctcagagcgctccctgtgataggagataatcctcccatattccccccttctccagcccttagtgaaatcccagcctgaagggagagatccaatttcctgttctcaagcaacctctagtctcatggcagaaaaatagctaccatccctgatggagaagatagggtgccacccaagtcacggactgaaactcaagatgacaaaagggagtgctggaggggtatccgggagcatgtgcagccaccacggccactgcaagtggggagcctgacgatgacagagaagagggggctcccagagacacttgactgggcacccttaccaagaaacatgcagaccacaaaggggcagcaatcatggggactaagatcctgacgctgaggaaaaggatgtaggcacgggcccagcgggccggtctaaatcagaggtccaccttcactgggagggcagtcggagaacccacattgtctgcagactctcacattcaacctaaaacccatgtactcattgcaagccaaacaaaacctcactgaaggtaa

SEQ ID NO: 475930 - DNA, 1000 bp, Homo Sapiens; identical to SEQ ID NO: 344428

SEQ ID NO: 475931 - DNA, 1000 bp, Homo Sapiens; identical to SEQ ID NO: 344429

SEQ ID NO: 475932 - DNA, 1000 bp, Homo Sapiens; identical to SEQ ID NO: 246594

SEQ ID NO: 475933 - DNA, 1000 bp, Homo Sapiens; identical to SEQ ID NO: 160896

SEQ ID NO: 475934 - DNA, 1000 bp, Homo Sapiens; identical to SEQ ID NO: 344430

SEQ ID NO: 475935 - DNA, 1000 bp, Homo Sapiens; identical to SEQ ID NO: 344432

SEQ ID NO: 475936 - DNA, 1000 bp, Homo Sapiens
cattaaaaaattctttatttagtatattctgtcactcagagagtaagcttgataaacataggttgttttaaaatattatagtaatggtttattgataggtaatttggttagtagagttataaatacaaaaagggaaaggttaccagaaataagacattatttctaacaaatcttcaagaaaatcttgattattaaagtcccttttatcttacaagtgttgcatatacagttttggctcttcagagccctctaccaataaggcacctgcaatagtagataatttgctaccgcagccttagagagcagttcttagaggtctgctggtgcttctcttgacaaagcacactttttttttgtttcccccgagacagagtcttgctctgttgcccagagtcggagtgcaatggcatgatctcggctcactgcaacctctgcctcctgggttcaagcaattctcctgcctcagcctcccaagtagctgggattacaggtacccaccaccacgcccagctaatttttgtattttcagtagagacagggtttcaccatgttggccaggctggtctcgaactcctaacctcgtgatctgcctgccttggcctcccaatgtgctgggattacaggcgtgagtcgccgtgcccagccaacaaagcgtactttaaaaaaaaaaaattattttttatttttttaatttgagacagagtctcactctgtcacccacgctggagtacagtggcataatctcggctcactgcaacctccacctcctgggttcaagcgattctcctgcctcagcctcccaagtagctgggattataagcatgcaccaacacacccagctaatttttgtatttttagtagagacagggtttcctcacgttggccacgctagtcttgaactcctagcctcaagtgagccacccgccttggcctcccaaagtgctgggattataggcatgagccaccatgcccaggccaaagtgcacttttaatcaagaca

SEQ ID NO: 475937 - DNA, 1000 bp, Homo Sapiens; identical to SEQ ID NO: 344433

SEQ ID NO: 475938 - DNA, 1000 bp, Homo Sapiens
ctgaggaatctttacatttataaaaatcgaaggcttaattttgcaaatacaacgttcaagctgtatgagcaaatttaacttacatgaaaggcacaagatgacatcacgttgaagaactttatctgttaatttcataaagtctagttacaagttactagaaacttcataaggaatctcataactgtttttaacatgatgttccaattcaaactgagaactggatagtcttcatatcacaaatataaattgaagtaagagtgaagatttagagagagaacagtttcttattttgaatgctacctgctttacgcagtgttggttactaaatactcagagcagaaaattaaaattgaattgttttccattttcgacagcttatctactgtattttcagtttgtaaaaaatgtattttcacactactgcaattttgaagagtcaatcactgaaagaaatttgaaagtaaagtcctgctctattagcttcctacattggaatacaagaatacaggaagtgctttcaacagaaagttacgtagttctacagtacaacctgtctagaagacttgcaagggaccagtacagtgacttggtctctttggatcaggtgaaagcggaggcaaatgaaaaatgaacttttaaaaaagtaacatattaaaaaaattcctgtatgaaaatgaatacttgtttgcacttagatttagtgcttttgagaggaactgaggcacaatgaacctaagtgcacaaagggaacatgcctgaaataaaacaattttcaatgtgactgaaacccttcaccattagatatgacttatgatagagttggagaactactttttcatattaaagaacattacaaacaccagggactggccagtcaaactatgttttataaataatatgtagggtgatattaaaattgtattgcaactaaaattctggtttttaaaatcacttataattttgatttttcataaaatgactggctcttttgctaaattaa

SEQ ID NO: 475939 - DNA, 1000 bp, Homo Sapiens; identical to SEQ ID NO: 344434

SEQ ID NO: 475940 - DNA, 1000 bp, Homo Sapiens; identical to SEQ ID NO: 344436

SEQ ID NO: 475941 - DNA, 1000 bp, Homo Sapiens
ttttttttttttttttctattccatacctttatttaatctgcatcttctcagcctcctcccttccccgccaccccttagagggcgtggaagccctcgttgaaagggaaggaactcctctctcctccctgggggagggtcagtgtcccctgggccaagactcgttgatgggagaagcaagggcctgcgtggtggagcaaggacatcatccaagaggctgtggccaaggcccagcccctcggatgccctctaggcctgggccccatggatcatcaggaaagtgaagagtagataagtccgggagggcaaggaacgggcgtccctgcgtgtgtgtggctgatggaggcagacatggactttgggaggcaggagcagaggccaggggatgtggggaccaggtgaggccctgagaaggaaccccaggttgtaggggtagctgcatgtggggggagtgactggccctgagcagcgggagagagggcaggcaaggaggaggggcctatcaggggaggatgggaatgttgggtgagtagcagggccaaggccatggtgccaccacagccagctcttcagccccagggaagccaacctggctgggcatggccccaagcctccaatttgtgcttctgcgtcactgggggggctcccagcatggcctcagccccggtagggaagtgtccacaggcagcctctgctgcaggcaacagctggccgcaggactcctcctccatcccagcctttctggaagcttcttctcctgccctttgtgagaggccttcaggccagatcatcggccatcttgggggatgaagccatgctgggggcgattcttaggcttccacttcctccaaaatgaccacaggtaactgcattttagtctgtttaaggacccccacccccaccctcacccctgccccttgtgtgtggctggtctgttttcccgcctgttttggacaacaatcactcgggcatctaagcccatggtggaatggtggggagggg

SEQ ID NO: 475942 - DNA, 1000 bp, Homo Sapiens; identical to SEQ ID NO: 344437

SEQ ID NO: 475943 - DNA, 1000 bp, Homo Sapiens
acactttataagcctatttattctgtttgagtgccagggaaaccctttgcaaagatttcatccagaaccacaaaccctgtgaattgggagtagtcgtattggagcctcctccctcctcagatatgtcaatatcagctactctgctggagtctaaaggcttggtgtctttctctatacatcccaccccaccctttcttgtgcaggctttgattttgaatgactgatgagtcactgggaaagacctccacaccagctgcttgggtcttcccatccttcagcatctggactaaataaaacctcagcatatgtcttcagtgaagtaagatatggtggcctgtgaacaagcaggtgaccaaagttctgggcaaggattgccagcctcaggctctcttccccaatgattgctggactcctgggtatatgcttgaaaatgccagctcattcccaatatgtatgatggagtaagaacttgtaaatatgtactgaaaacctctgacaataaagttctcaccgaaatgttgcacatcaccaactccatcttccttgggcacctctctcttggtatcctcctcctccatcaggatcttctgctgaatctcaaaggataaactgggatcagtgccagcctatgaaccagcgtgttcttgaggcccccaaccaagccccgggcaatggtcttcactctgggggtgaggatcgcttgggagacatggaaggagccccgtgaggcccgctcactcagagtggtctccaagaagaggattagtttgcgcacacttgtggtgtttgcccagggcgctggaatcttctttcctggccacaggaaggggtactgcttgtagaagggacagtggtagaaaataagaacctggcagttcttctcccacagagttcgcagcgtcaaactttccacactgcaggctgggcacagcttgtttccaaaggcctcctggatccgcagaaccaggcatttgtgatgggtctcatccatggcatagaa

SEQ ID NO: 475944 - DNA, 1000 bp, Homo Sapiens; identical to SEQ ID NO: 160897

SEQ ID NO: 475945 - DNA, 1000 bp, Homo Sapiens; identical to SEQ ID NO: 160898

SEQ ID NO: 475946 - DNA, 1000 bp, Homo Sapiens; identical to SEQ ID NO: 344439

SEQ ID NO: 475947 - DNA, 1000 bp, Homo Sapiens; identical to SEQ ID NO: 160899

SEQ ID NO: 475948 - DNA, 1000 bp, Homo Sapiens
ttttttttttttttttttttttttttttttttttttttttttaagtaaatcatgactgctttatttgctggactggtgcctctcagcagattcaggggtcgtgcagggctggttaccacaaactcagtaggagtgcaagggctgtacccccggagctagacagcctgggtttgaatctcaacttctcccttttcttgctgtgcaaccttgggcaacgtgcttactctcaatgtgagtgactcagtttcctcatagcctcattgtgaggaatgaataagtccacataaaacgcttagcacggggattggcaaagagtaggcactcagtgaatgtcagcctttgtgattgctgcagttcaaagactggctcagtgtctctggaggaattgtctatgaccttgccaagtagatgcatatggacatggaatgaatggtgtctgctgtggttctaactccttatgccactattccagtctgtaagtatgcatgtgtgtgcagggaatatgcctgtgacagtggctgagtgtactctttactgtgaccatgacttgtatgactgtgcatgtatttgaggaagccctggccagacccagagtgcattaggttctcaatatgtgcaactcagtgtgtggccaatcaccacatgctcttccgctcacaccacggtgcctgccagccagggtagcatcgacatttgaactccacagccatctgtgcctgatcttcaagtgagagggcaccccgcaggctcaggggcccaccaccaggcgtgagctggatggagaaactggcagggttaaggaggaggagggctttggggtggctggtgcggcggacacagcggccatggccggagcacagggcttgactgcagagaagggccccactggtcacgttcaggatgaagggccccagtgtagtgtccatatactccttgatggcctgacatgattccttggttcttgtattttcccagctcacccagagcaccactccagctg

SEQ ID NO: 475949 - DNA, 483 bp, Homo Sapiens
tttttttttttttttttttttttttttagcaggcacatgaattttaatgaggggggttgacagcaggtctctgtgcccagagagcttgagaatggtaatcaccagcactcaaggtagtcttggccactgcttctcataagaccagtcggtattttcctctttgccagaaatgcttatcctcatgtaggactggaggcagcaggactgacaatttctgcaatagaggtagggctgttcgttctttttgcaagaggccctacaaattccactgttacccatgcatcgaaggatgtggcgtttgcctgatatcactggttcttctatggccagaaggatggcaagaaacaggtaaagaagtttcatggctggcagacctgagaggaggaggtggctgagctgcaggggaaggaaatagggttccctgcagcacggcagagatgagctttgcttttatcagcagggctgtgggcagtgaattagaac

SEQ ID NO: 475950 - DNA, 1000 bp, Homo Sapiens
ttttttttttttttttttgagttactctgatgtttattttaatgcatcttagtccacacagttggtataaaatcagaaaatgcaaagcaaaaacaaaaggtctggagtcttagcatcagaagggcaccatatatacatctacagttggtggccaatacaagtcattgccagacagtccttggaggcacagaacagcctagacccagccaagctctaggaactcacggtcccaaggagtctagacgcttgttctgatgctccgaccgtaagaaaaatgtgggagtgatgaaggctttatgatttactcattatagtaataatagcagcctagctaggtacaaaagcagttataaaccatttatattacacagaattattcaggtctccattctatcttatgttgtaaaattgttaattggatttccagtgagttgtttagatgattagtgataataaggaatggtaaatccatagcaccatttcaaagacttgttgtcactgatttctcatttagatgtgtgacgaagatactccacctgtaagggcaagtatgccaatgccacaagccgtgtttttgcaagggctccagtttgggcattttgtccgtgtgcgcgtaaagcttcacacagaggttcgggcagcggctgtttctgttggatgcactgggtcacccaccagaaaagggcttttggacatttggggtttctacccacactttggttttctaaatgaggtggactgggagggaggtatcttctttcagatgaaagggaaggggcgagatggagttatcttatttctgggtaaaacaaaacaaacaaacaaaaaacaaaacaaaaatactgagctggattatactgttaggatgtaaagttccttagctacttctttaaggctcaacacgaggctgatggtcaacataaaaagcaaacaatactatgtacatatatgtaaaaagtgttataaataggttttataaaccggagatattatatacatc

SEQ ID NO: 475951 - DNA, 575 bp, Homo Sapiens
atggtcatccaatccctgatggaattttcctggtgaaattggattggtagaatcagctctttggatattatttccagcagtatttctagttgttccataccagaagtaaatgttaattaattatgagtaagagctgtctgagaaggtggtggcatagtctcggaagtagcagtctcagatggtggcatagtagtctcgggagtagtggcctcagatggtggcatagtagtctcaggagtattggtctcaggtgtcatggtttctccaaatttagttgtgtcaaatgttatcagatcattcaacatagatactggggaaccagtaaaagagtccacatcactataatccaatgttatatcctctaggtgaatcacaggaaatgctggtcgtcgagtatattcatgtgatattatagaaatgcagcatgatagcttgttcctacaaagaagtatgtacctttcagtatctaaacatcgtcttctgcaatgtcctacattattcttccaacatttttggggttcaaagctacctttggtcacccgagttagcaacccacagataatgaaggtcagcat

SEQ ID NO: 475952 - DNA, 1000 bp, Homo Sapiens; identical to SEQ ID NO: 338847

SEQ ID NO: 475953 - DNA, 1000 bp, Homo Sapiens; identical to SEQ ID NO: 344443

SEQ ID NO: 475954 - DNA, 1000 bp, Homo Sapiens; identical to SEQ ID NO: 344444

SEQ ID NO: 475955 - DNA, 1000 bp, Homo Sapiens; identical to SEQ ID NO: 160902

SEQ ID NO: 475956 - DNA, 1000 bp, Homo Sapiens
tttttttttttttttttttttttttaatgtggaagaatattgtatattatagggaaatgctcataatatatagtgacaatttaaaaagcagattacaaaacaatatgccaagacatgatttctgcccaagtctgccctgatgggtgagctaaccaaggttgctgcactgtgagggcataggggctgcccctcagcccccaccccagccactgggctcctcaggaaaggacacgtgagtgtttactgcacatcctacagataaggagctcacaaggaccctggatgggggagtcctctgaggttgctggagctgctgcagccatcttgtcactgccaggggagagctctctctgagagcgaaggcacagtggaggaaagcagaacatgggggcaacagctagatgggtagggggggacccactcaaggacatactgcggcttcaggcttcgaccagcccagaacgctcgctccatctgagggtcttgatatcagggtgtggcgtcaggagccggagcctacgggttgaaagccaagagtgggcaatcaaagctgaaaccaggcccacgacttaggagctggagagcacacagggctgaacactcgagttggtgaccaggaaaccagggagcaaagtctccagggtgcttgggcaagaccccagatggtctgcagcaacgcacgggcaacacgggatgatcagcgctacgtggtgagaaacttacctccttttgcaggacaacattttccagtccttctgagtaaatcaaagagaagtctcagcttggtgattgcaggtctctaatgcttatttctctgtctctgtctctctctcttttaacaaaagtctaccagcggcctcaggctcagggcctgtctcaggtaaaagcgggttagggtgtaataacagtgatcggtttcattgtgtttatttttgtagctactttctaattatagcaagtgattctgagtttccatttaggatagtaataggaagtttct

SEQ ID NO: 475957 - DNA, 1000 bp, Homo Sapiens; identical to SEQ ID NO: 160903

SEQ ID NO: 475958 - DNA, 1000 bp, Homo Sapiens
tttttttttttttttttttttttccaggctgtcttgcctttattcctggttagggcaggtggtcctagacagcagtttccagtaaaagctgaacaaaagactacttggtactctcttcttggtgtacatggctgtgtcctgcactgtgccccatcccgcctgggacagagacgggcatccagggtgctgggacccgggcagggaggctactgtggagaccaggcagcagtgctgtgggccccaagcagctgtgactgccctggcttgaccagcacagggttgggcctggtgtggcctaactttggcttgagtgtccagggtcatccgtggctcccgaactgtggcccctgcagggtgcaggaggcagcaccgaggttcccgtacagcactgacttgaggaataagccgtgggctggggctacacgtgtctggtgcttgcccaggggatcttggctctccagaatcgtcttcacctgggcaggtgccaaagcccccagccccacggccaccagcacagccgtcatcctccgtacctgtctatacaggaaagactggctctcaaactccaggttccagaaccgcagcttcctgctctcctcgggggtgaccaaggggctggcttggcctggggaaacggagacccggcgcagcgttcgcacggggctcggcaccgggctgccagcggactggaaggcgctgaagtcgtgtgtgccgaggaggtgctgggcggcttcctgcatggcgaccatatccaggcagtctgccgggagagtccagcataggttgcgttcaaacaccggcagctcatcacgccggtgacagccagtggccaggcggtacaggtaggtccgggacgtggctgcgtgacgagcgtggaagtcgctgggcactcggaaggcccgcaggaccctgatggccgggtgccgcaggtgtgtgttgagggcctcggccaggacctcgggcgggaagggcggccggcctgagcggcgctggacgtcca

SEQ ID NO: 475959 - DNA, 1000 bp, Homo Sapiens; identical to SEQ ID NO: 344449

SEQ ID NO: 475960 - DNA, 1000 bp, Homo Sapiens; identical to SEQ ID NO: 160905

SEQ ID NO: 475961 - DNA, 1000 bp, Homo Sapiens; identical to SEQ ID NO: 344452

SEQ ID NO: 475962 - DNA, 1000 bp, Homo Sapiens; identical to SEQ ID NO: 160906

SEQ ID NO: 475963 - DNA, 1000 bp, Homo Sapiens; identical to SEQ ID NO: 344455

SEQ ID NO: 475964 - DNA, 1000 bp, Homo Sapiens
ttttttttttttttttacaacttttttaatatatatttttataaacaggtcacgtgataaaatagcacaagaaacacttaccaaatataaggttatatcttccgcatatacaggagaatgaggtcgttatgtacaataagaaaatgattttaggggttggttggttttgttttcctctctccccttaatttttcctcctacagtcgttggaaatatcacagcttcagttgcattaatactttgggcaaatggacagctgcccctccccactaggggttgtggggaggaggggctggagaaactggctcctgaccactcagccctggagcttcctggggctggcactccagggacaggaaaatctttgggctgttgatctgtttctgattcaacagcatctctctctctctttctctctctctctcactctctttctctctctcactctctggctctctggaaactggttactctcttccaaccagatagggagtgtcccaagattgggtgtgggcgcggtatctcctggggctcaaggttgggatgggaaggggtcccagccccctcctcagcaacagctgagatttgccagcatcccccaggacttccaaatgtctcgggccgacagagcacggtcagagcccatttgggcagacagaagtttgggaagctggggaggggtgaagtgggggtgggggggcaggctagaaaggagccctccctcctcggggtgtctagggtgtgctggccactggaagattggagtcgctgacccagtgctgaccctgacccttggctgggtccactctgcagactccacctgaggagacccacccagggtgaagctcggtgcccaggcctgaactgagcccggccgggtgcaagggctgaggtgtgaggtcggcccaggcctcttcccaggcctgagggtggctacagctcgaggcttgcaaggtgcctgcgccacccctgggttgaggccgaccggagtcagcttgga

SEQ ID NO: 475965 - DNA, 1000 bp, Homo Sapiens; identical to SEQ ID NO: 160907

SEQ ID NO: 475966 - DNA, 1000 bp, Homo Sapiens; identical to SEQ ID NO: 344457

SEQ ID NO: 475967 - DNA, 1000 bp, Homo Sapiens
aaaaaagattacaaaactgaatttattgagattcacacaagatgcacttataaaattagtactgaatgccattaaaacagaagaaatgaacataatcccgaactcccaacagcatctgcaaaggaatggaaatcttctgaaaatgacagcgcagtaacagaataattcaagcggaactgaagatctatccaaaccatgttcctgctctgaaatcagggttgtgtttggcaaagctttccccaaactattccattcacggtggcattgttccttttgttggtaaagggagatggaaaaaataattctaaaatggggctccattaaaacacacacaaagcaattaaaacctttttcatttttaacttaaaatacttcctggtttcacaaaggcatgtccatacaatttcctcaacattaatcttcagatttctttagttaatgcaaaacattaaaattcacttacttttttgtatttcaaatgaacaagtcagaacattaaagcttgctttatatttcatccaagaaacagacaaatcacctaaaaattgctttctgcctatgtatgtacgcctgaaacatttgcatgagagctaaacttcaaaatcaaaacatcaaaggaaataacagttaacagtaccatcttctggacagttctgacaccagaagttgtagaagttttacagaaatgcaaacacggttgtcaagataaaatggggtgggaaataacttctatgatatagaccacaaactagtaattaagcggaaacacaatcttcatctcaaataaaaccaaaaagcaccttttggttgctgttcccaacagccatacacagatgcctccccacaccaacagccacccatacgcctcaaacaccccatttactttcacacaaaatcctctccagacccaggcctgccccatccccagcacaggcccaccctgatagtcacatccccacagacaccctcccacagaacacacaccctgccccagcacagg

SEQ ID NO: 475968 - DNA, 1000 bp, Homo Sapiens; identical to SEQ ID NO: 344464

SEQ ID NO: 475969 - DNA, 1000 bp, Homo Sapiens
ttttttttttttttttttttttttttttttttttttttttttttttttttttttttttttttttttttttttttttttttttttttgagaccatttggttatttatggaagactctgggaattacagaacatttcaaaaatttttagcatttgctataatatggacctaaaaattttaatccccaaagcatggtgaaattctgctaatgctctgctctgaatggcgtccttagaagtggcagttattcaaagatgtcagtgagtaatccatcttctctaaacgttagtcccttttgtcctggtttctggcaagtgcttcacatgggcactgccagtattaaaaggagaagactcaaacaccagtgcatttgatgggtattgattatagacttcagctgtgggctccgtcagactacttctagatgtctctattatagaatgcctcattgtatcattcgtttcaatcatttcaaaatccatttcattccatttttctgcatcctcctcttcattctcttcctcatattcatttagcccggagctagagagcagagctttctggtcctcactctttctgtcttcttttcgctggcgatcaagaggtgaagtggctaatttatatagcacaggaaataaaataccagtagctattgatgctcccaaagaggtatacagaactacaggcaaatcagggtattttccttgaagaattccaatgactgcaggaatagccatttctcccagggaagcaccaattacaaaaaatgctgcagatttcccatggatggtcgtgtactgctcaatccaagaaacaccactcggaaatgtggttgccattgaagccccatacactgaagttgctatccagagacaaattgggttcttgtcaaaaagcaccagaaataaagatgaagtcaggctgccaatgttgctcaacacaatcatggttccaggctgtaaacaggtagcaaaaaagattgccaggcccctgcaggctgca

SEQ ID NO: 475970 - DNA, 1000 bp, Homo Sapiens; identical to SEQ ID NO: 344466

SEQ ID NO: 475971 - DNA, 1000 bp, Homo Sapiens; identical to SEQ ID NO: 344467

SEQ ID NO: 475972 - DNA, 1000 bp, Homo Sapiens; identical to SEQ ID NO: 344468

SEQ ID NO: 475973 - DNA, 1000 bp, Homo Sapiens; identical to SEQ ID NO: 344469

SEQ ID NO: 475974 - DNA, 1000 bp, Homo Sapiens; identical to SEQ ID NO: 344470

SEQ ID NO: 475975 - DNA, 1000 bp, Homo Sapiens; identical to SEQ ID NO: 344471

SEQ ID NO: 475976 - DNA, 1000 bp, Homo Sapiens; identical to SEQ ID NO: 344472

SEQ ID NO: 475977 - DNA, 1000 bp, Homo Sapiens; identical to SEQ ID NO: 344473

SEQ ID NO: 475978 - DNA, 1000 bp, Homo Sapiens; identical to SEQ ID NO: 160909

SEQ ID NO: 475979 - DNA, 1000 bp, Homo Sapiens; identical to SEQ ID NO: 344476

SEQ ID NO: 475980 - DNA, 1000 bp, Homo Sapiens
tgcctaggggagtacctgggcacctgcctcctgtgctgccctggacacatcccagcggctgcacataggggaggcacagcctgggctcagggccagggtccactctgtggggatactagacccgggggtgacaatgccagctcagaacttccccccacacctgggctcctccagcctggcctttcctggggaagggagggcctgtccttcctcagcactgtgggagggaggcaaggcctgcggttgaagcgtccccaacacggggctccaggagagaaagcaccacatctcagggaatgaaaacagagacggggccgcccagtgcactcggtggctcggaaatcattaaagaatgttctgagcccccgattttggctgtaaaagggactggccggcttgtgaccgctcccctgtctgtgccttgagacgggagtgttcagcgttgggggcagctttccctccaagaggagcttcacaaacatccgctctctgcggggccgcctctccgtggcctggggccgctgtcggaggaaggctctccagctgccgtcatctgggaaacgtggggggcgagcaggggtcatggatggggctcactggggactgtgagaatctgtcccgcaggactttctgggatggaaacgctggcagaggtgaagcctgcgtcatgtgcttcactgaacccggctgcttatttatgttcggagggctggtttcaaggactcacgggctgagttctctttctgcacagtagcactggcattaactgtgacagctttacagcaggctccctccccgaggccgttcagaagcattcctcagcgggtcctacacgtttcctctcccatgtcaagtttagaagcagtgtcaagacccacagcagtcctgcgggagttttaagggatgcacggagtttatggggacagtttggaaaattgacattcatgtgacttagagtcctactacttgaaaatggattccagctctcaacgaatttaga

SEQ ID NO: 475981 - DNA, 1000 bp, Homo Sapiens
ttttttttttttttttttcttgacatcacaacagtttaatattttaacttattcattaaattgtgcttcacatcaatggaaatcttcagttctacaaactatcatttttaaatagcaataaaggttgataatgtcacaatacagtcccctagtaactgagttcatacatattattgtacagaaataaaaggaaatatctcttaagagaaataatttactatctactgaataactatctacatgtaaaataggtccccacataaagatccagatttttctttccaacactgaaatgatacattaaaagagaaataatgcaatcaaagccccagaagtacttctgagaaagaaaaaaaggaaagtgaaaaaaaaatgatcatatgattaacaaataaatgtcaaggaggtggaagacacatgtgacaattactgaagtacacaaaacttttgctcctcaaaacactggtttttctggcaagatgtcaatctggccctttgatgagttcccataatgcagcagaacatgtagctcacacaggttccactgagtgtgccaaaggatgacagttgcaatcctttccacagacatcttggaacacaggctcaagagacacctgtccatctgcgttctcaatctggagtactgctaggttagcatgagtccttgcctagaagttcaagggcttttgtgttgcagatgttgctggtgtttatagctaggccagtcctctggaaatttctgcacctctgccaggcaggttggttctttcacatgctgtgaagatgggttcatgtgcattccatcaattcattaggctacaaaacacacaggtttcagaacctgcccacttgctcagaagggctaatttgaagtctcaaggaattagttcagatttgtccaggtgaatgtggtgagaagagagcaggcattggcttatgtccagtggagatggcggaaggggagaagaaggaaggccgaaagtgccttggagaaagaacc

SEQ ID NO: 475982 - DNA, 1000 bp, Homo Sapiens; identical to SEQ ID NO: 160910

SEQ ID NO: 475983 - DNA, 675 bp, Homo Sapiens; identical to SEQ ID NO: 344480

SEQ ID NO: 475984 - DNA, 1000 bp, Homo Sapiens
tttttttttttttttttcttagtttgtcatgtttgtctttattcatctttccggatcttggtccccaccgccagcacccacccaccccacccccaacccccactgtcctgaccacctggagccaaaagcctcttttcctaggtccagagtcctctctccctctggccagagcctcagagtgggaaagggaatccctggcccccaaggaggttttctctcagccgccccctgcaatcccccaccgcctcaccctccttcagaactgacatggctcctgcctccctaccccggccccaacctctccagcctggactgaagcataagcacactgctctttctggagttctggagaggaagtgggaagaccgccctcccccatcagaacaggggttagaggagctctcagtcaagggaaagtatgaggaggaagagggacgcgcgcggggactgggctgggacttccggcctgtgaggcagggaatgcggcttttcggccagtcgtcctcgaggcaccccaaggatttcagggtcgaaggctcattccggggttccagccagtgtccgttgcgttgcggccgcagacacccgggactgcggtggagctctgctcaacctaggtctgcaagtcgggcggcctctcgttcgagccggctgcacagctctaggcggctctgcctgcgctgccgcgccccaaggcggccccagctggtggcctctgcgaaaggccgcgcgtccagcgcccgcagcagacgcggcaggtcgcgcagcaggcggtagcgcggcagggcgcgcagcggcggggggatgtcgcccttggcgcagaggcgactgaagtaagcgagcagcagcagcgggcgcggggcagcgtggagcagggcgagcaggggcgcggcgcgggggtcggggccgctgaccgggcgaaggtcggcgccgctccacagcagcagcacagtgccctgctcccgcgctacgcgcgtccgcgccgcccagagccacggca

SEQ ID NO: 475985 - DNA, 1000 bp, Homo Sapiens; identical to SEQ ID NO: 337768

SEQ ID NO: 475986 - DNA, 1000 bp, Homo Sapiens; identical to SEQ ID NO: 160913

SEQ ID NO: 475987 - DNA, 1000 bp, Homo Sapiens
ttttttttttttttttttatgtttgcagaaaggcaggaaactttattgaataatcttttctttggggtagagaagttgagaaaccaaagcgtatccaggtcagagaggagagagatccgaccggaagagaagagcacagagggcccaccatcaggagagagtcaggacagggggtcctgagagcagagggactgagccttgggtccagcagcccctcctctctcctgcagggaactgccggctctctcctcctctgggtgctgaagacagagggaggggacgccaggcagatttaaggcctacggacatcagaagtgcggcgaccagaggcattagaggtggtggtaacagaggcactagaagtcgtggtaacagaggtgctacgggggctgacgcttcctgctgaggaagggaaaccaatcatcttggcgtcctggccctcgagcaggctgcggtaggtggcgatctcctgctccagacgtgtcttgatgtccagcagcatcttgtactcttggttctggcactccatctcactgcggagctcgctcagctgggcctcgatgctgctgatgagtccctggatctgctgcagctgcagggcatagcggcactccgtctctgccaccgtgttctccagccccgctttcatgctcagctgggactgcagctcaatctccaggccttggagcgtgcgcctgagctccgtgatctctgtcttgctggtctgaatcatggcagtgttggtagacacctccttgttcagctctgcactcttggcgtggaaccattcctcagcatcccggcggttcctctctgccatggcctcgtactgctccctcatctctgccagcacgcgggtcaggtcaatgcctggggtggcatccatctccacgttgacctggccgaccacctggttgctaaattccttcatctcctcttcatggttcttcttcatgtaggctagctcttcattcaggctctcgatctgcatctccaggtc

SEQ ID NO: 475988 - DNA, 1000 bp, Homo Sapiens; identical to SEQ ID NO: 344484

SEQ ID NO: 475989 - DNA, 1000 bp, Homo Sapiens
tttttttttttttttgttttcagatgtatgattctttatttaaacggcagtaaagaacgctggaataggctttccagggacactcccatgagctctgggctcctttgcagcttccagctctgggtcttatttaatgggcttcaaaggtcactgtctccatgatgtccggtgtcatagaaccaaccatctccagcccctggccaccctctgctgtctcggcgatggccacgttggtgctcctctccgccatcttagccatgacgtccacatctctgccatgtggtgtgcccactacttttgtagtaaggttggctctgacgttcctcaggaaagagctgaccctgccaagtcccttgctggaaccggaactggtggtccataagctcctcccagatttgtgagaggtcctggactcctttgagatgggcgtgtggctgacacctttatgcgagtccctgtgcctgctgctccccgggttgccacagcctttctcctttttgtcatctctattggctctgtggctgaatgaggacctgctggaggacttttgggcaatcttgtctccccttgttttgtggcggctttcacctgtcctgcggcgatgggaactccttccgagagccctgtccttttcccttctttccctcccctccttgcagccttcagcgctggcctgggttcgctcccttccatgctgtccactcaggctgctcttgctctgccgggtggagacgggaggtcccgctgctgcatccatgtctgcttctgcagctgtcctgctggtcagtactactcctgcaatggccaggctcacactgccctctcgggaaaggctcatggatgcgctggaaacatgctctgaggacttgcctgcagcccctgccacagccaccttcgtgctgtttggagccatgctggcagtgcctgcaagggccatgttgcctttgtttcctcctgcatcgatggtggccgccccagctatggctgcgctcacctgtcc

SEQ ID NO: 475990 - DNA, 1000 bp, Homo Sapiens
tttttttttaaatcatagtagtactagagtcaaagtttataattgctttggaacaatgggtttacttgaggtgaattcacaatgccttcacttaaaagtaagattctggacttcattatgagctatctgtataccatgtatgaacacagaaaacctttagagaactcttctctaatgatcttcacccaaaaatacatgccacaattttcaaaaacagaacatgtacaattgttggggtttttacattacccttataagattggtttgtgtgatacactaaacgtatatattttaatgacaatagaggaagcagattattactggcattaaagtacaaccatttctagacggttttaaatgccacagagtcccctggttaaaatgtaaagctgcacagcttgcctatgtcatctttatgataaagttaaaacagcaagaggatttaactttcactctacattttactgccaggtttttatatagatcaagtatcgctgcagcattctgaccagcccagatttagcagcaaatggcaggaatcatataaaatgcaatttttttttaacaaagtgcttttctaagatatacatacatatataaataggtacaaaataaagtgtcaacattaaaaagctcaactatttaaaagcttttaactatttaacttaagtagtacatataaaacactgaaactcaaagatatggaatctactaaacagattcaaagtctttttttttttgaaatgcaagaccaaaaaatcaaattctggtttgcagacaggaaaaaagtatcaaaaaccagaattcctaacagagcagctagaaaggggcaattttataaaccttatcagctgaatatcatgaggtgattttcacctgattgcaaaactgccatagtttgaaacacttttcaatttaccagacacactctgtcaagacttcatatacttccaacttgcaagcctgtgttttgccttctccaacctaaaaaggaaaagct

SEQ ID NO: 475991 - DNA, 1000 bp, Homo Sapiens; identical to SEQ ID NO: 344485

SEQ ID NO: 475992 - DNA, 1000 bp, Homo Sapiens; identical to SEQ ID NO: 344486

SEQ ID NO: 475993 - DNA, 1000 bp, Homo Sapiens
ttagggccagttcaatgtcctcccagtgatctggtaaaatttttgattaaaaggatgaaagaatttgcgcaatttagtaatgacagaggggtccacctctggatgaatgcgccccttgctgcccgccaggcacttattaaagataatattaaaccgcaagcagtaaaaccctctggtagcattgaagtataaattgtattgacttatccttggaggcagatttaggaacttctccacgagctgaagttctggcagaggttccgtgatgaggcgatctccatcgacgacatgaaattgctcaattggaaagtatttcaaccacctttccagatgtttggtgtagatgctggttcttactgctttgtattttgtgttcacttcgcatgtattagggtctatggccagcttctcaaacttgtaataagttttgttcttcctctccttcccctctagcacctgagtataatcagaaatagctcttgtggttggctccctgacaatgatcaacaacttgatggatgagttcattttgtaaatcctttctggaacctcctctgtgataaaatatgctgggctcttttcaattgtgatttgctgagggtaggaaaaaggcatctttttcctataccactcaatgcccttaccataattctcatcattatcaaaaaagtggatttcttgagaggctttgactactgccggatgtaggttcagcatttcaagcagggcccttgtgcctcctttcctcaccccaatgataatggccttggggagctgctggaccaggtcatggaggcgaacctgctccttggaagcgttgcccttccggaactcgtgcagcaggccacgcttaaactgcagggcgcgaagtgggaattcagcctgagtgcgggctccacccagtcgaccttcaatggggcaaatgggttgtagcctatccaagctcccaactctggcgactagatacaggagactcccaacggcaaggcttcccagcacc

SEQ ID NO: 475994 - DNA, 1000 bp, Homo Sapiens; identical to SEQ ID NO: 160914

SEQ ID NO: 475995 - DNA, 1000 bp, Homo Sapiens; identical to SEQ ID NO: 344489

SEQ ID NO: 475996 - DNA, 1000 bp, Homo Sapiens; identical to SEQ ID NO: 344490

SEQ ID NO: 475997 - DNA, 1000 bp, Homo Sapiens; identical to SEQ ID NO: 344491

SEQ ID NO: 475998 - DNA, 1000 bp, Homo Sapiens; identical to SEQ ID NO: 160915

SEQ ID NO: 475999 - DNA, 1000 bp, Homo Sapiens; identical to SEQ ID NO: 160916

SEQ ID NO: 476000 - DNA, 1000 bp, Homo Sapiens; identical to SEQ ID NO: 344492

SEQ ID NO: 476001 - DNA, 1000 bp, Homo Sapiens; identical to SEQ ID NO: 344493

SEQ ID NO: 476002 - DNA, 1000 bp, Homo Sapiens
taagctggaaaataaatctgtttattttattaatgagctcagagtaaggtttggagtgacaatcctggcagcaattagagcagagggcagaggagagggatggagagagagagactccagtggggtcttattagggttcaaggaaggagtcccccagagctgggagagaccaaattcactgggccagaggaaaggaatgagagtctggatccttgagatcttctcccaaatggctggctgctccctttcctccacgttggccttcagaagagtggcccgagctgttccttatctggccctggttcagggccaaagggagtttgagattcctgggtgatagattcaggtcccaaggatgccatctggtgtgtgtagtgtggcctctctcaaggctgatccgaggctttgtgttcacgaggtggggccggagctcactgtttcctaacggtgaatttggtttccccttttggacttcagaagaaggtccgtgggctccagctgcaggaggaacccgtgtctgtgcacggcagcacggtcttcaaggagctttcggaccggttgggggctttcagctacggaggagggaagagaagctagctcatcgtcatactcctttggggggcagacggcaaccacaaggtcgatccagtccccgccctgattccaggccttctgcagggcagcctcagcctcagccagggtgtagtctgtcacaatcttgccgttgattgccatgatctcgtcccctttcacaatgccaccatgccgctcagcagctccccgctcatacacagcagaaacgaccaccttcccaatgggggagtccacaccgccttccagggccaggtctaaggatccctccttcttgatgcgtaggagccggacatccttccccatgatctgctctggggtgaacatagagtaggggtcaaagccttcctcatatttccggaaatcttgtctgaatgctgtctgataaaccaccatcctcttcaacatc

SEQ ID NO: 476003 - DNA, 784 bp, Homo Sapiens
ttttttttttttttttttttttttttttttttatgggaatgcaatattgtatttattctattcattaacaatacttgaacatttacaatattcattgaacataatctaagagaaggtcaacttacattttttacttctctattaataagagagatggtcaaattaatttatggtcaaaattataatggcaaaaacttataaataaatacgtgcttggtgttactatggttacacacagttcagtttttggtgtaaagttctttggctgcaagaaagaacatttggtttacttcactaatagaaatatctcttaaggctggaatggcctcctcttggtatttcttctgctgttgattttttgcatagttatctgtgattgtatggatggagtcgagtggagaggtactcatcatgttaatcccaaacaagagcacgtagccaattactatagcaataaggaggtagacaggtaatgcaactgcccaatatttttgaggccaataggttaaacctaaagagtttagccaagattcaggaataaaggcccacacgaggtaaagtatgaagccaaattgggagcttaagaaaagaacaaagccataaatcgctctttctggcaatggcgacggtgaattttccaccatttttcctggggctttagacaatctgtggaaaaggaacacaatcagcgtcagcgatgtgctccgtggcaccattgatccattctcgcctcctcgctccgccgcgggtacggcccccgccgcgcagaaccgcctcccgcgcc

SEQ ID NO: 476004 - DNA, 1000 bp, Homo Sapiens; identical to SEQ ID NO: 344495

SEQ ID NO: 476005 - DNA, 1000 bp, Homo Sapiens; identical to SEQ ID NO: 160917

SEQ ID NO: 476006 - DNA, 1000 bp, Homo Sapiens; identical to SEQ ID NO: 160918

SEQ ID NO: 476007 - DNA, 1000 bp, Homo Sapiens; identical to SEQ ID NO: 344499

SEQ ID NO: 476008 - DNA, 1000 bp, Homo Sapiens; identical to SEQ ID NO: 344500

SEQ ID NO: 476009 - DNA, 1000 bp, Homo Sapiens; identical to SEQ ID NO: 344502

SEQ ID NO: 476010 - DNA, 1000 bp, Homo Sapiens; identical to SEQ ID NO: 344503

SEQ ID NO: 476011 - DNA, 1000 bp, Homo Sapiens; identical to SEQ ID NO: 344504

SEQ ID NO: 476012 - DNA, 1000 bp, Homo Sapiens; identical to SEQ ID NO: 344505

SEQ ID NO: 476013 - DNA, 1000 bp, Homo Sapiens; identical to SEQ ID NO: 160920

SEQ ID NO: 476014 - DNA, 1000 bp, Homo Sapiens
tattcctcatcagcttctgaaaataatcaggatgcacttctgtttgcactttattcattatgacttaagatttctctccccacaatctccttctactgtagagacaggctcatagcaggtggccaaggaagctgatagtcaataccagggaccaggaaggtcgtgaccagtcctggaggccccaggctgtacttcgaccttgctgttctgggctctcctttccctcatgttgggcccatgcaactgctcgtcgctgctcaggactcagaaaggccatttgctcaggagtgacagccacagcctgagcactggtgagactagatagttggatgggactaaacaccacagcaaatttaggaggagggatgacagaaatggcaagaggagtaacgccctggatctgtccccgcagcagtgctgaaagagccaggtctgggatcccagctgctatggtgccaatttcagtgaagatctcaggcccccagttactgattgggccaaacccaccaggcagtacaagtaggtgggccagaacctccagttgttcctcagagcactggagatgcagggtgccgaggaagagagctgcttggctgaactcccaactgctgatgtgctggagctcctctggccgcagtccacagagagtataacccagcgctgtcagatgaacgaagtccaggtggctcacatgccgaccactctgccgtaggaaactggagaccacaatgcggagctgagtggtgctccagccatctatctgccccagggtgctcagcactccccagtccactaggatcagctcctgtagttcccgatctcctagacctattaagagcctaccaagctgcaggatctgctcaggacgaaatccccgggggggaccccacaactgttttgctttgcccatggctgcccgcagttcctcaggcccaagtcctgggtctcctgcaaataatgtcaggcagtcctcaaagtctgagagctccatctctgcaat

SEQ ID NO: 476015 - DNA, 1000 bp, Homo Sapiens; identical to SEQ ID NO: 344508

SEQ ID NO: 476016 - DNA, 1000 bp, Homo Sapiens; identical to SEQ ID NO: 344509

SEQ ID NO: 476017 - DNA, 1000 bp, Homo Sapiens; identical to SEQ ID NO: 344510

SEQ ID NO: 476018 - DNA, 1000 bp, Homo Sapiens; identical to SEQ ID NO: 344512

SEQ ID NO: 476019 - DNA, 1000 bp, Homo Sapiens; identical to SEQ ID NO: 160922

SEQ ID NO: 476020 - DNA, 1000 bp, Homo Sapiens; identical to SEQ ID NO: 160923

SEQ ID NO: 476021 - DNA, 1000 bp, Homo Sapiens; identical to SEQ ID NO: 344514

SEQ ID NO: 476022 - DNA, 1000 bp, Homo Sapiens
ttttttttttttttttgcgatttaaaataaatgcagatgtttacttggaatggagcctgtggaggctcagtgttgactctcatctagaatggtctggaaggactgctctgtccaggggcgaggtctatagagactgcagaattaagtatcccactggccagtcacagcctcttgccagaaatgattaaggcagaaactggccttgggcctctttattagtcacctaagaggagtgtgaggtgcgcattctggtgctggatgacccttccccccaccccaagggaaacagtggcccatggaaaggaaggacagggagagggcacacgtggagggaggggcctgtggggtatctgtcttctcccccgcatcagggctgagctgcttccccacccagtgggctgggagaggtggctgcctccagcctcaagagcactttttccgcgcaagaaaccagttcctggaaggaggaagcaggcaagtcagttttcgtggacagtccccgggtccaggagcagttactcatgtgactcaatccagcagtcatggacaggaaactctttggagaggtctgattacccctcccgtttaagattgattttggccagtcatagagatgggataataggcaggcaggagagcagtcttgaaaactatacacgtggagatcaaggtcagttccatacaaacatctattccagtcccccagacgtggtgcaccccagctgggggcttccacctggagggaggcctggtttgctgaaggcgctgctgtcactcaccaggctggaggtgaagcgctccttgatctcctggagcagggccttcatactactggacaccagctccggcaggatctcctcataggaagccaggtggaccagcagcatgcccacgttctccaccacctccgggtcgtccctgtggagctggtaggtctccttgatgaggctgaggccactgccgccctcctcctgcaccaccaccttgaaggccgccagct

SEQ ID NO: 476023 - DNA, 1000 bp, Homo Sapiens; identical to SEQ ID NO: 344515

SEQ ID NO: 476024 - DNA, 1000 bp, Homo Sapiens; identical to SEQ ID NO: 344516

SEQ ID NO: 476025 - DNA, 1000 bp, Homo Sapiens
tttttttttttttttttttttttttttttttttttttttttttttttttttttttttttttttttttagagttaatcttttagtgctactgaaatggctacacagttaatctggaagtttaagagctaacaaagctgcaaagacaagctgctctttgttgtaaagtggactgaagatgtttcaaataaaactacatccaaaaactggtagtaagaaaagggatctcttagcaaataggaatctaggtgtagaatttatacacatatatattttttaaagtataaaaatgagaaagtatgtacaaaaaatcatcctaaatcttagaaaggagacataaaaaaaggctgtggaaagcctggggagttatgtgggtggatgcctagcagttggaagaatgcatattgcccaactgcccagcagccagcacaagaatatctttcttctccttgtggaagcgcagctccttgcctgccagtcgggcttcatccagctcccgctcagtagaggccagctctctagacagtgcccccggcacactctgctcccggctcacccagtccaaggccatttggtggcgaatatcatcatccagggcccggtgcgaataatgagccaacacctcctgccgagagcattgtcgttccctcatggccttaaggctgccattccagtgtagcagttgaaaaactgtcattagctcctggaactccaacattgatttgcccttgttggattccagcatgaatcggaaggcaccaatccctgtatttgggttgtcagcttcctccctgttgccattaaaagatgccagggcctcagagacactcttctcgatgaactcatcagtgattcttcgggaaggatgttcattaaacacagaattcattagcgcaatctttgcagcactcctccgggcctcagcttttgtggggcaaaactggaaactcccaaagcagcttcccccaggcagggtgacatagcagacataaggagggctgtt

SEQ ID NO: 476026 - DNA, 1000 bp, Homo Sapiens; identical to SEQ ID NO: 344517

SEQ ID NO: 476027 - DNA, 1000 bp, Homo Sapiens
attttcaccaaagaattaaatcatgagttcatcataatacatcatctctcatggtccccttccaaatccacatccatccatcaccataacagcccacagcccataataagtggggatggtaaccaaaatggaggcagggtacctgcgaggcatcctggggctgcactgctgatcctcttctctctcccctggccctgagtgctgccttcatgtggctcagcccttccgtccttcaagccttcatcagcttcagggcagccccgagtctgtgcccaggtacactggctaaaatgcagtgtcttccaaatagccatatctcattttaatcagggagcaattccagcatggaagtccccatcatgctcctgctggcaggtacaggtgccagtttgtgacggatgaaagcaccgacagcccacgcgtcttcatcatggaggcctgtgccccagactgtgcccagcacaacagctgggcggcaagggtgggccagggtcgagcaaatgacacgttccctttggctaaggaagacaccccagaagcaaaatgctccatgcgacagccaggcattcaggctacaagctcggtggcggggaggcagccgggagccttctcagaggagaagggtcccgtgatcattccacagatgctttcagagctctgggctcagggtaaccgaccaattatggtgctgccagagggcctgcatttactatacacacgtcacaaaatcaggcttccccgggaggagccatcggactctgtgcagagggcccatgtgacaatataaaagtgatttctggccgggcgcggtggctaacgcctaatctcagcactttggggaggccgaggcaggtggacgatgaggtcaggagttcgagagcagcctggccagtatggtgaaaccccgtctctactaaaataaaatacaaaaaagatttagccaggcgtggtggcacacgtctgtagtcccagctactggggaggctgaggcaggaaaatc

SEQ ID NO: 476028 - DNA, 1000 bp, Homo Sapiens; identical to SEQ ID NO: 160924

SEQ ID NO: 476029 - DNA, 1000 bp, Homo Sapiens; identical to SEQ ID NO: 344521

SEQ ID NO: 476030 - DNA, 1000 bp, Homo Sapiens; identical to SEQ ID NO: 344522

SEQ ID NO: 476031 - DNA, 1000 bp, Homo Sapiens
ttttttttttttttttttttataaaggaaagaggtttaattgactcatagttctggggaggcctcaagaaacttacaatcattgtggaaggggaagcaaacttgtccttcacttggctgcaggaaggagagtcctgagcaaaagggggaaaagctccttgcaaaaccttcagatctcgtgagaactcactcactatcacaagaacagcatgagggtaaccgcccccatgatttaattacctcccacaaggtccctccccccaacacgtgggggttacaattcggattacaattcaagatgagatttgaatggggacacagagccagaccatataaggccctgtgtagttggcagaataatggtcccccaatatacctgccctctgattcctgacacctgtgaatatggcacattacatggcaaaagggactttgcaggtagaattaaggctgcagaccttaaaatggggaggttagcctggctgattcaggtaggtccaatatactcacatgcactcttaaagatgaaagagggaggcagacaagccatagagaatggaagagacgggagagagtcacagtgcaagagggacttcccgcgggtgctggctgtcaggatgagatgggccatgaaccagggagggcaggcggcctccagaagctgagggcagcccctggccaacagccagcaaggaaacaaggacttcattcctacaaccccacacagctgaattctgccagcagccccagtgagcctggacgtggatcctccaccagagctcagcactgatgacatcttgattttggccttgagagacgaagcacagaagccagcagagcccgtgagatttctgacctcccctatttaagtattgctccagcattccctgtgtgccaggcggaggtctctgctggggtgcagtggtgcaccctgaagtcccgttctgggggccgcctgtggctgtgtgacccaggacaggccctctgacttctctgtgccg

SEQ ID NO: 476032 - DNA, 1000 bp, Homo Sapiens; identical to SEQ ID NO: 160926

SEQ ID NO: 476033 - DNA, 1000 bp, Homo Sapiens; identical to SEQ ID NO: 344524

SEQ ID NO: 476034 - DNA, 1000 bp, Homo Sapiens; identical to SEQ ID NO: 344525

SEQ ID NO: 476035 - DNA, 1000 bp, Homo Sapiens; identical to SEQ ID NO: 344527

SEQ ID NO: 476036 - DNA, 1000 bp, Homo Sapiens; identical to SEQ ID NO: 160927

SEQ ID NO: 476037 - DNA, 1000 bp, Homo Sapiens; identical to SEQ ID NO: 160928

SEQ ID NO: 476038 - DNA, 1000 bp, Homo Sapiens; identical to SEQ ID NO: 344530

SEQ ID NO: 476039 - DNA, 1000 bp, Homo Sapiens
gctcacttcacgtgctcggcggcgtgcgaggagcagtaatacttcttgtgggcgatgaaggtggacaggctgctgaacttgatgttgcaaagacggcagtaccggtggttgccgttgggcagcggcgccggcgtgcccttgctgggagtctggacgcccttgtccgagtaggaggggggcgccggcgggggcggcacggcctcgggcgcggcggccggggacgggggcgggccgggcggcggctcctggggctccgggccgaggccgtcccgggggccacgggacccgggctgcggggaggcggcgggggcgggagcgggcgaggggccgcggtcggccggcgtccgggcctcgacccccgggccggccaggggcgcgccgagcagcaggccgtgcgccaggcggaaatgctccagcaggtccccgcgcaccgggccgttcggggggcagtaggggcaggcggcggcgggcaggccgagcgcgccgggcggtggcgcagcggggcacgagtacttcttgtgcgccaggtaggcctcgaggctgtggaagctcacgcggcaggccgtgcactcgtggtagtcggccagcgccggtgccggggctccggggagcgggcgccgcggcttcttgctcaggtcgatggggccgtcggccgcggggccgggcgagcgcgcaggggcgaggccggggccgcttccgcttccgcttccgggccgcggcgactcgggcgcgggggcgtggccgggcggcggggggggcggggcgccggccgcgtgcagctcgtagagcttgcggcgtctgcgcgtgcgcacaggcgcggcgggagagggggccgggggcgcggccggcccagggggtcccgggggcgcggccggtcggcgcggcggcgggtcgtggcgcgaggcgcagtagtaccgcttgtgcacggtgtaggtctcgtggcggctgaagcggatgttgcaggcctcgcacagcgtgcggctggggtcgtcctccgcgt

SEQ ID NO: 476040 - DNA, 1000 bp, Homo Sapiens; identical to SEQ ID NO: 467061

SEQ ID NO: 476041 - DNA, 1000 bp, Homo Sapiens
aaaagttgccaagctttatttaggctgtaatggttacagataacacacatctaaccctatattccgtgcttcccatgcagtcccctaagcagactcagctaccctttccctccagtctcacttcttgtcttcctccttcttgtccttcttgccgtccttggtggcctgggaggccagggagcccatagcatttcgaatggcttcattgttgggatccacacctgggaggttctctaggacactctgaaggaactcggggtcctgcatcacgtcgtaatcatcctcctccttggctggctcagatgtgtccatagctgagctggcatcaatgtctgctgattccgcctggccaaactctgctccctgcagggacatctgcatggcataagcaatctgctcttcctcagtcatactgcttaggtcaggaagcccagtgcggccaaactcttgctggctgatggtcatcttcagcagggcatcgtctgagtctgggaaaaggaaaagaggagcagggtagaattggtgccatatccacacaggccagcctccaaggccattcctagcccagccctcccacatattcctaccctgtcagacctccacactctccctgcagtgcctacacccagctttcaatgtttagcatcccgcagtcccaggacttcggattccacctctttcaccttcagtcccagtcgtagcaatcccggcctcagcagcagaagctgcagctgcccgccgggcctcctcctcctgccgctgccgctgctcttccatagatacacgaagggccaaggccagctcaggatcagcactgggatctactccaaattcaaagtcactggcaccaagacccagcatggcaccaccttcaccagccaaaatcggagaactgatgagagcatcagccaaactgggcccaggaggcactgtcaccagatgagaaccggttccatctttgccattcaacgtgtttacaaaggctgtcagcttttctgtg

SEQ ID NO: 476042 - DNA, 1000 bp, Homo Sapiens
aagttctagggtacatgtgcacaacgtgcagatttgttacatatgtatacatgtgccatgttggtgtgctgcacccattaactcgtcatttacgttagtatatctcctaatgctatccctcccccctccccccaccccatgacaggcccggtgtgtgatgttccccaccctgtgtccaagtgtttttattgttcaattcccacctgtgcgtgagaatatgcagtgtttggttttctatccttgcgatagtttgctcagaatgatggtttccagcttcatccatgtccctacaaagggcataaactcatccttctttatggctgcatagtattccatggtgtatatgtgccacattttcttaatccagtctatcactgatggacatttgggttggttccaagtctttgctattataaatagtgccgtaataaacatatgtgtgcatgtgtctttatagcagcatgatttgtaatcctttgggtatctacccagtaatgggatggctgggtcaaatggtatttctaggtctagattcttgaggaatcagatgggtggcattctttatgaaggaaataatagggtacatttctcagaagggatgaaaaggtgggatccagagaggagcctatgcccccttgttcactgggaagtccctggtgtgactgtccagaagggaaccacagtccaatctgaatagccttggtgggctatttctagaagtgaccctgaccctgtgtgctgttggcgccttctcatgttaaaccactctcctaagggctcctgggacaatatttaataacacttttactgggtacctactgtgtggatgcaggacactgtcccaggcagtgtggaggacttctgtgctatatgacaaagcactcaggggcgcttctgtcttcccatctgtgactcccagaacaattcgcgcgtaccatggaaagttgagccacagtcacactaccgttaatttgctcacctccatttctccaatttccag

SEQ ID NO: 476043 - DNA, 1000 bp, Homo Sapiens; identical to SEQ ID NO: 344531

SEQ ID NO: 476044 - DNA, 1000 bp, Homo Sapiens; identical to SEQ ID NO: 158611

SEQ ID NO: 476045 - DNA, 1000 bp, Homo Sapiens; identical to SEQ ID NO: 344532

SEQ ID NO: 476046 - DNA, 1000 bp, Homo Sapiens; identical to SEQ ID NO: 344533

SEQ ID NO: 476047 - DNA, 1000 bp, Homo Sapiens
ttttttttttttttttttttttgaggtctgtatgcatttaatctctttttcttgccttattgccatgtctagaacttccagaacagcctctaacattttaatcaatgtaaatttctagagatttgctgaaacacacttgcctgaatggagaccatcaaacttaaaactatgaattttcaacactattcttacccaaccttttcaggtttcatttcctgtaatttggataaatagctgataacattcatctgtggttatgaatggcatccactgggcaaagtcctttgaagcagcagtgacctttaatgagctaaatggaacctgactataaacgcaaacctagccaggggaccttatctgcaagacaggatcaggaggcagagaagctcccagtattaaggtgtgaggttgacttatgcaatacatttgagcatgtcatttgttcttccagctttctccccatttttctaaattgggagtagcaataattttaaactctgaaaatataaaattccctcagaagtaccttattcttatatattagaaatcactactgttaggaactcttttgaggactggcttatgacaaataaagaattctctgcatcttactatgtttttagcaatagataattaaaatatattttgacaactcaagctctcgttgtatgttattttgttaagcaaaagttcataatcattaataacactcttatttacttgaaaaatgtatatttcctacatatagtgatgtgttttttatgttatacaacctccctaacctaccaaagaaagtttgtagccattacagaaagacagaaaacttgggacagctcaaccctttataggttttaatgatcagaggtcttagatatatatacataggtccatgtagaccttagaagtgtacacaggtacagtctaatttctcaaaaacactaggagctcctacatataatatgtagaaagttttaaatctgtagtaagaatcaaatttcag

SEQ ID NO: 476048 - DNA, 1000 bp, Homo Sapiens; identical to SEQ ID NO: 344534

SEQ ID NO: 476049 - DNA, 1000 bp, Homo Sapiens; identical to SEQ ID NO: 344535

SEQ ID NO: 476050 - DNA, 1000 bp, Homo Sapiens; identical to SEQ ID NO: 344537

SEQ ID NO: 476051 - DNA, 1000 bp, Homo Sapiens; identical to SEQ ID NO: 344538

SEQ ID NO: 476052 - DNA, 1000 bp, Homo Sapiens; identical to SEQ ID NO: 344539

SEQ ID NO: 476053 - DNA, 1000 bp, Homo Sapiens; identical to SEQ ID NO: 344540

SEQ ID NO: 476054 - DNA, 1000 bp, Homo Sapiens; identical to SEQ ID NO: 344541

SEQ ID NO: 476055 - DNA, 1000 bp, Homo Sapiens
gcaggattagcatccaccaggatgcaaaagaggaaagtcacttccagggaaaaagatgacggacgtaccactaaaggcagtgtggatgggaaggcggatgcctctggaggcctacctctgggagccctgccagagtctgacggcaggactcaggactgactgggggaagggagtgaggaagagaggagaccaagagatgtctaggaatccagcttggaggatgcagttgatggtgggtccatcaccgggcaggggaccgtatctgtttcccaggaagggtgtggggattcagtctgggtccaggcatggcgaagctggcacccagtctcaggctccagggatagcgtgtaggagtgattttcctcggagccacagctggcatggggagctggtgtggatgggacaggagctccggggggtcctgcatcgcccttggcccctggcctcttcttacattctaccttcacctggtctctgcagtgtttgtggcaacacagcccgcactcccgacagcggtagccttgcttggtgacaccccagaggaagccactgcagctgtcgcagaaggtaggctttcggaaggtgacctcatggaaggtgtgcaggaaggccaggcccaacttggagcagatggcgctggcccggagcaggtaccctgtcagctcctctctgctgaaggatcctctcccctggcgtgggggtgggtgaagcccatggcaggcgaagggaaaattgcccgagagtcgctcaaagtcctcctgagagattgttcctcggccttcagggtcataattcttgaacacagactccaccagctgctccacatgccgacccagtgtgaccctgtccggcttgggtgtcacaccaggggcccactccaccaccagaggtgcattgaagggggagggtggcaggctcttgggacaacgcggctcccgggcataagaaagctcatagatctcgtcttccgtgtagaagaggtccagggagagcgtgagca

SEQ ID NO: 476056 - DNA, 1000 bp, Homo Sapiens; identical to SEQ ID NO: 344542

SEQ ID NO: 476057 - DNA, 1000 bp, Homo Sapiens
ggtgtgttgaatcgcctcttcctagggacaagccgcccgctgagctagcaaggaatgcatttcagttcatccacttccggcagttcacagctccacagtgacacggaatcttgtgctggtcatcttcaaagtcaaacttatagtcatagcagagctcttctcctttctggattctccgactggagctgatgataattttgtgtcctctctcaaaagtcaccacttcagccacacaattaggtgcacacgaatggttgatataccttgcgggccctcctgtgagcgtcgcgtcaatcacatggtcgttatccatgcggaacatgtacacaccacggttctgagactcataaagcttctctttcctgttggctacttcgtttcgaatgatagtcccgatgtactcaatgaccatggtgtgtttctcaatgtctcgagcagcatacaggcccagcccctgaatccgagaccgtgccagatacacattggatttccattcagttttcatcttccggtactgcgatgacttggagtgaacaaactgtttactataaggtgcgttcagttctccagtgactgtgctctgaaatgactttgaggtgctggtgctgtttaaggtgtgaggccttaacacaaacctcttgacatgggcactcattttaggttcagaacgggcacaacctgtggggttaacggcaagaggaagttccatgagaggatttcggccgtatcggaaggtataattttcacatgcctcaaccccaggaagtgattccgctatgcgtgccactgcagagacggtcaggccaaacagatcctctccttttaaatacgctgggaaaagctggagcatttcagacttttttctcacacatgccacaggctccaaaatcttatcccagacacctttaggtgagatgtcacttagaaccaggtcttcatggccttgttccacaatcctgatgacaaacactgggcgcccatccttctcctcaatggagca

SEQ ID NO: 476058 - DNA, 1000 bp, Homo Sapiens; identical to SEQ ID NO: 344544

SEQ ID NO: 476059 - DNA, 1000 bp, Homo Sapiens; identical to SEQ ID NO: 344545

SEQ ID NO: 476060 - DNA, 1000 bp, Homo Sapiens; identical to SEQ ID NO: 344546

SEQ ID NO: 476061 - DNA, 1000 bp, Homo Sapiens; identical to SEQ ID NO: 160929

SEQ ID NO: 476062 - DNA, 1000 bp, Homo Sapiens; identical to SEQ ID NO: 160930

SEQ ID NO: 476063 - DNA, 1000 bp, Homo Sapiens
ctgctcacaggtttattggactgagtatgttgtgacttctaagggaagagtctgggcagattcaaggttacaacgcctgtggggtggggtggggtggggttcccagggcccaagaccgggagcagagcccctcagagctcagctggcttgggttccaggtggctgtgagaggtgatgggaagtgagcagccctgtagggaccagctggggaggaggtgtcaggggctgtatgccagggtggggcacaagcctggggccagagcgtgcccccagcccttgcacagggatcctgtggtgccccgtttcgtggagatgctccgctactgaggtgcccacgtccacgtgcaggtccctagctggggactctctggccccaccaggccgggtctgcagtccagtgagatggaaaggagctcagagttgagccaaacctttggggtctgtgggtgtggaggcttgggcaggctcggaggcaggagtgtccaccatctgctcagaaggggcagagatggggcaaggccgcaggggcgggaaggctgggccacactctgccccttgttggccctcctggcctgatggagggctggggtgctggtcctcggagcggtggccgggttcgggaggggcctggcccaatacacgggcaagggtcacaggccagctacctgaggggtggctcggcgtacacaccttgtcaaatttcttatggctgtagaccttgtttttgttcatgaatgttagcaagatccagtcgcacaggaaggagccctggggccagcagagaccggtgtgtaagggcctggtggaccccccgcacccgctgggaccccagagagggttccttaccaccccgacggaagtcagagctgtggccagattaataatggtgggaatcaggctgaacttcccggcctgtccatgcacaatgacgtcaatgcggatcccgtaggccttgatgagcgtgcgggtggtggtgccattgatcttgtagtatttggca

SEQ ID NO: 476064 - DNA, 1000 bp, Homo Sapiens
tttttttttttttttttttgtactacaatcaactttattttgaaatcatgtaaaataagatattagactgttttttgaataaaatatttttattgattgaacctttgaccctctatcttattacatttagaggcctggcatctttcttgtgagacaagcttaaggacacaaaagaaacacaactttgtgataccactcttctgaaggctacttatagtaataacttcatagatgaacagcatgattcaggtacagtggctttaaacatcaaagcacatttctcattatataaattaaaacgggtggctccagtgccactatcaaagcttaagttatatcttttatctagttctctgaatgtactgaaacagtactttattcgtccaataaataaagcaataaaaattgttcttactgaaaatgaagtagctaggtgctcctgaatttctctccaaaaactaaaacatttaggtcaaaccacttctccggttgagcagtgtattttgatcttgaggattcatggcttgataagtagatagttctaaggcaaaagtagctgagcctgatgttagcgttcgaagcacagttgaataacccataatttctgctaagggaacaaatccaataacaactttgttgtcctggcgagtctgaatttcctgaatgtttcctcttctttgtgccagatctgccaggacagggctgagataatctctagctactgtaacctcaagattcatcagaggctccaaaacttgcttatcagctttcttcagagccttttgcacgcatcttgagacacaggcagaaatcatagttgtggaggtgccaggatgaattgtcagggaatgtaaagtaattgctacatcctgaattggggatccaagcaatggtccttggagacatgcgctgtgaattccattttcaatggcctcttgggagaccttcaaaaggccttcattgatactttcagcatactcaaactcaatcacaggcataa

SEQ ID NO: 476065 - DNA, 1000 bp, Homo Sapiens; identical to SEQ ID NO: 338028

SEQ ID NO: 476066 - DNA, 1000 bp, Homo Sapiens; identical to SEQ ID NO: 160932

SEQ ID NO: 476067 - DNA, 1000 bp, Homo Sapiens
ttttttttttttttttttttttttgcattgtcttatttattaacataattgaaacattttgcataaaactcttgcccatgactattctagcaacaaaattgtactcaaaatatttcactgtgaaatggtattgcaacttgaatatcattttttattaatgaattgatttccataaagcaaatcttactcttaaaatggcagattatgtgatcaaaaagcgattcaaaaaagcttccccctcctcatgccaaccctcaagaccatgtggatccagctgaatcctcagccctgggactagactaaggttgagggaaagagccgttaactcattcctaaccagaacaggctaataggacactccaaactcacactacaaagagaccacatgaacagtcgagtgtgctgggcagctataagatggtgcagactggatgaatttggcagagcatattcatcaccattactacaatgctattcctaaggtgtcctaattgtatgagctacaaaatcggtccctgtttccattcttcccatctcacctgttggccctcctgcagtaggtagccttgggagagatcctgagcttttcatattctaccgttttatttttgcattactgtttggatgagtaaaatgtaataacatgcttctctctcttagtcccctaaaagagtgtgtgtgtgtgtgtgtgtgtgtgtgtgtgtgtgtgtgtgtcagtttgaggagagtagaattgggctggtaagtacaagttttttctccctgtaattctctgccttttgctgtagttcagttattattgagtctcactttctacttaatttgaacagcaagttctttaattctttctgagaagctggagcttgaaactagagaacattgttgaaaggctggccaagctgagacaggaagaacggcgtctctagaagctctagctttgggtttcaggcacttcagtaagagactttcccccttgttcctatgtacattcaaggaaaat

SEQ ID NO: 476068 - DNA, 1000 bp, Homo Sapiens; identical to SEQ ID NO: 160933

SEQ ID NO: 476069 - DNA, 1000 bp, Homo Sapiens; identical to SEQ ID NO: 339410

SEQ ID NO: 476070 - DNA, 1000 bp, Homo Sapiens; identical to SEQ ID NO: 160934

SEQ ID NO: 476071 - DNA, 1000 bp, Homo Sapiens; identical to SEQ ID NO: 160935

SEQ ID NO: 476072 - DNA, 1000 bp, Homo Sapiens
gagactcagtctcaaaaaaaaaaaaaaaagaaaaagaaaaagaaatagacacacatcactaggtgtagggttccagagcattctagactcaccagccctgggcctcccccttcccttgtccactaattagccctgtgccctacagggtctcaccttcaccttcaccttccaggtcaggccagaaatgttgcttctgaagtcctgagtccacctcctagcactgccaagcagtccacctggaggtgatgagaacttccaggctttggtaatggacaactctgtatccctggagccttcattccttttggcattacagaaccacaagaagtcatctagaatcattgagattctcaactccattgggcaaactggaaccagcaaaatctcagatatctagaattgccactgcttccttgactctgtgatcagtctacagccacagaatcctgattccctttggacattctagaatggcactttaaaaaaaaacaacccacccagtggatcctttcaaagcactgcttattctcttggctgggtgctctacagccagaagttggagttatctaatatcaagaactcttaatctgtcacttcagtctttctaaacccacagactaacaatgttttgtgcattctagaaacattactctttagtttctggagtagttcaactctccacgtaaaatctgtcctagactcaccagtgcttgcctctgtggtcaacctagactcacagaatctcaactaatgagctttctggaaccacaggtcttttttttttttttggtctttggtcaatcaagatgatcttgaatacttggggcattccataaccttccctccttaggtggtctagaacaaatgatttgctactcagttggctgagttgagaagcaacactcccttgaatcttaggtgaatccagacctacaaactcttgatatctgatgctgttcaagaactgccaacttgcttccccagaggcagtctataccat

SEQ ID NO: 476073 - DNA, 1000 bp, Homo Sapiens; identical to SEQ ID NO: 344555

SEQ ID NO: 476074 - DNA, 1000 bp, Homo Sapiens; identical to SEQ ID NO: 344556

SEQ ID NO: 476075 - DNA, 1000 bp, Homo Sapiens; identical to SEQ ID NO: 160937

SEQ ID NO: 476076 - DNA, 1000 bp, Homo Sapiens; identical to SEQ ID NO: 344558

SEQ ID NO: 476077 - DNA, 1000 bp, Homo Sapiens; identical to SEQ ID NO: 160938

SEQ ID NO: 476078 - DNA, 1000 bp, Homo Sapiens; identical to SEQ ID NO: 344560

SEQ ID NO: 476079 - DNA, 1000 bp, Homo Sapiens; identical to SEQ ID NO: 344561

SEQ ID NO: 476080 - DNA, 1000 bp, Homo Sapiens; identical to SEQ ID NO: 344562

SEQ ID NO: 476081 - DNA, 1000 bp, Homo Sapiens; identical to SEQ ID NO: 344563

SEQ ID NO: 476082 - DNA, 1000 bp, Homo Sapiens; identical to SEQ ID NO: 344563

SEQ ID NO: 476083 - DNA, 1000 bp, Homo Sapiens
tttttttttttttttttttttttttttcagccaacaaatatttattcaaggtttgccacgagccaggccctgtgcttggcctgggctggaacagtaagcgaggccacccaggtccttgctctctaggagctcaggttctagtggcaatgcccagcctctgctcaggggccccacacactgaatgagtgggagcacccccaggtgtgctgagccccagattgtttgctttctacctctatgatgacagcaggtcagaggtcgggccacccacgtggcagtcagagtcaggagtggggggtttgcccaaggtagctcacccactcagtggttctttgaaatgcagtgtccctggacacgtgcagggctgccagcactctgaacacgggggtctcttccaggagggtgggctctgattggatgggcagagaccaggggcagactgggtgggaggatcaactcccaccccccaaaacaaacccccagtgcctgagggaacgctggcctcctgaatgcccctcaaggttacaggcagccagaaggggagttgtgggaggccagtgacaaggaggaggaggggagaggctgggggctccttccagggctatgccagcaacagactctcctcccttgctgagaccagaaggtgagtgagggctttgcaatgagggcagggcatggaggtgactgtcactctttgctggcagggggtctcaggactataggaactttagagccttgcaaacctgcttacgtggactcttggacctatagttggatctggatgggacctctgatgccacgtggtccaacctggtcccatcctctccctccccagccacattgtacagagaaggaaactgagggagtacagagagaggcacggagctgcccaaggtcacacagagagccagagctgagtccatattgcagggccgtgccttcctattcttgagatgcggagtgggcctggtccaatcttgcagtagaggaggagactgtg

SEQ ID NO: 476084 - DNA, 1000 bp, Homo Sapiens; identical to SEQ ID NO: 343737

SEQ ID NO: 476085 - DNA, 1000 bp, Homo Sapiens
ttttttttttttttttttttttttttttttttttgtgattttgggttatttattttgtgcatctgtggcaataaatgagatctcagtggtggtatggatttgactgatctctgtaactgtgtatggcaaaaggaccggaaaatgaaaaccagatcccagtaaggggtagagaggggccaagagaactgaacatctgggctgccggagaaatcaaagtctaggaagtaagaggtaagagtgtactacaggggacataccccaatctctttgctccctccctcttccttcctctcccagagacccaggtccctgggactatattggatctgtctctgaagctgaaaaacaaaaggcagaggagacagtcggctctaagtgaccaatctcaagccagctttgtcagaaatcctaaataacaggagaagggtgggaagaaaggatatgattatttcttattccattttccataagaggtgagaatgacaaggacctcttttctaactcctcttgagggtgtgagaagggttagcaggaggagaagggctgggagctctgaggtctcctgtaagacctcatatctcacaggcaaggactaagaattaggattaaatattttagtgggatagctctaaaccaggattagcaagcaaagttagggcgcaaattcctggaatctgactgggaccctggcagtgaaagctgggactgttgaaaacccaatttaagtgttcgctactcatgttgagagtgcagggccaagataactagatcccaggacaggcagtttggcagtgagaacaaaaggaagacactgggaccaaggtgcctagatccctcgagagagaagggtgggtattgggaggaaaaatgaggactggggaaacccaggaggctgggttctggaatagcagcaagtcagaatttcaggatctctgttcgtcctcctcttcctcttccctctatcaggcagaagagagggaaggagggggctggagaagta

SEQ ID NO: 476086 - DNA, 1000 bp, Homo Sapiens
tttttttttttttttcagtctgattcgagtatatctgttttggcaagttgtgggcagctctcttttacttttgtcacccagaggcttccgtagacaaaaggaaaggagagaggtgtgttcaaagacccccatggcgaagagcccatcccccaagcctgacacaaccctccctcccagcggacccctcttctggactggcttcgctgttggctacttcagtgcatctgacccccaccccccgcgtgaagacctgagattgagcgtggatttctgttctccaccaactctgcagcaagggccctgccagaggcgtcgcttcctgtcatctcctcttcccgctcccaagtagaggcacctaaacagagattagatttctggtttcaaggcatgtcggaccaagcacgctgaatgaacatgagttagttaattagctcggtctctcttctttccgttccctggtctgaatgtttcttgatggcaaagcgaccaggagagagttgatttgcatcttaagacctatgggtaatgcttctggagtggggagatttatttagcaactgcttgaacttgtgtacggggtcgggaaggaggtggagctgaccccaatggggctatcggagattggggtgtgggtggtgcccactgccacgctgacaccccgggcctcgatgatggcagacaggagctgctgctgctgctggcgcagggtgtcggcgatgagcagcggcagggagttgaagctggcggtgagatgctccagcttcgactccaggctgccaatctgcttctccaggtcttcgctccggtcattgagttctgtgattaagtcatacatgacattctgcatcttggaaaggtccaccagagtgttggcttggtcactcagcttcctctgttccatcttgacgctcctcaactggtggatagcttggaggaacttcctctggtgtttcctcactttggcatggtcaatcttctttagcagctttgtgtgtttata

SEQ ID NO: 476087 - DNA, 1000 bp, Homo Sapiens; identical to SEQ ID NO: 344566

SEQ ID NO: 476088 - DNA, 1000 bp, Homo Sapiens; identical to SEQ ID NO: 157829

SEQ ID NO: 476089 - DNA, 1000 bp, Homo Sapiens; identical to SEQ ID NO: 344567

SEQ ID NO: 476090 - DNA, 1000 bp, Homo Sapiens
tttttttttttttttttttttttttttttttttttttttttttttttttttttttactttataaacatgttttacttccttcactttacagatgagaaaacagacatgtagaaaagctcccaaaatgtggcaggttgattttggaatggaaacaaagaaaatttgacttttaattaataaaatagtgttaagatgcgatatagctagacacagcagaaggtattcatttaccttgctctattgtaaatcactggctcgttttcttcctgcacagtcgtcagcatatccaagtcatggaatattttctgcatatagtccaaatatttacatcctgaagctctctctactatggctgccagtagggtatagccaaaagttgaatacaaaaactgactaccaggtttgaagaacaaaggatcatttttaaataatcttagggattcaattgaattttcaaacttttctctcaaatataattcgccttgttcaaaatcattctttttcttgccaggttttgaattccggcatttggcttcattctcctgctctgttttaaatttagtaaaatcattcttttcattacttttgccttctttttcttgctcaaatgcaacattctctttcatcatcttcaaggctttataagctttctcttctttcaccttttttatgtccttttcataatgacgaattccacttaaatgggaaatcagtaatcttgttgtgacagaaaccttttcaccttcatattctttttctgggaattcgggaacataatgttgtactggaatatcaagatccagtttccctgcttcccacaatttggcaagagcaaccatggtgagacttttgctgatgctagcaattcgcataactgtctctggtttacatggtacacggttctcaacatcagcataacctaaaccttctgaccagacttcttttccatctacagaaactccaaccactatgcccggtgcgcccacctcatccttgatcc

SEQ ID NO: 476091 - DNA, 1000 bp, Homo Sapiens; identical to SEQ ID NO: 344569

SEQ ID NO: 476092 - DNA, 1000 bp, Homo Sapiens; identical to SEQ ID NO: 160940

SEQ ID NO: 476093 - DNA, 1000 bp, Homo Sapiens; identical to SEQ ID NO: 344571

SEQ ID NO: 476094 - DNA, 632 bp, Homo Sapiens; identical to SEQ ID NO: 344572

SEQ ID NO: 476095 - DNA, 1000 bp, Homo Sapiens
tttttttttttttttttttttttttttttgaggcacagtctcactgcgtttcccaggttggagtgcagtggtgtgatctcggctcactgcaacctccgcctcccgggtttaagcaaaattatcctgcctcagcctcctgagtagctggattacaggcaggcaccaccacgtccggctaatttttgtatttttagtagagatggggttttgccatgttagccaggctggtctcgaactcctgacctcaggtgatccgcctgccttggcctcccaaagtgctgggattacaggcgagagccaccacgcccagcctctgcttcgtgagttttctttcccctgaggcaccctctgagttctccacgtgtcagacccatgtccaatgcaccacgctccttccttcacaccatgaaagccccgaagtaagaccgggtaccatcacgcagtcgaaccaggcgttcatccagcacacggacgaccacctcctccccagcctccaggtgtaccacaccacccaggaagctgctgtcccaccagacccgggagctgctggtggcccgtccgcagggtgactgctggctgaccaacagctccagctcctcggggtagcggggtgtgcgcttgtagaggccgtgggtgatggtgctggccaggcccagcgggcagcccacaccgcccagctgcaccttggagtagatgtagtagtagccagctttggtgaccacaagggccccatcgtggtagctgaggcccctcaggaaggccaggcccagctgagtctcccataacagcggccccccgctgccggtcaagctggagttggcccctgtgagatgcgctgctgggttgacctcgtgagaccttcgctcttgtatcagctgctcccaggagcctgcaggtccgtcccgggccacactgcacgactgtctccggtggcttcgtcccagcctcgtgaatgggatgtcggtctgtccatccaccacaaacactgagggccgtacga

SEQ ID NO: 476096 - DNA, 1000 bp, Homo Sapiens; identical to SEQ ID NO: 344573

SEQ ID NO: 476097 - DNA, 1000 bp, Homo Sapiens; identical to SEQ ID NO: 160941

SEQ ID NO: 476098 - DNA, 1000 bp, Homo Sapiens; identical to SEQ ID NO: 344575

SEQ ID NO: 476099 - DNA, 1000 bp, Homo Sapiens
tttttttttttttttttttttcttacctttaacttttttattttagttgcagctaaagcatttattggtataacaaacacaaggactgccacccctgctaacactgctggacccagctcttgccaaaggagatatacggccattaggatttgaaaaggggcagaccagaggagattgaggtttgctgtcaagtccatgagttgctgacatcaagttaataatttccccagtggaaaacttttgtcgagaaacatttgataaaagtaaggcctttttgtagatcagtccatttacagctgtcttaacttttgctgaggtgagcatgttaaaacgttgatattgctgaagaatcagagtttgcaaaaagactacaacaagaagtgccactgcatagccatagccattccagccaaaatctgagctgtgttcacagaaaatgataatttgcttcattatgagtgggctagtgaaggacaaaatatcagcaaacactttgaataaggcaacttgaatcaggatggatttaaaggtgttccacaatgcatagagtagagatggtttcttgatatgtgcctctttataacaagatacctttactttttgcctctcttgattccttaaaacttcctttctccattgtttttcaaagatgggacacgcagtgcagaaggaatcactttcctttagttcaaaaagatcctctctttccaaaggtctcttatagcctaaagtaattactctgtgtatcaagcgccccgcgttctgcgtactggagagcatggtccgcggggcgcctggccgctggctgagagcccggctgcggctgtcacttcccttggcagcggacagtcagttcagcgccagcacggtgggaggacacgcactccgccccggcagagtcagctgtcaccttagtccctgcctttcagtcctacccagtgcgcctggggcggtgcgggcagtcagctttcaccttagtccttgccttccagtcctagcc

SEQ ID NO: 476100 - DNA, 1000 bp, Homo Sapiens; identical to SEQ ID NO: 344576

SEQ ID NO: 476101 - DNA, 1000 bp, Homo Sapiens; identical to SEQ ID NO: 160942

SEQ ID NO: 476102 - DNA, 1000 bp, Homo Sapiens; identical to SEQ ID NO: 344578

SEQ ID NO: 476103 - DNA, 1000 bp, Homo Sapiens; identical to SEQ ID NO: 344579

SEQ ID NO: 476104 - DNA, 1000 bp, Homo Sapiens; identical to SEQ ID NO: 344580

SEQ ID NO: 476105 - DNA, 1000 bp, Homo Sapiens; identical to SEQ ID NO: 246595

SEQ ID NO: 476106 - DNA, 1000 bp, Homo Sapiens
ttttttcatttcatctgatgtcaattttttttgtggttgtcgtcgtcatcttgttttttttttttttttttttgtttttttttaacaaatcacatctggtcttgtttttctgcagacacaggcaccaggggagggaacgaggcagacacaaacatgcgacaggcaggccgtgtgcccgagggcagtcgggctccaaacaccaactctgtccggcgaaaccagggcgcagctcttcactgcagcggggccacaggcgcgcccgagcagtggaagtgcacgttctgccacttgccgtcgcggcggtgccacacgcgggtctcctcagactggctggtgcggggccggccctgcccgtcaatgtactgcgtgagccggatgtaagcgatgcaggcggcatcctctccaatgacgtgcacgtgtgggttcaggatggtcgtgtggatcggcttgctgttcttggccagcaggttctcgaagtagaatctgtggaagtccatcccttcaaccaggttgcccagtgcttcaggctcaaacgaggtcagccctgggtcacagattttcgcgtaggcctcaaagtcaccgttgttgacggcctcgatgagctgctccgtggtcttaatgatctcctgcttccgggctttagcgtcttcatcctctatggtggtattggcactgtcagaagactccagggcggcaggaggaagcgtccctttggggctggtggcggctgcactgtttttggtgctattcgtctggggcttgactccatctgctttcttgttgagtaaactcttggctgctgagaaattccgtgtggccagcatggtggtgaggatggctcccttgagctttctcctggcattgaactttttcagacactccacagtctcctgtctgtgcatcatggatgctaccgtggagcgttggcagacccacgggtgcttcagggcctcatgggctgtgatgcgcttggcagggttgatggtcagcatctggttga

SEQ ID NO: 476107 - DNA, 1000 bp, Homo Sapiens; identical to SEQ ID NO: 344582

SEQ ID NO: 476108 - DNA, 1000 bp, Homo Sapiens; identical to SEQ ID NO: 160943

SEQ ID NO: 476109 - DNA, 1000 bp, Homo Sapiens; identical to SEQ ID NO: 344584

SEQ ID NO: 476110 - DNA, 1000 bp, Homo Sapiens; identical to SEQ ID NO: 344585

SEQ ID NO: 476111 - DNA, 1000 bp, Homo Sapiens; identical to SEQ ID NO: 337689

SEQ ID NO: 476112 - DNA, 1000 bp, Homo Sapiens
acccaaggccgcaggtcctcaccaaacaggcccgccctttgcgcaggtcgacccaaggccgcaggtcctcaccaaacaggcccgccctttgcgcaggtcctcagggaacaggcctgccctttgtgcctcccctgggctcggctgagacaaccccccgcctgttgccacgctggcaacaccccgtcatcactcccgcccctcctcacaccgggctgatgtcggccgcggccctgagcagagtggacagggcagccttgctcctgcacgctgctcctggagccacagggccctgcccagccctccagcccctgttggaaaataacttttgtaaaaggtcactgccaggagcccccatccttcagcccacatgggcccctccagggcccacccttcccgccacactcagttactgtaagaaaagggccccagagggttcccgcctcaaaacctcggaggcaccgtgctgaggagggccgcgggcgggtccactggcccagcgccgcctcacttcctgggcccggcccagcccacgtcaccaaagggaccctcgccggtggccgagcgtggcgggggcccgcacggggtacagaggtcggagtcggtgtctgactctccctccgcaatgtagggcctgactttggcacaaggcgccacggccgcgtagcagctgttgagagcatccaggttctccttggactgggagatgctgaagccgctgaaggaacgctccagctcctcgtggtccacggacgggatggagatggacgtgtcgctgtcccgcaggttcccctcggggggcctgcagcccggggtgtcctcctgccgcaggaactccatgctggcgcggttgcccccgccgtaggcggacagcgaccgctcgtgggcaggcggcggcgggatgcgcaccagggagccgtggtcccccacgggggaggtgccgtggccctggcgcgggtggctctgtggctgccaggaggtggagggcggacactggacaggg

SEQ ID NO: 476113 - DNA, 1000 bp, Homo Sapiens; identical to SEQ ID NO: 344586

SEQ ID NO: 476114 - DNA, 1000 bp, Homo Sapiens; identical to SEQ ID NO: 344586

SEQ ID NO: 476115 - DNA, 1000 bp, Homo Sapiens; identical to SEQ ID NO: 160944

SEQ ID NO: 476116 - DNA, 1000 bp, Homo Sapiens
ctgcaggaccctgtccgggaaggaagcaggcgacccccacctgggcccagggccataggctgggacctccgttgggaagggacttccccaccccacactcacagggctgcttctggtgaagcaggcagcaggactgagtggagacccccgggacttggtctatgaggaggggcaagggttctaggcgccaggggcagcatgaaggggggtcggtaatagcagaagctgatccccctcctcccctcgccccagcctctccccgctggcctttctgactttcacagtttcccaggccttggcccggccaggactggacagcaggctcccgcaggacggcagggtggagccttctggaatagtggctcctccaggggcaaagcgggaacagaggtgcctgcactgagggtgcgccctgggggcaggagacacaggcttccctatggagctagctggcgaggggtgggggtggcttcagtggagccctgccccgcgtggtctgcaaagcctgggtactgcttgggacacaggcctgggcctgtaggtggcaccccgcacctgcagacttactggcatcccttgccctccggcccaagctgcacgggggcgtcactctggcctgtcctgccctctctcccctctgcccagcctgtcccaggtgtcaggcagtgggaggggctaaccagccctgcccgtctttccagggagaggttccctgaggtcttttcctacattgtgggggtgctgtgggggtgcagcccccaagtcatgggcacagaaaaccccaaagacccttccttactgaaagggtccaagcatgcgctccacaaaacccaagcccaccagctcggtgcagagcagcggcctgggctggcgggcggctttagagaaagtctacaggggccgagaggagtgcatccttgtgcacagggccggcccctgctgccacttgccgtggtgtggccagcagccaccgtgcagctaggagcacatgaccacaggg

SEQ ID NO: 476117 - DNA, 595 bp, Homo Sapiens; identical to SEQ ID NO: 344589

SEQ ID NO: 476118 - DNA, 856 bp, Homo Sapiens
tccaattccttgttgtttatttgtgcataatgtataaaagtaaaacaataaactcagccctatgtctcagtcagggctgcagcttcataaataaagggtgagaggaaataaattaaggaaggagtagggctcagcgcataaataaggtgtggggtgtcaggtggactcagggtgggttgacgttctcagacacaggttcccatcggccacatatttgaggtctcgcgtgaggaggcggaagaggttgaaggtgacagatgcctccaggcagccagcggactcctttttgggggcctcctggagccggtgcagccagtggtggaggcggccccggggcctgggccctgctgtgggctgaggctggatacaggcctggagctgggagaggatgtggtgcagggtgtgaaggggctggtctaggacgtcctccagggctgggccagcagcggcctccaggaccttcagcgtcagggccagctcagcctccaaggccacagggcgctccctcacctggagaagcctcaggtcccaattcccggggaagacaggagagctgcaactccagtttttcagcttgagtgactcttccaaggcgtccctggccttcttgaagctcgctagctcctgtggtgacagagatttgaacctgccaatgtggcagcccttcccagttgtggtgggcttggaagtggggacagggcctgccacggccaagcctagcaccaaagtcaccagcaccacggtccaagctgcagccatggctaaatcgcaactgcttccccagcggcatggctctgctttttagccacgcaaaatgggcaatccaagatgatgtgtgtaaagtgaaaaggtaatt

SEQ ID NO: 476119 - DNA, 1000 bp, Homo Sapiens; identical to SEQ ID NO: 344590

SEQ ID NO: 476120 - DNA, 1000 bp, Homo Sapiens; identical to SEQ ID NO: 467389

SEQ ID NO: 476121 - DNA, 1000 bp, Homo Sapiens; identical to SEQ ID NO: 344592

SEQ ID NO: 476122 - DNA, 1000 bp, Homo Sapiens
ggatcctcgcgctcactgctccgtcgtggggtgcggcacagagtccacgcaccctcgagggcggccctggcgccgtgggcgccgctccagggccctgcgtgtgacggtgcagcagcggctctggatggcgcccggcgaaggtcgggtgggcacggtggggggaggggcggtggcctgggagggttcagggaagccccgggcctcacccgccgggtcgtctcctccacggaaccccgtcccgctcaggagagcgcccagcccttccggccgcagcagcaccgcggggagtaggcccgcccggtcgccgtacctgcatagccaccagccgcggtctgacgtttccaacacgcgcacgcgcgcccccgcgggcacggacagctcatctgcgcggctgctctcgtaggcgcgggaagcacagaactggggaccgctgctccctagggacgggcctccctcccggccttggcccggggccgcctcctccaggtagggcgctggaaaccaggcggtctgccggtcttcgttctccaccagccaccagcctgaggggtgccgcagcagcacgtccaggctctcctgggcctgcgcctgaaaaggcctatcccgcgtgtcctgggtacagaagggctgcaggcagcgcaggctctgagcctccagactgtggatggagaggcggcccgcagcgcgagaaagaggctgctcctctggggtgggcaggatcacccggctgccgggtggcagcgcgggctccaggtccaggggttgcggtgcgaagaagccagtgatcgtcgggctccgtgccacgcgctctgcagtcgccagcagcctccgagaataggtttccaacagctgcaggcgcgccaggccgcggctcgtgcgccccacgcgtcccaacagtggtgcatccaggctggcctgaccgagaagctttgggagaacgcggtcagatctccgcagcaggcccgcctccaccgggaaggtctccttgagggtcttcttg

SEQ ID NO: 476123 - DNA, 1000 bp, Homo Sapiens; identical to SEQ ID NO: 157713

SEQ ID NO: 476124 - DNA, 1000 bp, Homo Sapiens; identical to SEQ ID NO: 157713

SEQ ID NO: 476125 - DNA, 1000 bp, Homo Sapiens; identical to SEQ ID NO: 344593

SEQ ID NO: 476126 - DNA, 1000 bp, Homo Sapiens
ttttttttggctgtcagttttattgatgctgcaaggggtacagtggaatacagctttctcttctgtaaatttattggtttggcagtgcagagagcaataaaactgtgtttttaatcaggaagccaagcgaacatgattccagaagaaatataggaagcaaatatgccatcacaagaagatttcttcccacactgtccctgttcttctcggatcctttgttaaatgagtttaggtgttaaacgatgtccttcttgggaatgccttatcatactgacagacaataacattatccgtgtcaaacaggtctggcacatcctgttcactaacatcatctccagaatttaaagggtcctcttctacaatgtttacttgagggtcttcattatcactactgtttgtggctgaatcctcatttgaaatactgtcagcttcttcttcaggtaccttcagatctcccccgtcaatattccctagaaattcattctcatctgcatctcttgtacttcctatttcttcattggaagatgtatcaccgcttccatctacttgaattatttcaccaatatcatcatcagtaacccgaatgcttaaatccacctgagaattagaatccttctctgatacaggtatgttgctgggttcctctatatttcttggttgctttacagaatcacatccatacatcctatttttaagaatatgaagctgaatatcagtcacgtgctggtggagagccccatgagggcttgtggagagggactcatcatgcagattttgagccatgctagctgaaccactgagcactgactccacattagaatttgtttgagagacctgtggagaaaatacaacacctggaagactgatatagtgagaactttcctgatgacacaacaaagcttcaggcacgattttatgctcatttccaggagatacaagtatatcactggtggcattttctaagtgtttcctatctactggcccagaaggtagaattgcg

SEQ ID NO: 476127 - DNA, 1000 bp, Homo Sapiens
tttttttttttttttttttttttttttttttttttttttttttttttttttttttttttttttttttttttttttttttagcatcccagactggcttttattatagtgaagaaggtggatctgctgaggacgaggcgcacaggcttggggagctgcttttctggaccctcctaggaggtggtgaacccacaggcgtggctcaccatagggagccctcggccaatgcgggttcctctcccgtggtccaccggccagcctgtccctgcttactcactgaacaagcactcacaaagtgctgactgggcacagagccccagcaatggctgcaggcagcctgggccacttgggagagcagccaacagtccccagggccaggcagaggggccagcacccctcctctacagcccgccagcctcctacaggaagccaacatcagcctgtctgcaaacctctgccaggctgccaagggctgagggggccacagatttgaagccccagaggggctggacccagtgagagagtgacatcaagctgcatggaagaagggtcttcctgtcccatggaggggctgcgtgagctcctcatccctggaagtgtgtgtgtgagggatgctggccccaggaatgaagcaagagctgggcccaaaaggtcccttctagccccgactaaccttggggacagagatgcaaatggggccaacaccgagacctggccaagtccccaggctctggccttggcccaacgacagtgagagtgggaggatgggcctcagacctccccacccaactccagggagtgcccggcagtccctggcccaccagtacttacaccagtaggtttcctggagcagacatggatcgctcttccctccgtgcttggggctcaaacgggttcccaaaggaacgcttcctcagcatggacttcaccaggatcaccgtggtccagctggggatgagcctgactgagttcttaacctcctcctctgtcacctccaccacgc

SEQ ID NO: 476128 - DNA, 1000 bp, Homo Sapiens
tttttttttttttttttacctgtttctgcttatttttttaatgtgagtactagagtatttaaatttacatatgtggcttgcattatctttctattggacagcactgcctaagtaactttttaaaatccctacacccaaggaaacatatagattaagtagcatgctcaaagagtcctacagttaggatatagtgccaggttttaacccagatcagtgtgaattccaagcctaggttctgcctaccacaccagcagcctccctccatgggttttgagataggatgaggagataaagtgacaagggaaagatacagagaggtggagcactgtaccttctttgaatccttgcaggtggacaggtagacagctgtggggaaagattgagaagggatgggatgctggagtggtagaggtggagggcagagggatgggtgtcaggctcttgggagtaggtggggaaagtccaccaacctcaggtcatggtcagggtagggctgacacttaccagcccagcccagtgccttgaagagcccaagcagaagaaaggcagacaggaaaaggcctacgctgtcctcaagggagggccctgaaagacctggcaggcagaaggggtgagagtgagctcctgtcttcctgggtgctggctcagattccgcagagctcccagctcttacctgctacctccagggtgacctcagcgctgcgccccgaggcaggcaggctgggatggtgaattcgacaggcatagcgtgccccatgctgctcagtggtgactgggggcggctgcaagtgcccagagaggctgacagagccatcggaatggtggcgcagggccgagagccacctctgcccctcggccttctgagagcggccccctgggccaccccggagttcccactccacctccaggcccccagaagggtagaagtgggacacaaggcagagcaattccgggggtgcctcccctggggcggcccgtgcaagggttgctggcatcaggg

SEQ ID NO: 476129 - DNA, 1000 bp, Homo Sapiens; identical to SEQ ID NO: 344594

SEQ ID NO: 476130 - DNA, 1000 bp, Homo Sapiens; identical to SEQ ID NO: 344596

SEQ ID NO: 476131 - DNA, 1000 bp, Homo Sapiens; identical to SEQ ID NO: 344597

SEQ ID NO: 476132 - DNA, 1000 bp, Homo Sapiens; identical to SEQ ID NO: 344599

SEQ ID NO: 476133 - DNA, 1000 bp, Homo Sapiens; identical to SEQ ID NO: 344600

SEQ ID NO: 476134 - DNA, 1000 bp, Homo Sapiens; identical to SEQ ID NO: 344602

SEQ ID NO: 476135 - DNA, 1000 bp, Homo Sapiens; identical to SEQ ID NO: 344605

SEQ ID NO: 476136 - DNA, 1000 bp, Homo Sapiens; identical to SEQ ID NO: 344606

SEQ ID NO: 476137 - DNA, 1000 bp, Homo Sapiens
tttttcatcttgagccagatgtgtataatatatacagcttaattatgttggctaacaaaatcttattttaaggtgacaagagagaatttgaaaatagcattcattttcatggtcatataattctgtacttggaatacatgccattatctctgcattttacaaataagaaatcatcactttgatggattgtgggtttggcttataatcatgctgctcaattaattgtttcagaaataaaacctgcttggctccttttgttgatacactgtaggatccaactccgaggtcaaccagttatgggaagggttggcctgttgaagctgtagctctttgaacttctgtccttctcatccctcacctctccatctttggattccagtctcagctctgtcctgcaggtggcttccatattgccagcttctgcattgatttccactccttttggggcctccatcactagagaccgggttggggactccaaccttagttctttgaaggggtctgccctgacattaggtgtttctatagatttagggaacactgtgccctccgctcctaaaactcgtaatctttcagctcctactaccacttcattattgtctgcagagaagagcaattttccagaaacagtttttacctcaaattttttaccataagcttctacggcttttggacctgttataagctgagttagcactttagtctggtcattgagaatgttcactgtaacatttctggcagacttgaagtacagggcattacctggtcgggactggatttctttggcgtagagaggttgtaagaattcagagtctccttctagctttagacctttttctgtgatcctcaggtttcccattccatcaattgtgaagttcatgactttgagaatccagatggtcatggccaagttcaccagtattaaaatcatgaggagcaggacaaagaaatacaggcatcgtttccgccagccataaatccccaccttgtatacctgtgg

SEQ ID NO: 476138 - DNA, 1000 bp, Homo Sapiens; identical to SEQ ID NO: 344607

SEQ ID NO: 476139 - DNA, 1000 bp, Homo Sapiens; identical to SEQ ID NO: 160946

SEQ ID NO: 476140 - DNA, 1000 bp, Homo Sapiens; identical to SEQ ID NO: 160947

SEQ ID NO: 476141 - DNA, 1000 bp, Homo Sapiens
ttttttttttttttttttttttatgaaaaaacttcacttttattgttggcaaccaagtcaaatttttgggaaaccttgtgtgggccaatcacatagtcctgtggggctatattaggtccccaagctgccacgtgggaaccatatttccatgcttacaaagacagactggacttagacctggggttgggcagtgtcctcaaatacctagtgggtgtgaaaacacttcccccacagggttgctggagcattccctggggagataagacgtagttggcacatgcagcccagctccggctcccgtgaactcccagatgagtgggagcccttagactgtagcacacaccccgtgtcaggccctggagtaaataaactttccattcattctcttatgtaacaaaaagaaatgctcaccatttgtagacacacatgtacctatcaataaaaattatcttcaggacccagaaaatgtgtctgggctactatgatgcaaaggattaggaacgttgagaaaggaccgaatggttgagataaatttgatgatatatgtaatgtgcttcgctcagggccaggcacgtcaaaaatcacaccacccatttattcactcatttgttcattcaacaaatagtggttgagtgcctgtttgtgctggacactgttctaaacactggcaagggggagggcagtggtgggcacagtggaggccaggacaggcacaggcgtggacccccatgatgctcacatattaacagggaggcagaccatgcacacaaacattcctgatgtcaggagggaccagggatgctattcagccagtgtgcaatcagaggaggctttctggaggaggtgacaatgctcagagtcccttccctcgtggtggcgcgtttccccgcggggcgtgggctcttacctgctcctcctcctccctcaggctgggcaaggtgctgacggagaggttgacggcggtgacggtcacgaagagcaccgacaggcaggcgaacac

SEQ ID NO: 476142 - DNA, 678 bp, Homo Sapiens; identical to SEQ ID NO: 160948

SEQ ID NO: 476143 - DNA, 1000 bp, Homo Sapiens; identical to SEQ ID NO: 160949

SEQ ID NO: 476144 - DNA, 1000 bp, Homo Sapiens; identical to SEQ ID NO: 344612

SEQ ID NO: 476145 - DNA, 1000 bp, Homo Sapiens; identical to SEQ ID NO: 160950

SEQ ID NO: 476146 - DNA, 1000 bp, Homo Sapiens; identical to SEQ ID NO: 160950

SEQ ID NO: 476147 - DNA, 1000 bp, Homo Sapiens
gtggtaggggtggtggtgacggcagggttggaggtatctgtctctgactttttttttaaatagacctctcagctggctccaaaaatgtctctctctgattctggggactgtggcctcgatatttcaaacaactcctgaggagactgagaggatcttctggaagttaatatcctgagtatctcagagagctgtttctcaatattggtcattttggcgtttaaggccttgatgtcctccttcagctcgtgcctcacctccaggactgtggcctgcagcgtctgctcagggatggggtagaacgaatgcttgacctctgccaggatgggactccgatcctggggactcctggcctcacccacgttgtccaggcgcaagtcgctcttggtgatgccactgtcacacgagtctgtcttcttcagtgtggcctcgcctgacgcttttgtcctctcgggaagtgtctccatcgactcagccttggacaccttgttccagtcctcactcttcccgcaagcatctttgaagcgggcccagcttttgcgcttggcacaatcgcccccgccccccttggggcccaggcactcggaccctggcgcctgtagctttgcgtggtctggcaccccggaggtggaggctgcctggaaggatacgggcgtggcaggactctcacgcacggtgaccacgctggccttcacgaggctgtggttggcggaggcatgctctgtaaggacattgcccttctccacatctaggtcatccaggtcccggccccctctctcagctgccagcctggcctctttctgctgtcggaatctctggaagaggcgccggacagggtggtccgggggcaagatcaggggggcctcattctttcgtttcatgcgttcttcctcttcacgtttcacatcgctgatcttccggaacacaatcctcttcctcaagttgtacgtcagaatcaggttccgggagaaggaatgggagaaggccgtgtagaattccagca

SEQ ID NO: 476148 - DNA, 1000 bp, Homo Sapiens
aaagtcaaagtagtttacttgagatatggaatgtaccaggttacttagggcatgatgtatgagaggacagtgttttcatgaccaagtccagtgtatcctgaatcctcatgttattgttttccatcaaggaaggatatctcccaaatgattttgtgttttcttctggatcaagggggtgaagcgtatgtgggttgaatagacatcgaggctcccccaagatgccaactaccggcatgggcacagagtccagagttcccacatgcttttgcatctcggctgggaatctgacgtctacttgatgatactttttctcaaagacgttttgagctttttctctgagagatggcagcagagtagacatgactggagaacgcatgttgatagcttttttaattgctgggcgttttgccatcattctcctgaactgaacaaaagtcatgcgtttcttttcccctcctgattcctcatcttcacgcctcctgcgaggaatgttgaacatattggtacgaaagagtctccctacttcttcttcaatctctgtcaagtgttgacgtcggaagacaatccaagccacatatgtacagaaagtataaaaggactcaaagaacttccagtctttctgtgtatctgatattttctcctttccacagcacatgtgatgcttatccggcacggccaagcccagcacaaggatacagtacttctgcgccaagtacctctgtgctgcttctaattcacttaaaaccaattccatttcttttttctctacaaggcctaccatatagcttttgggtttcttttccagtgagtttttttccaagtaatgggataagtagtacaataatgccatgaggaaattatcaagattcttattcctcataaatgttgtaaaagaacagatccgctgcatctcagtatcttgtagcaaaagcaaagtaacaaatttaacatcatccagtgtaatggtgccctgttgacctcgtttctctacagctttagc

SEQ ID NO: 476149 - DNA, 1000 bp, Homo Sapiens; identical to SEQ ID NO: 344613

SEQ ID NO: 476150 - DNA, 1000 bp, Homo Sapiens; identical to SEQ ID NO: 344614

SEQ ID NO: 476151 - DNA, 1000 bp, Homo Sapiens; identical to SEQ ID NO: 160951

SEQ ID NO: 476152 - DNA, 1000 bp, Homo Sapiens; identical to SEQ ID NO: 344617

SEQ ID NO: 476153 - DNA, 1000 bp, Homo Sapiens
ttttttttttttttttttgggtaacaaaaatcatactcttttattatagaatagagattataaataaatgtaaagtgtgcatgcagtcaactgcataatatacaagcaatatctatgtttttaatcatcatcttctttggcaggccagaatccagctggacatgcaatatttacatatcaaaatccatgtgtggtcatcatcttgaaagcaagtgaaaatatatatatgtatatactgtatatacacacatatgtatatactgttttaatatattaacaaatatatatgtatatatattaaaagtggatttcatctttgtcagattcaggtgattcaggccttgagacactaaaaatatcctgacatggtatctgggggggtacttggagtggcatttgggatttgggagatgaggcctggggtacgcttttttccgacagtatttttaaaatttctgccacctgcttttctagggcagtcattctgcagctgagcagctggatgtcctctttgagttcgtgtttgacttcctgcagtgtggtctgtaaggcctgctcggggatgggataaaaggggtgcttggcatcagcctggatgggactgtgctctagcggacttcgggcctccccagccttatccaaacgaaggtcactttttgtaattccactgtcacaagaatctgttttccttagtgggtttttggtcacactgttctctgaatcactgctcttggggtcctcagacaatagccccattgactcagctttagtgacattattccagtcttcctttttctcctcatgggctcccatattattcttgagtcgcagccacccttttccatttccattcttcattcttattgggctgttgactttgagacatttttggtcagcaccgccgttgggcttgagttccatggcatcacggttgttctgcttaagggattcactggttttcacataggccagagacgtctgaatgggagtaatctgtgac

SEQ ID NO: 476154 - DNA, 1000 bp, Homo Sapiens; identical to SEQ ID NO: 344618

SEQ ID NO: 476155 - DNA, 1000 bp, Homo Sapiens
gtatgagtgaaaaggagccattcccacggcgggtgaggggcaggcaggttgaggagaaggtgccccagcctggatgcccgtggtcccaggagatgaagttacccctggagaagtgtctcggggacgtccgcccagcacaaagctcattcaccatccttaaagaccacatcaggactacaggcttaaaagcaaagtttattcctaaaggtgcctgcaaaatagctatacctatttgccttttcaccgtaagcagctttagggtgcaaatgcacaccaggaccccctcagttttttggagcagaagagccatgttttccccttggctgttatacattcgcaagaagcaaaataaccgtgactatctgagtatgcaacccccgccccccacccccaacagggatcaaggaaaatgcatccgaagcttcccttttcctttccttttcagggcatcgatggctcggtctcactaacgggacatcacacagttaaatgtgcaacacgccacgctgctttacggcgacgtcgtttctgcgtctttagaaaaagcaccccacgcgctcatgttcacggcttacggttagaaagatggcgttaccgttggcgggaaggtaggtgaaacgctggtactggcttcgctttctcttcccgttgcagacgtagaaactgacgtgaacggggctggttatcctctgattccgaaatggcgggatctcaaccaccagagaattcggcttgcacaggtcccggtcagttttcgcttccatctcccagacatggtggccatctggggctttctccacgaaaatgaccttggagtcctgcaggaagttgtggccagacaggaccatcttcttcccgcccacgaccggatagctgtccgtgctctgcttctccaccagaggcagctcctgagctgagcgctgggagcattcgatggggttggaggccacctgcagggacagcgtgcggccgctgggttgcgggacgtgaacgcggaaca

SEQ ID NO: 476156 - DNA, 1000 bp, Homo Sapiens; identical to SEQ ID NO: 344620

SEQ ID NO: 476157 - DNA, 1000 bp, Homo Sapiens; identical to SEQ ID NO: 160953

SEQ ID NO: 476158 - DNA, 1000 bp, Homo Sapiens; identical to SEQ ID NO: 344623

SEQ ID NO: 476159 - DNA, 1000 bp, Homo Sapiens; identical to SEQ ID NO: 160954

SEQ ID NO: 476160 - DNA, 1000 bp, Homo Sapiens; identical to SEQ ID NO: 246596

SEQ ID NO: 476161 - DNA, 1000 bp, Homo Sapiens; identical to SEQ ID NO: 160955

SEQ ID NO: 476162 - DNA, 1000 bp, Homo Sapiens
ttagagaagagacatgcaggacaccagcaggcccagcagcatagtggcagatgtcacccttccagcactgtccgagtgccagtgtttcgcatacacatcatccaggactgacagcacagcctccatggtctcctcacaggtgggctggatctgagcttctggcagaacaaacccatatgttccactgtccctcagctcaaacgtatatgagaagggaatcccaatgtctcgggcccaatctcttgaagaccctgatgaggcatataaaatatctgcactcgatccaactctataattggttccatactttgctttcaatgcatttgctgccttctgtccaacttgaatcatttctgggtggttacttgatttatttttggtgtagccgtaaggtgtgagaattaactgcccataagagtgcatggtcaggaagcacaaaatatcatccttcttgctctctatgaagctggcaacagctttagtctctggttcagacactggccctgtcccacagaatgtttgatcttggcagtttctagaggcaccaatactacaccaagatgcattgaaatttcgattgagatccgtcccaaaacatgtgccattattatggggtgaacgggatttcctccaaagacgatcagttgtccaagtgtagatataaccatctatgttaagaactggaaggacatagaagtccaggttcctaaggagcttgcgtatacttgagttgtctttatggttttgtagaatttctttgacgaaccattggcaaaaagcaggagcaatccattctctggcgtgaattccacagtccatccaaatgattttcttgggattaccagatggttggctgatcttcagataatacatggggtgggtctcataggtcactcctaggaaatgctgtgtcaccacttccttgtacttctcactgatctctctcatccactcatagatctctcccatggggtggtatatgttataggaatacgtctcc

SEQ ID NO: 476163 - DNA, 1000 bp, Homo Sapiens; identical to SEQ ID NO: 246597

SEQ ID NO: 476164 - DNA, 1000 bp, Homo Sapiens; identical to SEQ ID NO: 344629

SEQ ID NO: 476165 - DNA, 766 bp, Homo Sapiens
agcccaggaagcagacacatttattacatgaggcacatatttattggggaaaacaggagagaagcccagagcagggggcatcatggagaggaatgaggcagaaactgtgcaccagcctctgtgaccctacttgtcagggtggaaccccagaagaagcccagacactttcctcactttgggaaatggatgggccttagctgtggccacgctggagcctgcagagaatgaggtctctctcacacccacctgggagagcatcggggtgggatatagaagaagccaaggtggtatgtgtggggaagggtacgatgggaagaaatccttacaatgcttccttacatcttgggcaggaggagatgtgagaggagggtaggctcaagagctggagggaagaggagaaggaagaagagaaggttccatctggtagccaggatggtggatgatggtaatatccagtccatccttacttctgtttactcttggaggcttgctgggctgagggacacttctgctgggctggaatgatggtgcctttcggtgggcattgcttcttgacctggggagcacatggatccttggttttgggtgcacatgtctcttgacatttaacagggggtggctgacaaggctgcttcacttgctgctgctgggccctctggggtgggcactgctgctgctgccgctgctgctgctgggaagacattgctctaggaacaggtgagccagaggcgacaagctggaccccaggagaggaggctgagccctt

SEQ ID NO: 476166 - DNA, 1000 bp, Homo Sapiens
ttttttttttttttttttttttttttttcttatttaaagtttttatttaaagagataaaatcaatttggagaatgtcttagagagtgtacacagtgaatttcttgtttgagcctctcttgtgttcgtctgatggcttaaatgaatctgtaaagatcagcctctcgacttctcaacttcatcagtccacctggatggaacatgaggtcaatcacgtacatctcaggagcggggaggcccccaatcactcccttccgagagtcattctgcagcatgacttcattccacgctctaccgtactctccgcgaactagggagcaaccaatgccaattctatcagccagagccttgaaaagcaaagctcgatggtagaagattccttttttgacatgtccaatcggtataacattggatttaagttgaaatttcagttcacttatgtgaagttcccagctgaaatcaggtagtttctcttttggaatcttaccacccattttttctgctacatactttgccagatcctcaatctgttccttaatattggttattggcagtattgatttggtcacctcatacacatacatagagaaatcagggtcagagggaggacaccattctttgtcagagcttccttcaccaacaaattttggtaccaccataacctcttcctcctctttcactttttcctcttctttttttcctttgcttttcctccatcctttttctttggtggcgcttttgctgagaacagtatttcgtccagaagctggctctgatttgtcttctatgggagatccaaatccagcactaaaatgataactattttttttgttcttttctttacttgatcttcttaaggaagatgaagaagaaatactttgtccataaccaacatctgatttatcttccatagatgaaggtggagaaacgtaagatttactgttgattaagagtacagcccgtaggtcacttggttcttgtaagcagagctccttcaaaggc

SEQ ID NO: 476167 - DNA, 1000 bp, Homo Sapiens; identical to SEQ ID NO: 344630

SEQ ID NO: 476168 - DNA, 1000 bp, Homo Sapiens
ttttttttttttttttcatagatcaatttatttagaattacaaatattaagaatagaagatttatgcatttcttaattaacataacagtttagctaaatataaactctgcactaaagttctgcagtggcacaataccaacaaagaatacggaagcctttttaaactatacaaaaatttcaaatggaaaataatcttgtttcagttttattatacattaacatataaaaagtctcattttatgagacatctaaaggaattaaaaccacctctacagctatatcttaaactccaaatttgaaaaaaatttatattttgagtttataatattctattaaaacgaagaaaattccaaatacatactttttacaagattaacattttaggcagcgttttcctaaaaaagaaaaacaaccaaaacaagcctttcttctgcatttcacagcactggttattatatttgttttccttataaaatctttttactttataaattgtgtactgttggattttaaccagtaatctggtttaaaagttgtgcaaataaacaaaaaaatatgaaaatagtgtgttatcattttttttttaataaatctcacaacaatgcacttttgacctgaactgatgggaagacatgccaaatccatttttagaaatttagcattttgcaccttttttccccctgttccttcattttctttcaacaaacaacaaaggtttcttttatatgttatgataaattaaaatatttattattataaaatgatctacagaaccatgtcacattgcaagtatatataacatatacttgtaaagtccacatttcccatctatatttcagtggtttccttaaaactaggacttcccacacctcatgatgttatcttttgaagactgagatggtgatcaactaaatcaagtggagttgtaattttctggatggaatttccacactgccaccgacatgaataaaaagaccaggtttcttcatactctccattg

SEQ ID NO: 476169 - DNA, 1000 bp, Homo Sapiens
aattttattttatttttgagatggagtctcactctgtcgcccgggctgtagtgcagtggcactatctcggctcactgcaacctctgcctttagggttcaagtgattctcttgcttcagcctcctgagtagctgggattacaggcgcccgccaccatgcccagctaaaggaaatccccttgcccaccttcagtcccctcatggtgtctttatcttggagttcagtggccccaactccctgcaaatccaggatctgagccatgtctctggaagtccagctgcttgggaacagagccaaggtgttcagggagggaggagaagcagggaccacagatgagtccttgtacttccaggggatgtagaggtgaggctaggggtggccagagcccctcaggctgttcctgttctgaggatggtgccagagttttgtccgttgccacagccaggtgaggcatcctgggggaggagttcctgtgctttggactacagtcatccaagtctccatagcttggggtctgtgcaggaggcagaaagccctggggcagcctgggccctggactcgtcgtctccgaggctataggaaccaaggccaggtcattggaggcaggggcttccagaatgtagctggcgtggccctggggcatgggcttctggaggagctgcaagatgcggctgaggtctgaggacacgcgggactccagcctgttcatctgggcctggagctgctctagcctggagcccagcttcagaggccagcaatctgggtcttcctgagggctttgggggctgtgccttgggggcatttcctgcagtagctcaggccagaggccagatgcatctgagatgctcaggggaggggctgcatctgactggttgtcactgagaaagaaaccttggtggtcttggctgccaggagcctgtcggggggatgagtggagacccccggctgcgtcccgcaggttgaaggtgacctccagcttactccagaagctctccgcaaag

SEQ ID NO: 476170 - DNA, 1000 bp, Homo Sapiens; identical to SEQ ID NO: 160957

SEQ ID NO: 476171 - DNA, 1000 bp, Homo Sapiens
ggggaggggaccgtccagatcctgctgccattgcagacaaaagcgctctctgttcacagctatttttctaacatttgggtggcaagggagggagagacggggttgggcggggggagagaaaagtcttgaagacattgggggaggtttctcgctctgaggaagtccccaggacacactactgggggccagggtctccctggcagtctagacacctgtattttttcatgggcccttgtccacctgccttctccctagggcagacaggagagggccaaggggctggggggtggggacgggaagctaagcaggcaccatcgctgggacaaacacacagcctgttcccaagtccacccccagccctcaagaaccaaaccctccgcagggatcctttcatctcacgccaggaacatgagagcctgggggcaccccttcccactagaaccttgagttgggagaggacaggcagaggagcagaggaaaaccagaggctcgccaggcacccctgcagctcctatctgcccctatctcacccctccctccagctctgtgcaatcccatgggcccgagtgtcccggcaaatgaaagcttccagccctggcatctacgggtctccaggaaggcggcccacctggcagggctgatcccaccctgcaggacaggacttagctaggaggagaacccagggggagaccacaggtcccaatgggatgaggccagcctctctccatttccaacaaaaggccccacctggggctgcgcggtaccttgaagaagcccttgcagccctcacatgtgcggacaccataatgctggcatgaagcgttgtccccacacacagcacagcggccttcacttccacctggggccccgctccgggccttggttgaggtcacgggtgtatccagtatccccgagccctcaaggtgtggagaagtgggtgccaaacctgggaaggccgtaggcatggaatagctctctccctcccccagctggtgggtgg

SEQ ID NO: 476172 - DNA, 787 bp, Homo Sapiens
ttttttttttttttttgagggggtggtggggcgagtttaattcataaagaagcctcctgatcagaaaggggcctaacagcctgcccttggagagaagtccttccttgaggataaggcctcccaggggaggaggtgctgggggccagtgttaggcttcaggccatccctggaggccagtcctgtgctcagcaagtagtggcagagcctggagtgatgagtgggatggccttctcaggtacaggactgtgctgcttctggctgctcttgcatttgcatttgccactcagaactgccgcgatcccagcaatggccaggagccctccgcagatcagtccgctcagctgcaggtttttccagtcatagtagaagggatcgtctttattggcaaatgggtcattggcttccaaggcagtcaggcctgccagtaggagaagggccagggtcactctctccatgtcacagttcgaggggcagggctgcagggggagaggcactggggcgggggtctgcagcccacggatctgctccaggctcacagctcaattggtcagcgagaggaggcaggggcgggggcaggcagagccccatggtgaaagtaggtgtacaaaccccaaggatacacttgcttgtggggagatcttgggaaagtaactactttctgtcttcccatctagagatggtggtggccaactgtgtgactctgcaggttcctcactgctccttcaccagtgtcctgcgaggtcaccttggcgagggctcacctgagctggcagcgcagagaacggat

SEQ ID NO: 476173 - DNA, 1000 bp, Homo Sapiens
ttttttttttttttttttttttttttttttttttttttttttttttttttttttttcaaagctggtgattccggcttttattccattttggctatcactataatgcctgcggcactttcattttggaaaacagacatacataccatgttcatgtcaatgccattggtgtaagtccatgcgtgctggaaatattcttcaagacgttgcctcagagggttggggatttggtgaaagcgaatgaactcttttactcgcagcatctgcatgtggtacctggcagttcccgagtatagtctttggataattgcagatacattcccaaaaatgcttgcatacattagtgagccaatcaacatgacacaaattgaaaagattttctccgaattcgtgttaggagacacattcccgaatcctacactggttaaactgctgaaggtaaaataaagtgctgtgacgtatttgtctttaatggatggtccagaacttgagtcactgtcattgtaacgtttcccaatttgctgtcctaaggaatccaaccatccgattttgtcagtcaggtaaggcctttctacattcccaatcgcataccaaatgcaagccagccagtgagcaatcagggcaaagatgcacattaagagcattagaacagcagcgccatattctgaatatcgatccagtttcctggccacgcgcacaagacggaggagtcgggcagtcttcaaaagaccaattaatgttgttgtctcatcagaacctgatccaaaaatcagcaagtcaaaaggaattgctgcaaccatgtcaatcaggaaccagcctttgaagtagtgtattgctattttggcgggatcacttaccacttcttcattctgatttacatatgttgttctgaagtttattaaaatatctatgataaacataatatccacaatcaagtctaccacattcaaagggctacaagaatagccacattctcgtcttttctgttcttctctgtcattga

SEQ ID NO: 476174 - DNA, 1000 bp, Homo Sapiens
ctttttttttcttttttttttttttttttttttttttgcttctagaaggtcttatcaaaagttcctattttaaaaattatcataaaaactaaagggcccttcaaatgaccataaagcagtacaaatcaccaatcctagctaagtaaccaggtcacctgcaaaagcagcacctcggaaacaagagagcctgctgcattcacactcaaagcacccatcatataaaagtatcctagttaaatataaaaagcaaagttcatttccccaaagctcaaacagcctatgctgctcctgttcttttgccaaatctacccaaggcctgaggtggaggaatgctactttccccacaaatggtgggtcccactcctggccccagacctgaaggctgcagagttggaaacccaaggtccaaggagagaaacatgctgagaagttggtggtggacacaaggctgcagtaagcactgttagagcccatcagatcttcctaaatccagggactcaggactcgggaggggagcctgcctgctcacccctgctccttgggaaacagaaatctgggacatgtctctcccaattatctcgttcactctagattcctcagatatcttcctgctgggactggccaaaacgtaggtctcaactgaagcaagtcaaaattattactggtaaacaaatcatcatctaaagtgatgtcctgcagaccaatggttgcaaagttaggctctcgatcttctggttcaggtttaatgctcacagttgccccatcaggtggaaatgacgctggatcacacaaactgtgacatattaaggatgaaggtgcagaaagacccccctggcccgtactttgtgcttgagttgagtgctgtccagaatgcattctggtggctggagacggtgatgaggcagttcctgagctaggagattggtaaggcataggctgaagctgaggagatggtggcccagaaagcggtgaactagccaagggatgagaagctgctggg

SEQ ID NO: 476175 - DNA, 1000 bp, Homo Sapiens
ttttttttttttttttttttttttctctttctctgcatattatttatctattgctgcataacaagttagaccaaaactgagcaacttaaaacaacaaacatcgattatctcacagagtctctgcttctaggttcactaatgtggctgtgggcaggagacttcattttttaccacgtaagtctctttataggcctgctcatagcatggcagctagcttcccccagagcgagtgagccaagatagattgggggcggtgggtggcagagagagagggctcaagtagaagctgcagtgtcttttataacctaatcttggaagtggcatgccatcacttctgccatattctattggtcacaaagacaactttggtacattgtgggaggggacacacacagaatgtaaacacgaggagacagggatcattttagcagctgtattagtttcctagagctgctgtaaccaattatccttggtggcttaaaacagccgaaatttattctttcttcgttcaggaggctggaagtctgagattaaggtttcagcagagccgttatccctctaaagcctctagggaagaattcttctttgcctcttccaagcttctgatggttgccacaatccttggtgtttcttagcttgtggctgcaaaactccgatctctgccttcatctttacatagtcttccccgcatctcctctgtctctgtgtcctctccttttcatacaaggaaaccagtcatattgaatttaggtctaccttcatccagcatgaccttgtcttaactaactacatctgcagagaccttatctccaaataaactcacagactgagattccaagaaggatgtgaatttgagggggacacaattcaaccagtacagcagccttcttagagactggatccaatgccttggaatcccaggggctgtgatccttctaggaaagaattaccagatgatttttgttctttaagttccttacccagagattccagccacaca

SEQ ID NO: 476176 - DNA, 1000 bp, Homo Sapiens; identical to SEQ ID NO: 160958

SEQ ID NO: 476177 - DNA, 1000 bp, Homo Sapiens; identical to SEQ ID NO: 470884

SEQ ID NO: 476178 - DNA, 1000 bp, Homo Sapiens; identical to SEQ ID NO: 344634

SEQ ID NO: 476179 - DNA, 1000 bp, Homo Sapiens; identical to SEQ ID NO: 344636

SEQ ID NO: 476180 - DNA, 1000 bp, Homo Sapiens; identical to SEQ ID NO: 160997

SEQ ID NO: 476181 - DNA, 1000 bp, Homo Sapiens; identical to SEQ ID NO: 344637

SEQ ID NO: 476182 - DNA, 1000 bp, Homo Sapiens; identical to SEQ ID NO: 344638

SEQ ID NO: 476183 - DNA, 1000 bp, Homo Sapiens; identical to SEQ ID NO: 160959

SEQ ID NO: 476184 - DNA, 1000 bp, Homo Sapiens
ttttttttttttttttttttgcatagccattgtgttttattagatctggtatatttcttactttacaaaatatatagaagagcccaaaatgcaaagcagtcaacagtcttctgatggggaagggggctctctgggggctctcccctcagattctggccaactgggagggtaagctaaatgggacgagcaggtgtgctaaggggtggccgcatggctggggtgctgacaatggggttggaacctgggtcctatggtccctgccctctaggtgtgctaaggggcatctctgggtagattgagtcaagcaagaagagaccctagggaactgaggaggttatctggggtggggtggggagagcccaggttgattgaagattctagtgaatgcccccacactgggttcagatgctatgcctgcctccctccttccctctcccttctaaggcatccactgtggggagtgataggccccaagttcaggaaggtcccaagtctatagagaacatgggaaacaaaaactcaagtcatagccctcaaaacagggacgataagcaaggagggtgggatgaaattttggcaggcatcagccaggacatcccccatccacattcccccaccacaaccaccaccaacacatgcaggaaggaaggagaggaagcaatgccagagatgagccagatatctggccccaggctctccatggataccgaggagggtgtggaaaatttctggggcatttctaaggagacaaggtcttctgcaaagcctggaaacttatattttgatggcctgtggtagcagacctgtggaacttggagctataacctggtatgcctgagcaatcataatctgtccaggcccttctattctcaaccccagccacctcctaggacctatccattgactcaggcccaagatttctccctatacattcttgtccccctcccacagggctctcaatggctggtctgagaagccagccagtgccaagaatggagca

SEQ ID NO: 476185 - DNA, 1000 bp, Homo Sapiens
ttttttttttttttttttttttttttttttgtgtttgaattatttcattccatttatttcacttgggataggattgaaagtcttgatgatgaggccatagcacagtcagaccatctgcttttccagttctgtgtttgcaccgtctgtgcatccatattccccccaaaaccaagaaggccagtgaaagtggggccagcacaatgccccaggagaacgtggaggaggcttccttgactgtggtgcgtagtgtctgaaaactcagggtattatggacaacacatttaaaatccatgtgcaaatcctctcttgtgacaggatcaaaaatcaatggcacttcaatgtagttctcattattttctgaatattcctggcgtggcccctcggtcacgcggcctcccgggtaggcgctctctatgtgggtgtcattggccgtccaccacagcatggtggttaagggtgtgccggttcccagaaacaccttacacgggattgtcagtcttgaccccagagaagctgatatggtcttgaggggggaaatgatcacaggaatggtctcttctttttttttcttgatgcgtagctcaatactcctagtgatgttgtattgctggccttcatgggcaaatgtcaggacacagcggtaatagccagcatcttccagggccacatcgtgtacgagtaagtgagtggtccccctcacacttagaaatttctcattgtctttatccaaaagaagagaatccttgtaccattgaatcttcacgtcagttttgtcacgggtgaattcactcaggtcagggcatactaataccccagaggttgacaaggttaaaatttgcgggtatgagatgaacggcaggaaagcatctgtattctcaaaaactctgagctcaatggacattttgtcacagtaagaagcatttctagtagtgcagacgtaggtgccagagtcctcctgcaaggctggcagaagccacagagcaccgtcctgggcccacat

SEQ ID NO: 476186 - DNA, 1000 bp, Homo Sapiens; identical to SEQ ID NO: 246598

SEQ ID NO: 476187 - DNA, 1000 bp, Homo Sapiens
actttttcaaaaagtcaatttaattgaactaccttggatgaatttagtttccttgatagagtggctgggatgtggagtgagataccaatagaacacgtctggacacagatatgccacaattgccttccgaggagaggaagctggggagccacacagcttttgttttgctgggtgaggtgtgcaagcacttagagcattcagaacagcaggaggggagactttattgatttttgcagcatccgctgtgggctggcttgggctgtgggcagcggacacggagttggccttgcagagccggctgatggggggagtgggccaaatgtgttcaggaaggaggtggctgctgggtcgctcagtaggtgatggatgtcttcagactcgactcaactgtcttcttcaggatggtgtggcagctggagccagcgctggagccagacacagagcaggaatccaaaacagggtccttcccagagcccagaatgatgttggagcctccagtcacaatgctggtgcagcaggacccagggctgcctttcccactaccgagtccacaagtgctccccaagcctccaccaactcctccagacatgacagcgctgcctcccaccgaggagatagtgacctggctggtgcactccccagacatcctgcactcctcgccctccagcagcctgcggtaagtggcaatctccacatccagggaaagcttcgtgctcgtcagctcctggtactcgcacagcagccgggccaggttctgcttggccatcctcagagcagcctccagctcgtccaccttggcctgagcgtccttgagggccagctccccacgctgctcagcatcagtgatggcggcctgcaggctggcgttctgcttcttgaggttctcagtctgactctgcagcctctgaatctcttggtgtagctgagagatctggactttcgtttcctgcatcctgtccccatgaagctgggcagacacctgaagttcctggtacttggt

SEQ ID NO: 476188 - DNA, 1000 bp, Homo Sapiens
tttttttttttttttttccttccaaatattttatttaaatattaaattaaaaaacatacatcaactaatcatttggcatacatttctcatgttaacataagagataaaataattcagttatggtaaaaaaaaaaactatgtacatctcaatcagatcacgtagtgtctttaaataggctattgcattgccgtctgtattacagcactgtcaagaaatctacaaaacacacatcacacactcttaaaaaaacaagtaaaacacgcctttaacgtcctccaaaagaggttccacagcaataagaaaaaacaaaaaccaccgtgaaagtaaagtgcttgtcattgcttcaaagaggaaacacacaatggtttctgaggcctttgatctatggcattagaacagaaatcattttaaaaaggggaaggggttttgtgttggaatcagttgtgctacctctgtaaaaatgaaggcaagggcctggctgccccaagatggtctggattctctcccatcccaaaaacttctttatgagcgaacaggagactttggtgttttctctgcggcaaggcacctggtctgccctccggacagcctttcgcccagtctttgaaacagccacagagcagcagcagcagcagcagcaggaatgggggcagccagcttccctgcggcccggcacaggcacagcccccggtgggcaccagcaggccagggatgcagcctcctgcactgggcccgcctccctaccctcaagtaactgggtcaatctttggcttttaaaaatacccgcctttcccctttctcaatgcctctgtttaacactgcagggtttaagaagccgaagtagctgaaggcacctgggctgggtttgggggcggggactggactcagggagcagcattgccttcgttgccttccagaggcttctggctggtggagccccacggagtccacctgctaaaggtgcgcccagacctgccaggtaagggccgccccttcctg

SEQ ID NO: 476189 - DNA, 1000 bp, Homo Sapiens
ttttttttttttttttgtgttggaattaaactttatttgagccacaaccatataaataatatgtacacaacattacatactatacaagtgtgccagtcatcctctacccatcccccatccagtcattccgactcccaagtatgtcaaattgagaagaacccaagatgcgatcagttcacagagagcatgtgcagccaggaggagcaccatgcctcccagagaatcaaacgggtagggcaataggccggtctggacaagtcatacaaaaggattcctttaacatcttgaactcaagtcttaattcaattgctatgaatttctcagcctatttggttaatattgaaatggaataaaaaatacagcctcctcaaaacactttttttacaagaaaaaatggctagaaggcaatttagtcacttgtgattctgaagaaaaaggaaggcctttctttgcattactgagggttttcagttgagaggaaaatgtaatccagagttgttatattctgagataaaatcacaaacaggcatatgtaaatctcgaatcctattctgtggtgcactgaaatagtgcaggggtaaaaaagcagtatggccatattttcctaatggtaacttttccatatagacctacatttcactgacacttttttctgtaaatattttgaatatggatgatcagtttctgtcacttgtccaatacctagaagtgcctgacaatgttctaacatgaatttctggattggtttcagaaacagagtgactggtaactatgtgcaaatggctggtctattttgatgtgagcttaattaatgctgcatatgaaactccaaatgtcataatccaggagttttaaaattttaattattagactgatttagttaacttattctaaaatgaaatttgaatttaatttagtgtgagtattcttttacaataaattcctttttaagagagaaggatttcataaagtctttccatttagcatgtggatgagaact

SEQ ID NO: 476190 - DNA, 1000 bp, Homo Sapiens; identical to SEQ ID NO: 160961

SEQ ID NO: 476191 - DNA, 1000 bp, Homo Sapiens; identical to SEQ ID NO: 344641

SEQ ID NO: 476192 - DNA, 1000 bp, Homo Sapiens
ttttttttttttttttcgtttttaaaaatctttatttgaaaatttcatataggcattcaaagaacattggctcactgaataggagactttacatctctcatggctgggcagcagctgtgtctggcttccttacttcaagatctgccttgatcacagatcacttaacagtggttaagtttcttattttcaagttcagcaggtaaacctatctcatttttggatgcattttttaagtataaaaagtctgttatttaggaaggttgcacagttcagaggtgaacatttcaatgtatttaaactttcctaaaaatgtaaaaataacaatcaaataggagaggtagcaaatccacagaggtataaataaaacaagaatggaagaatgctgataactgttaaagctgagtgatggaagttcattatatagtctgtttactttgtatatactaaaacttttccagaattaagtctgctacatcaaacagggattttttcctattttaaaaattaaattttttaaattaaaaaattttttcttactaatccttaatttttacctattatttgtttactccaaatttatttttatccttcttaaacagaacatcccaaacctataaccttcaggtttctaattaatccagaagattcgataaaatgtattctattgatcctgatgataatccttacatcatactaagtatgtgtgctcttaaacctctcaaatgtatgtgaattttaaacagttgtgcctatgttgaaaaatttcatcacctttaaaactgaagcagagttattctaaaaatgttttcaagcatacacaacatttttcatttctatatattttttatcaggaagaactcttaattactttgaagtctccagtggcataaaaatcagagtcacacttaaaaggttcattagaaagagtcacataaatatttccgttgtctactgtcactgtgtgaatcctttgctttattcctttggagcaccacttggg

SEQ ID NO: 476193 - DNA, 1000 bp, Homo Sapiens; identical to SEQ ID NO: 344643

SEQ ID NO: 476194 - DNA, 1000 bp, Homo Sapiens; identical to SEQ ID NO: 344644

SEQ ID NO: 476195 - DNA, 523 bp, Homo Sapiens; identical to SEQ ID NO: 160962

SEQ ID NO: 476196 - DNA, 1000 bp, Homo Sapiens; identical to SEQ ID NO: 344645

SEQ ID NO: 476197 - DNA, 1000 bp, Homo Sapiens; identical to SEQ ID NO: 160963

SEQ ID NO: 476198 - DNA, 1000 bp, Homo Sapiens; identical to SEQ ID NO: 344646

SEQ ID NO: 476199 - DNA, 1000 bp, Homo Sapiens
tttttttgacacgcacttgtggtttattacacacagtgatctccatctacacggaaatggaaggcaagcagccaggatggagctggttgctgggaacacttgctggaggtggaaaagcctctcgtcagagcgtgggtgggtctggtggcaggccccctgctcaggccagctgggaaccagccctgagctttgctttgcctgcacagcccacctagagagccatttttggccagagttctgggtgggagacttggggccagtgagacccagactctgagtgggaggcctgcctccctggtccaggccatgtcctatcttgtccctctctgggtgataatggaaacagagacaggaagtacagtcagtccaggctgggcccctccatccccgacactctgctccctggagctgggtccacatcacagcgatcacagagctcagccactactcctggccagaggacatgtgctctcatggcaggctggcctcctgaggcctcctgaatgtggtagagctagaccctcgtgggggatttccactcactgctccccgggcccagccgcaagtgctgggcgagtcttgtccgggggccaagtcttgtccaactgcagaggcagctggttgtggttgagtttggaggctgatgaggccaggagcaacagcagccgctgttccacccctgggtcttcttggatagggtgtgtcccagggactccagagttttgcgggggcaggttcttacagggcagtaccacagctgagagtctctctgctgatcaggtgactgaaggcccaacgtagcatctttctagccttgcccgagccaggtgcttctaccttcatctccttcctgggaaagcccaggcccaagggtgcccctcaggtacacatctccctggtctggcctgtccactttccggcagcttcacatgccggtggctttggggctgggtgggcatactcttgaatgttaaaaggccacaggtagcgcattccatga

SEQ ID NO: 476200 - DNA, 1000 bp, Homo Sapiens; identical to SEQ ID NO: 344647

SEQ ID NO: 476201 - DNA, 1000 bp, Homo Sapiens; identical to SEQ ID NO: 344648

SEQ ID NO: 476202 - DNA, 1000 bp, Homo Sapiens; identical to SEQ ID NO: 344649

SEQ ID NO: 476203 - DNA, 1000 bp, Homo Sapiens; identical to SEQ ID NO: 160964

SEQ ID NO: 476204 - DNA, 1000 bp, Homo Sapiens
ttttttttttttttttttttttttttttttttttttttttttttttttttttttttttttttttttttttttttttttttttttttttttttgtcctaaaatcatttttatttttagtgtttagctgctgagaatcacggtgtagttgatggaccaggagtgaaagttcaggagtaccacataatgtcttcctgctatcagaggctgctgcagatttttcatgggctttttgcttggtaagtatgtgggaagtgtggagagaactgagtatatacttgcttttatttgacagtcaccaaggcacaaagggcatggtgtgagtaaatggggatcaaatgaggaccctttacttggagtgctgcaaggcaaaggtgcactttttgtaagttgcatacagcaagaggatagagcgcagcatctgtttgcacatagtgactgtcatctgaatctgaggctccttcagtccaatgggccactggtgctccctgctaatgattttgcaaaaggctgacttgtctgaaactctgaaagtcccggtccactttggtggctgagctgtgataaccctgccaaagacagaatctactccactgaggcggatgggctggggcttcctgaccagtcctttgttgttcatcgtgcgcaactctgatgtgtggcagggtaacttgggactcactccagattccaggaatgggctgtctaggactagagtgacctcttgaaagcacagctgcacttcaaggtcggacggtgtgtgtgggaagcagggggaggccttgaatgggtgcttggaggaaggtgtaggtgtcgtgtgccgcagccattggaaactctcatccagtggggtccatggtgaccagagctggtatcctgccattgacagtcctgggaaacagggcgttagcgccaaagtgcagctgaggtcctgaactgtaaacggagatcccgagggtctggagctgccgagagtgcgagaggctcccactccccgccggaa

SEQ ID NO: 476205 - DNA, 1000 bp, Homo Sapiens; identical to SEQ ID NO: 344651

SEQ ID NO: 476206 - DNA, 1000 bp, Homo Sapiens; identical to SEQ ID NO: 344653

SEQ ID NO: 476207 - DNA, 1000 bp, Homo Sapiens; identical to SEQ ID NO: 344655

SEQ ID NO: 476208 - DNA, 1000 bp, Homo Sapiens; identical to SEQ ID NO: 344656

SEQ ID NO: 476209 - DNA, 1000 bp, Homo Sapiens; identical to SEQ ID NO: 344657

SEQ ID NO: 476210 - DNA, 1000 bp, Homo Sapiens
tttttttttttttttattttctcacataaacatttatttttgaaagagctggaaattcacgactaatgggtctgttttacaaatgaggtattgacaaagacaatatcatacttgtaagatttctctcctggtgtgaattttctggagcattatacatgaattaatgtgaggttaccccattaaagttatagaatttctctttagtgtgtgctctcactggttttagaaagaatgacttggcaactgaaggcttttgagtatgactgacattcgtgggatttctgtcctgtgtgcatcctcagatggttccggaaggaggagtgccacttgaaggacatcccacattgtttacatttgtgaggtttctctccagtgtgcatcctcacatgattatgtaaggttgaggaccaagtgaaggtttttccacattgtttacactcataaggcttctctccagtgtgcatcctcaaatgaccttggaatgctctggaagaggtaaaggccttcccacagtgttcacatttatggagctgctcttgcgtgtgaattctcacatgttctctaaacgttgaggaccaagtgaaggtttttccacattgtttacactcataaggcttctctccagtgtgcgtcctcaaatgacctcggaatgatctggaagaggtaaaagccttcccacattgttcacatttatagagctgctcttgcgtgtgaattctcacatgttctctaaacgttgaggaccaagtgaaggctttcccacattgtttacactcataaggtttctctccagtgtgcgtcctcaaatgaccttggaatgatctggaagaggtaaaagccttcccacagtgttcacatttatagagtttgtccccggtgtggatcctcatgtggactcgcaaggtttcagaccaactgaatgttttcccacactgcttgcattcatagggcttctctcccgtgtgcgtcttctcatgtctttgaaaagcctgggggtaag

SEQ ID NO: 476211 - DNA, 1000 bp, Homo Sapiens; identical to SEQ ID NO: 160966

SEQ ID NO: 476212 - DNA, 1000 bp, Homo Sapiens
tttttttttttttttttttttttttttttttttttttttttttttttttttttttttttaattattgttatttttaattataattctcctagagggtgcttggagggagggtgcgtcaggggagagggagggccatggggctgtgtctgctctccgaggtcccagccagcatccaatcagctggctggggcgggggacgctggggtcactaggggtccgcgctgctcttgctgcgcggcggcggcgtgcgcgggtcccagtccttaaccaggcgctgcgcctgctcgtagcacacgtgcggttgccgctggcgcaggcgcaggcgcaccacgttgccgtccacctcatgcccgatgttcttgcagttgaggccccaggtgaggttcttgtgcgtggcgagcagctcctccaggttcttttccaggtacgtgatgtggcactgcagcttgtcggtgccctgtgcgaggcgcgcagcctccgggagttgggtgcccacgtgtctctggtacatgcgaaccaggggtctgtccagcttttctgcggtctccaggtgaactttcgacagaggacccttgatgagaccgtgggtggtgtacaactcttggttatatttcgtacaccggaggatagttcccctcatcagtcctaacgtcatatttaatctttccttcagctccaaggtctcgctcgccttctgcgccagcgaggcacacacacggtcgcttatctgcagctgttgctcccggacgtccacctcgttctttgccatttctaccaaggtgtccttggactcgaccaacaaccgcttggcttcgtttagcgccaaggcgcacgctgggttataggtgcccacagggtctggaggaggcgttttctgaccctgtgtgcgtggagtgggggctcgggagaggttcacccatgagtggcgtctggcctgctccagaaccttgtccagaggctggttcatgaggtccacggcttggagccgctccttgaagca

SEQ ID NO: 476213 - DNA, 1000 bp, Homo Sapiens
ttttttttttttttttttttttttttttttttttttttttttttttttttttttttttttttcttttaattttattttttacagagacaaggtcacactggtctcaaactcctggcctcaagttatcctaaggatttttattattttttattatttttcttttttccttttttttgaccttcctaacatgagtgcatttattattaaattggatatatacaaaatattttttgcaggtatgatagatatcacaatcaatggaaaacgaatcaagttcatccattcttcttctgtgttacttataacacaagtcaggaacctggaagtcacccttggcctcaccctcacctaacaaatccagttaactatcactttcctacttctccctacctccactctcacaccctagccaaagccaccttgactctcacctgaaatactgctatgtcccttcctctcccttacatccttgctctaatctaatctccatgttgcagccaaagaaaacacttaaccttatctctccatcttgaatctatcgcaccatcccctttactatcagaagcaagagtgacaagtaaatttctcaagacacctcatagccaggaaatggcagaggcaggattcaaaatctactagagtccacaggtcttttttgttttgattgttttgagatagagtctcgctcagtcgcccaggctggagtgcaatggtgagatctgagctcactgcaacctccgcctcctgggttcaagcgattctcccgtcagtctcccgagtagctaggattacggtacccgccatatgccaggctaatttttgtattttttgtagagatggggtttcaccatgttggcccggctggtctcgaatctctaacctcaaatgatccgcctgcctcggcctccaaaagtgctgggattacaggcgtgagccatcgcgccgggcccaatttgtgtacttctagtaacatcctttctccgctagattgtgacctcca

SEQ ID NO: 476214 - DNA, 1000 bp, Homo Sapiens; identical to SEQ ID NO: 344658

SEQ ID NO: 476215 - DNA, 1000 bp, Homo Sapiens; identical to SEQ ID NO: 344659

SEQ ID NO: 476216 - DNA, 1000 bp, Homo Sapiens; identical to SEQ ID NO: 160967

SEQ ID NO: 476217 - DNA, 1000 bp, Homo Sapiens; identical to SEQ ID NO: 344661

SEQ ID NO: 476218 - DNA, 1000 bp, Homo Sapiens
ctcaatgcccctgtgaggtaggtgtctgtggggaaaaagctgaggcacggaggggttaagtctgctcaccttttcattgcatgatgagccagtggtccagctagcaggaccaggtgtcccagctccctaaactttattcaccctgcttctcagaaggcttatttatgttacacaacaaatacagcaggggaaagttttcttttcatacattttaactagttggctatttcttattctcaccttgaacataagttatctcagataaaaccaaataaaaacaaaacaaaaaaatcaatattgcctaacagtctgtgtcaaatgcagcctattctgcactagtgattgaaaaagcacagaatatgattcaagtagaagtatttgtgggtgctatggtgttcctgttgactcaagccaggctgtgagtaaagtgtcgctttagacactacccactgtactttgtaagaacttctttggcctgacacaagggaataaatctaccacccctgtttcatggtgaaaccatattctgaaagatattctacacatgctggccctgcctggaaaggggactctcagccgtgtgatgtgtattaccgagttcatgcacaactctttgaagctggacatgaaggtcacagtctcctgacataaagctcacaggacagttcacactacggacagaggggcaataccacagggtacatgcactagcaccatgccacagaagtcaaagagaaggacaagaagccaccacacaagcatcttagagtcccatctggtatgccatttgcagaggctacctctggtaaggggaagactgaagaggtcctgtactcctttccataataataagaaggatcaaaacagagcactcattgctggctgctttgagcataccgcctatccaaatttcacccctacataagttggtaactttccttgtagatattcaaagataatatatgtcatttcttcatcaagagagaatcatgtcaggcaa

SEQ ID NO: 476219 - DNA, 1000 bp, Homo Sapiens
gcagtgaacgaaaatgtttattaagcaaggtagccataattattttagctctgaagtgcctccattgagttgatttcaggttcccttagttggagtcccattctctctgggcttctccaacaagactatggaggggaggcaggttgatcatcagggtcaagacctcggaattcttgtggctaagacaaaacaaccctctagatttactagattgaaaagcactttggcatttttttttcttttttctttatgttgaaaactttgagcagactcttggcaggccaccttcctgtggtagaacatggatatgcaaagctgggcggggcagacaagacatcagatccagctgtggctggctgctgtcaaaccctagcatactacggatcacaggctgcctctacagcataacttccaagaaacaggctgtgcttaacaaacaattacaaacataacctatcaggaaacaaataagtctctacccactaaaccctaccccaagggactttacgcaccttgaaggtcccctggccatgcagacctcattggcctgccccctccccccatttcccctcatcactggtcatgaaagtactgttagcacggcttatttgagtcacgttgctctgcaggcatcaatctggtctgctccgcagatctcatctggtctggctggtatgcagcagggccttggaaagcctgtggatcaggaggtccctcgactcctacctcagaaacttgcacctgatggtaggtgggttggccgtgcagggtgccctgctcatcgcaagaccaagtgttcacttggacaacaggaccgagtgaatcagacaactcttgccaaagccggatgtaatcctgtggggtctccagggtgcttatggttgagtctgaagttatgggaaactgaggaatgctggaagaagaaattgcctcagagtttgaggtatctatcaatggcagctggttcacggggggcccttgatacgcctcaggataaaaa

SEQ ID NO: 476220 - DNA, 1000 bp, Homo Sapiens; identical to SEQ ID NO: 160968

SEQ ID NO: 476221 - DNA, 1000 bp, Homo Sapiens
ggcaatgcctgtttcctatctttaaaaaagggaagaactttgaatttaattgtttcattaacataatctctttggtcttgataagacctaaggtgaaaatatgccaagcagacattatcacactgttgtaatttggtcaaccacacgggtactatcgatatctaccatttctacacactcaatttcctcccggttctcaggatttttcttctctttcctttttttcttagagggtggcaggaaagtcagtatcacaggtaaaatggcaaagcagtgaaagaaggtgacaaatgctattaaaaacaagcacctgaacagtgtacaggtcagatttgaaggcacagctgcaagaggaatcagaccaacaatatagcagaggtaactctgtaaaatagctaccccatgcacttccagggcattttttacccatttagttcttgtgaaatccttgcccagaacaaatgcggataacattggagcacaattgtcaattgtgtaattaattccataaattaagcatagcacagaaatgcagtccagttctactttccataatgtcatgaaacctatcactccaaactccacggacacaactgtgagagtgatccagacgttaatcagtgaatctgccaccaggaatgccgagaagaagagcaggaacaaagcactgatgcaggagttgtgcaggggggctcccagagaggaggcatatcgatccatgtatacaaaggacggattgaagacgatgaacttcaccttggaggtgacagaaagtctcctcagggtttccaagagatcatagagttcttctctgtttgtttccatggtcttggccaccaaaaacattctggaggccactacatcgacctcatcattgtattttttagagaagatgatgtcctcttgaaaatgtgaaaattgaggggctttcagaaaggaattcctcaacatgtctgtgaaatttttcttaggcaagccagtggatacattgagtttccga

SEQ ID NO: 476222 - DNA, 1000 bp, Homo Sapiens; identical to SEQ ID NO: 344664

SEQ ID NO: 476223 - DNA, 1000 bp, Homo Sapiens
ctgctattacttcttttattcacaattgtgaaagaggtcccagtcaatgcaaacacatacatatatccatataagatacaggattagaaggagataaaactctcctttttcacaaatgacaagattgtgtacacagaaaatccaagttaatttactgatgtactattagaattaatggatgaatatagcaaagtacagttgactcttgaatacaggcttgaattgtgcaagtctgcttatatacattattttctttcacctctgccacctgagacagcaagaccaacccctcctcttcctcagcctactcaataaggatgaagacctttatgatagtccacttccacttaatatatagtaaatatattttatcttccttattttttcttaataacattgccttttccttagcttactttattgtaacaatatagtatagaatacatataacataaaatatacgttaattgactgtttatgttatcagtaagacttctggtcaacaataggttattagtagttaagcttctggggagttaaaagttatacacagattttttttttttactgcatagggggttagcgcccctaaccctcgcattgttcaagggtcaactgtatttagataaagataaatatatgaaagtatttccatatattagtcacaattggaaaataaaattataataggataaaaaaaatgaagtacctagaaatacatgtaatgagaaatgtgtaacacctctatccagaaaactacaaaacattaccaagagaaattaaagaagacctaggtacctaaaaggatacagtatgcttatggattgaaaagatgtcaatttttcacaaattgatctatagcagtatggttctcaaaatgtggtcattcttaacatgtctttcacttcatagctaaacttctggagactttgtttacattctgtctttatcattcccacttagtccttcaaatatgcatctggattttttgaatggtgac

SEQ ID NO: 476224 - DNA, 1000 bp, Homo Sapiens
ttttttttttttttttcctgtatacagcatttgaaattattttattcagaaaagttcatgctgggcatgtatgccaagctccgagctaagctccaaggatccagaaatatatgagaaacagtgtcttgccctataggagctctggagaaagagaaatggagacaatgaagagaatctagccttggccttgaatagggaaacgaaaggcaatactggggtttggccttgagtagacatccagaatacaccattccaggactagcataacatactaggctgctgaggatggtctctcttggaggtagttcagaagtgggagagggagctgtggcactggtaggacagaaacttcaaagaccaggtggtggcgtctgatatagagccagctgattgccctttccaggtgagttccaggtggtaagggaaaagggaaaagagaccagttccctgggctgttagctaactccatgatgaccaatggaagagcttcagggtagggacactattgaaaaatcaggaccagcaatatgggtgaaacaggacacttctcctgtttatcttctgaatcagtggggaagcagatggcacccttcgcctttgaaccctttggatccttccgtgagaacagctgttctcttcctttgcaggccacaccgggcccttgaggcctcctgggccacccttgaaaggcctccagccgcagggacatgtcatggcttctgagaaatgtcgcgacgaggttctaggacaaggcagcctctgaaaagagggggcaatttcctggtagagacaggagttgtcctgggcccctgacatcccagccggggccattcctcatgcccttccttccccgaggcccaggctgccactaaagacaattatcccagaaagacacacaagtggatccctgggcttagcggagatggagcagcctggtctgaacaagatgcatgggctggccttttagacgccccttcttcaggagagtcctgcactcagg

SEQ ID NO: 476225 - DNA, 1000 bp, Homo Sapiens
tcattttaatgagtttctcccccttggatttttgctctatttttccttcttgtacaaagacattgattcctaatctacttgctgcctgccttaggtaattccttatcatgtattatgtcttcttataaataattgatcatgttactttcttttgcaagagaagatcaacactgatttttttacatagaaagtacagggacacacatgcatcaggtttaggaggaagatctcacacctttcaaagagatgcagcctggctcctatctgctgagtttactggctggcttactcttcccttggggggttttagtgctggctgagtggtggtggaggctgccggatcctttcaggccattcttgctgggtttgcaatgctcctgttggcaggacctcctggaggaggaagatcctgagtggctgggaggtgacttgcttctccccagatgtggggacgaactcctctggtcatggtggggccgtccagccctagatggtgaggaactagacgtgcgaggcaaggatgagcttcgaggagaggcactgggactcctgcgagggacaactggactcttgggtggtgtttttggattgtgaggagatcctggactcttgcactgagtagtgctccggggtttctgagatccattttgaagaatttgggccaggcgggagaaaaggtctgagtcggagttactactccctaggactttatatctgcgtagcctggcttctactccaggcctcgtgggtggctttcctggtggtggccgaggaaagaactgagacgaagttgagctattgacctgatctgtgttgacccatgaaactggccttggaattttgctctttctagactgggagatgatgggtgacagaaagctatcttcagctgacctactcaggtgagaatctactgtcagtcttgaaaagggagtgagcacttcctcctcacaaaagggagcaggaacagtagctagtttctcctctagcaatttatcag

SEQ ID NO: 476226 - DNA, 1000 bp, Homo Sapiens
ttttttttttttttttgggttttcatattttttatttaagaaaatacttgaattgccttagacaatattaaatatttaaacaacatgagaaagagtgccagaggtcagaacatagtatttagttcactgagttgccctgacagataatgaatggggattgatttaatagtgaccaaatacactggccatatttactaaagtgctgtaaaatggccaagtgaggacaactgcatctaaaatgagatcaaatcctcgagtccattccttttagcagaaatgattaaaaccatcttggcaggaccaagtctttgcaaaacctatcaaatggatggatggcttcaagacagcagagaacccacaagcttgaagaggcctccggagagttcactcaggataaacggggtgctggcatcgtcctggtcctctctgtacagtaacagtgttacagccctgtgagttcagtagtaaaggatctggagtccatggggaaattctttatttttgttgctgggtaactgtgacccagaagagttgactttgcataaaaagaacccagagtcctctagtcttggtgtttttcctataatcttctcatagtggcatgtcttaatcctccaattccccaggaggctcctcaaaaggccacacaaggaagaatcagcagcaaactttggaaagaatcatactgaaatgtttgcttttaataaattgaagatttttcatgtttacagatgtttgggtatgttcaataggagcttccaaaaatgtcaaactaattcagtcttgtgcaaataaaacctaaaaatagttttcagcagattttacagtgattttcttaggtatgagaagaatgcacacactttccagtgaatgctatccatcgagcatattttgtagcttctcttcgccagtgggaagccaccagcaaaccacatgtgacagtcaatgaaatgattcccatgatgataaaaaacagtgtggtgacccactccgggggaag

SEQ ID NO: 476227 - DNA, 1000 bp, Homo Sapiens
ttttttttttttttttttttttttttttttttttttttttttttaagggaactctgctattttatttgttatgtgaaagagtctgggtgcttgtcgggtgcagctagatggtcagtccctgaaggcaaacaggaggcctaagacgacaccccaagcaggatcttgcctggaggatgctgcaccaacaatctgagacttctctaagatgttgaggacctcagtcactttgatgctcccaatatgatgaaaatctgctaaaagctggttatgttcacgagcacaccccatgaggaggaaggtggtattgagaaaccctgcctgaaattttaaggtggaactgtaacacgtagaagcagccaaggggcaagaattagtggtgacaaaatttgggaggcaatccttcatgtgctcgcccacacaggtcgggcagctacaggacgcagatgtgatagacttaggagtgctggccttgagtttcacaaaaggctccaaattggtgaggttgttgcagagataagaccggcagacgcgactgtaggaggcaatggacactccgggtggggaaacaaggtaggagatttgcgcagggtaagacgaagacgagctgcagcctttaaagcccacaactccccttgcagtccctgtctcaatgaacactagcgtctcctcgcagccctcttgcagcttacacaccatgttcctcatcagaagccacttccagttatggaaagcaacagctctgaatcttgaggctgttgcttcatagcacaaaagagctccagcccgaggcagagtggggatggcccctagaaggcagaacagctgcacaagtctcaaatgctggggtcccatggccctgtgtctgggtcctgggtgctagaggtcagtctggaatcagtttcagtctggatcccaagctcagttcccatcagtccccgaattctttgtccacctgtctctgggtcactgtttctttccaattttatctaggacagctccc

SEQ ID NO: 476228 - DNA, 1000 bp, Homo Sapiens
aacgcttctttttcaaatattttattaatctgtttggccaaacaggtaatggaaactgagaataataatttgctaaaaagttcaggtcatgaatgcccctttcccccaggaaacagaagactccatggttacagaatgcaccattgggttatgacaacgtttcaaaataatgtttccatttcatatgtaacaatgtaaacttcaaaaatagtaaactctaacccctgaccctctttacagatctatcacagatagaattttctggcagacctaaattgtgtaagtaaacagcctggtgcttaaaagtttcataaaaaggtttacagatttcagtaaataatttttcagtcttggtcaggaagtaaaagcagccagcaattcccctcctgcacaatgtaccttatatgggtattgtacaccgcgggccacgctctgtatacactggccatcagctctgtcatttttttgtacacagacatacacatatatagagagttttatttgtttctaaagatttttacatctaaattataagacggcgccagtgacgtatcacgtcacctcgcttcacataggtaaagacgaaaattctgtagaaggcactgtgatttctcttgcatgatcttacacagacacgtgagagcaggccagccggggcttggacttatcttgtccttcctggtacctggcacagacctgtcctctgacagtttttgatgttcatcatccatttctgccttgcctcttcacatcccagacatccttccctccctccttccatccctccatccatccatccaaataaattgacagttatcttttggttcattgaaattccttaaaattaagagtacagctctggtataaaacaaaatatgacctaccatagctgaaaaataatcacagtgtgcaatgtcatgttcagttgctaagattcaaaacacttgctaagattcaaaacacttgccctgatggctggcttgtcaagaacgtcagccat

SEQ ID NO: 476229 - DNA, 1000 bp, Homo Sapiens; identical to SEQ ID NO: 344666

SEQ ID NO: 476230 - DNA, 1000 bp, Homo Sapiens; identical to SEQ ID NO: 344667

SEQ ID NO: 476231 - DNA, 1000 bp, Homo Sapiens; identical to SEQ ID NO: 344668

SEQ ID NO: 476232 - DNA, 1000 bp, Homo Sapiens; identical to SEQ ID NO: 344669

SEQ ID NO: 476233 - DNA, 1000 bp, Homo Sapiens; identical to SEQ ID NO: 344670

SEQ ID NO: 476234 - DNA, 1000 bp, Homo Sapiens; identical to SEQ ID NO: 160969

SEQ ID NO: 476235 - DNA, 1000 bp, Homo Sapiens
acgatatctaaggactgatttatcattgagagtgttgacagaatttcacgttcaggacataacagaatttctagaaaagaccaaacagatccatctgcaaacagaatctgatttacacgaacacacccagcacacctcccagagagcatggggacccgagggtggccgcaggaggcctcgctgcactcaggtaccagatcttccaaggatgaacgcgagaagggcccaggcagtcactatgccacagacttggagcaggcagttgacgtttggggagtgcctccagtagcggtacagggagatgcacagggtcgggtggtcccggtactccttcaggatgttccgcgcatccttaaacttattggtcaggagtaagaactggcttcttgtgagtcgcctgacatcaaacttgcagagattctgaaacttatggtagacttgctgctcgctgaccccaggccaccttttgacgctgaggatgaggatgggaggtcggatactgggataatctggaccagaaaaattgatctttgggacccccgctcggatgaggttcacttggttcacgtaaggagccagcacgtcaaggtactgaggaaaggatgactcgggcacggggtcgatgtggtatatcttctgtagaagcaagtgtgccactttcaaaagaactgacccacagaggaaggcatcatacgcggcttcgtgggggcactttgtctcaacatatttctcacacctgctcgcgtgaacaatctctggtccagaattcttggtgggattcaagtcactgttcaggacttcatagacttccgaaagattcgacaccctcgggaaattcatctccttccagatatcctttgttacactcttggtatcaatgagaacaggaaataggctgtggatattctgcttaaattgatcgtagctttctgggaggggtctgaagaacttctcatggaggtgcagcaggtccatcatcatattatgtcccactaagggc

SEQ ID NO: 476236 - DNA, 1000 bp, Homo Sapiens; identical to SEQ ID NO: 160970

SEQ ID NO: 476237 - DNA, 1000 bp, Homo Sapiens
ttttttttttttttttttttttttttttttttttttttttttttttttttttttttttttttttttttttttttttttttttttttttgaaaagtaaaaaggtgtttgtgaccttcagtatttattgaacagaggaaataactgacaagggcaatacaattcaatgttcatgtagtaacattcatgtcacttgttgaatttggttctcatatgtatattgcatacacataaattcaaactataagtcgtcatttttgagccatcatcttacattcatgtaatgaaattatggaagagagtaaaaactagctcttaacttagtaaatataatatggtatttaaaatcaggtcactacagtaaggttctaagtattgccaattgaaaagctagaaatggtattactgttgcaaagtgttgtcaataattgactccaatagcattgtaaatacttgtatcccacaactattttaaacccaagcaataaaatggattttctaattcacttcaattctttatttctcttacctatctatgtcttggtacataagaaaagtgtttccatcactgcattggtagaattatttcagtgttattatttttgtgatttcgtatgtctacacaaaaatgaattagtttaatttatattgtgatacagttgtttgagaaatatttttaattctgtttcaactttatttctccaagtgtataatataaaaattacttctgttattgttctctaccaataggggaaaaaattaaaacattagatccattgagaaagagatgatgtaataaataattaagattagtaataatattatcaggggtgattatgaccagttgaataatctctttcccttgaattatttagctaacaaattaactctcccaaatatttaaaataatgtaaaatcatattttactgcccattattaactaaaatatttttgtttgactttgagcaccaactggtaatactaataaatacccatgtcatgc

SEQ ID NO: 476238 - DNA, 1000 bp, Homo Sapiens
ttttttttttttttttttttttttttgaggcagtacaaaaattatttattgaaaagggaaagggtggccccttgctggtgcccccctggccctggccaaaaggggttgccactgctcattatctgaatgcagaaagtctgtccaccccttacctttaataaccttaaaggggaagtgccgtggtggactggtaagtcaagagaatccatctcaggaacagcacttccaggcccttgcctttaagaactccttaaaggcaaagtggacacatgccgcaccagatgagagccagaacgttttcgggaaggtccctggaggaagtgttttcgtgtctttacctttaagactctcttaaaggtgaggcatgttcacgcagcgtacaaaggaggcaaactccgtcaaggagtctacgaagcacttttccagatcttgcttttagaatctctttacagatgaggtggccaagcgcgaattaataaaaaacaaaataccttgcagaattatttttcttcccgacccagcagaacccgccccgctcaccggccgccttcaggtctgcgtcctcgccttctaggcgccctgaggcccaaagctccagagaacgcgttggggcgggtgtggaggtgccgccgagcggccccgggccgcccccggcggtcacaccggggcatcctgggagtttttggtttcctagacggcctccaccaaggaagccggacgggggcggggcggggcgagggggggcgagcggagggcgcggtgaccatggcgaccgcagtggccatggcgaccgcggctcagagcaccgagaggtcgtgacacgacctggagcgctgcttgaagaacttggcgttgcgcggcaccaggttggcgaggaacctcttggctttcttggtgaggctctcgcggcgtgcaggtggcgcagggccctcggggctgcccggatcgggcctctggcctccggcgtggtttcggccccgccgcagccggatctggcgca

SEQ ID NO: 476239 - DNA, 1000 bp, Homo Sapiens; identical to SEQ ID NO: 344674

SEQ ID NO: 476240 - DNA, 1000 bp, Homo Sapiens
ctttgccacatttatgatatttgtaaggtttttctcctgagtcctccaatgttgtgctaggtgtgaattctaactaaagattttgccacattcattccatctgtaaggtacgcagtgaattctctccagcatgaattttccgatgtcgtgaaaggtgtggattttgattgaagaccttgccacatgcattacacttgtaaggtctctctccagtatgaattctctgatggttggttaggtataatttgcgcccaaagactttgtcacattcattacatttgtaaggtttctctccagtatggattagaagatgggccataaggcccggacgcttgtgaaatgctcttccacattcgttacatttgtagggcttctctgtactatgaattatttgatgccgtgcaaggtatgaaagcagactaaagaccttgccacattcattacatttgtaaggtttttccgccgtgtgacttctctgatgattggttagagaaaatttgtgcctgaagttcttgccacactcattacatttgtaaggtttctctccagtatggattacaagatgggtagtaagtcctgaacactctctaaaagctttgccacattcgttacatttgtgaggcttctctccagtatgaattctttgatgtcgtgcaaggtttgaattgcgattaaacaccttgtcacattcactacatttgtaaggcttctgtccagtatgaattctccaatgttctacaaggtgtgaattgcgactgaagaccttgccacattcagtacatttgtaaggtttctctgcggtatggattacttgatggttagtaaggcttgcagggactctaaaaacttcaccatcttcactacattcatattcataagattttcctctaatgtatgctttctcttcttgtgggagtaatgggaaatcaataagatcatttctatatttattaaaaatgtgtgttgtgaaactagaagaaattttttgaagtggtgaaac

SEQ ID NO: 476241 - DNA, 1000 bp, Homo Sapiens; identical to SEQ ID NO: 344675

SEQ ID NO: 476242 - DNA, 1000 bp, Homo Sapiens
aggtatgagagatttatgttatatttcattgccttccccctccaaagatgaaaaaagtaattacaatatgagtgggggatatggccaataagatggatggtcctcccccaaaagatgcacgcatgtcagtcggccacagtttgaggctctccatttgacatcttctctcatgcagaaagcataactgcaacccttctagcaacaggctggcagctctgctttcccagatgctcccatagatgtcacgccacctgatgctttggctcagcgaaccctgcaagcagctcagctttgctcctaacttgcgatgagggcgtttgttatctcaggttgccctggcagctactgctttccaacctatactgaagtcctgctggaggtttgtcttgggataagtgctgtctgcatgtgggtggcttgactttctgggagtgaacatttccagcccctgagggggctgcagacaagtgctgttgtaaaacactcatgaagtggatgtgttgaagtctgtggtgtgtgtggatgtgaaatctcagaatttctgctaagcagaactttcttgtttccagggttctcacagtgtgccaactcaggctagcagccgtccaggggactttctggattcatttctctccagagtcctcacatagcagatctccaactgctgtgcaggtgaggacacacctgaccttgccctcaggaagcagagtcagagttgttcttctaaaggccaaaggagcttttcctatcctagaggcatttttattctacattctagtagatcttttccatctctaatcactaacaaatgagacaactttggtcaagtttttgtttttatctggggctcactttgtcattcttcatttctcttccctctataaatcaccattccaagtgtacttccagagcaagttactgaatatattttttttggacagaaagtaagcttcaatcctgttttagcaactggtgagaccatcacagtgtatacatcccc

SEQ ID NO: 476243 - DNA, 1000 bp, Homo Sapiens; identical to SEQ ID NO: 160971

SEQ ID NO: 476244 - DNA, 1000 bp, Homo Sapiens; identical to SEQ ID NO: 344677

SEQ ID NO: 476245 - DNA, 1000 bp, Homo Sapiens; identical to SEQ ID NO: 344678

SEQ ID NO: 476246 - DNA, 1000 bp, Homo Sapiens; identical to SEQ ID NO: 160972

SEQ ID NO: 476247 - DNA, 1000 bp, Homo Sapiens; identical to SEQ ID NO: 344680

SEQ ID NO: 476248 - DNA, 1000 bp, Homo Sapiens; identical to SEQ ID NO: 344681

SEQ ID NO: 476249 - DNA, 1000 bp, Homo Sapiens
ttttttttttttttttttttttttttttttttttttttttttttttttttttttttttttttttttttttattaaaacttataatttattttgaaaaccaaaagcccgagacaaaggcgtgagtcccataggaagtgctggggtgaggtgggcaggaccaggcaggggctggggcaagggtgggaggggccaggccggactggggcaagggtgggaggggccaggccggactggggcaagggtgggaggggccgggcaggactggggcaagggtgggaggggccgggcaggactggggcaagggttggcggtgacacgaagggttgggacgagtgggaggggccaagcaggggctgggcaagggtgggaggggccaggccggactggggcaagggtgggaggggccaggccggactggggcaagggtgggaggggccgggccggactggggcaagggtggtcttctcttttcctcctttgtggttagaattaatactgttaacgttcttctcgggctgtaattaaccgtcttgttagccctggctgtcggggctgattttcccttattctctcagtgtccggtgtctcagcctggagccatcacttacttagtattttaattaggaattttgacaggagatttgtttcctgcctctgccctctgccttctcccggagataagggattgtgcctctggagacccccaggctctagacctgcccagggccagcggcagtgggcggagagggtcctctccccttgggtcagcccggcctggcctcccaggctcaccgcctgccccttgagggcccagagccgccattccccgcttcaggcttcgaaggccgcattcctgaaaccctgactaacagacgcctgttcccacaggcccagcccagaactggctcttccagccgcctgtgaggcttgatctaccacgggagctgcctcagccaggtctgggccactggagtgcggaggccgcgggcgcccggaggca

SEQ ID NO: 476250 - DNA, 1000 bp, Homo Sapiens; identical to SEQ ID NO: 344682

SEQ ID NO: 476251 - DNA, 1000 bp, Homo Sapiens
tttttttttttttttttttttttttttttaaaaacattgtactatatttaaatgtttgcatataatatattaatgtttttcacactaaaaatatacaatggctatgtataaaacctgattttggaaataatatcaaaaattacacgtgtggtcctttggggatacaaggtccagccaagtggccatcctcccttcccacccatgagtaggcctgccacatatcacaaccctgggaaactctccaggatcacccaggctgggatagatggcctctcatatgctccccataacaccctgttctctgtcactagattactaccttgtgctggcactggctgtaaacattctgccccagcctctgcctgcaccctaactcagtagtgagaggctagagagcctggcgcagagtaggtaggcactcagtaaataattttggatcaatcactgaatgactgactgaggcatatgtccccaaaaggaccccagataggaaccatctccacagtgttcctgcagttttataaaaggcttgggaaaagagagttagtgactcttttcagtcttggggggatgtggaggtagaggaagaaaactacctggaggttctattttaaccctttctcaagcctggggacctaggggctcctagtcaggcacctgtggccatctacagcagggcccctcacaggtcaggagggatgagatcatatccattccctgcactgcttctctccaagaggatgatctcttggttgtttgtgaagacaagaggcccagcagcctcttctgttgaagtggacctgagctggccccagccaggctaaccctctagccagctagcttctggggtgaatcaccaggcagggaccctgggttggccagagctctgtggaccagtgccaaacttctctgggagctttgagcgagacaagggcttgggtttctctctctggtccaggtccagaggaagatcttccaaggaggagatctccaagtcact

SEQ ID NO: 476252 - DNA, 1000 bp, Homo Sapiens; identical to SEQ ID NO: 344684

SEQ ID NO: 476253 - DNA, 1000 bp, Homo Sapiens; identical to SEQ ID NO: 344685

SEQ ID NO: 476254 - DNA, 1000 bp, Homo Sapiens; identical to SEQ ID NO: 344686

SEQ ID NO: 476255 - DNA, 1000 bp, Homo Sapiens; identical to SEQ ID NO: 344687

SEQ ID NO: 476256 - DNA, 1000 bp, Homo Sapiens; identical to SEQ ID NO: 246599

SEQ ID NO: 476257 - DNA, 1000 bp, Homo Sapiens; identical to SEQ ID NO: 160973

SEQ ID NO: 476258 - DNA, 1000 bp, Homo Sapiens; identical to SEQ ID NO: 160974

SEQ ID NO: 476259 - DNA, 1000 bp, Homo Sapiens
ccatttaaacaatttaaacaatgtttcttaggtcagtaagactcacaaaaaaaatctgattttggttgttgttgttaaatttaaggtcaagaatctaccatacagccgattaattttgcactgcttaatggcaactctagcatgggattgtttttaagtaaaagttctatggacatttttactctacagatttgcactaagaaacacaggacactatcatcacacacattagtgtctatatctaacctactttaacaagtagaactctatcacgtactatactacagggtcagtcatttcacactgtacagaaacatatgcagatatcactcacaaaattaatctgaatatggcatagcttaaaattgcaagggcaaagtctattcgaaatgtaatagaggatagtattcagctaatatgacacctaaattattaataccaaataaatcctagattatttgttgtataatgcccaagagcttacacaataaaatggcattttaacctaatttctattttgagctttcaaatacatttcctaaaggttttatgatcaatttgaaaaatcagagctcacaattttatgttgaattctcatgccaattagcagtattagctttgtattctagccattatatttttgttttatttcacattaattccatcacttttatatgcatattttgtgctgcttgaagataacagacagcatgtaaataaattaaattgtcttgacctcacagggctattttctagccttgctttttggaattagccctgcttgtctttccttcacttccccccaaccctcctcaccattttcagggattcagtggaacataaaaacagttatatttataagtggagtccttgtcacataccacttgcttcatgaattccataaaagaagttagatgagagctgtaaagctcacagctatttctgaatgcacatgcacccagggataggaatttatcacgtacttgtagcagatctttct

SEQ ID NO: 476260 - DNA, 1000 bp, Homo Sapiens; identical to SEQ ID NO: 344694

SEQ ID NO: 476261 - DNA, 1000 bp, Homo Sapiens; identical to SEQ ID NO: 344695

SEQ ID NO: 476262 - DNA, 1000 bp, Homo Sapiens
aggatcatgagtcttttaatatattattctgaaaagaaaggaattaaaaaaaagttcctgacatctcttctgttttgttttttaatttaaataaataccctgcccaccccccccacccgctaaaatttccctcctcctcccccatcatcctgcccatccctggcactagaccctcaccccagaactaaataagatgcctgattcagagcaggccacactgactaccaaattctggcaaattgtaaatactgtgaatggtcttgggccctctgcttccctgggccccttcttctctcggtccactccccatgcagacccctccttggctgtggggtggcatggacggcggggcctttaggcattggcattggggagagtgcaaacttggccctgattctccactcctagctcaggagtaggtcagaaaggcccagaatcgccctccagactgaaataaataacaaaataaataccccctccccaactcccggctctctagaaaagagctcctccatctggcactctagtccctctctttcagctcacccacccccctcttcctcccatcccttccttcctcccttccccatgctgacctctggcttggttcaggaggaggggtgtacagcgcccagcgggaagaacagccagagcgactctcgccccaacctcaagcaaaccctcctcctcctccgtttctcagcagcgctgttggcatcctaagcccaatgggcctggcagactctccccatcccggggggtaggttggagggcaggggttctccctggcactctctcacgtagtctttcaatgtctctcaaggcgaggctcccgggagagccaggcgtgcccgccccctcccaagtccaggcgccccggtacccccccgcccgcctcagatggcggtgtcccagaggaccgtgtgctgccggcggcagggcggggtgccggacttgcggggctcgggtccccgccgccagctggggaggatgggcatgc

SEQ ID NO: 476263 - DNA, 1000 bp, Homo Sapiens; identical to SEQ ID NO: 344696

SEQ ID NO: 476264 - DNA, 1000 bp, Homo Sapiens; identical to SEQ ID NO: 344697

SEQ ID NO: 476265 - DNA, 1000 bp, Homo Sapiens
ttttttttttttttttttttttttttttttttttttttttccctttttgtacaagtgtatatattttaaggcagatgcttgtctgtgcaaaatacaccagaagaaaatcaacattgtattatatgttcacatgatctcagatttttttcaataccatttgtcaggatatttatttatgataaagcacattaaaacagtttttttctaataaaacataaagaagttgatgaacaatttttaaaaattatttagagatttcattacagacccttcatagaagataaagaaaagtcaatctttttttcttgtttcttcttttagaaatgtccatatcaatttgttcactatgtcaggttggtcttgctgaagccaatgactggcttctgacaaaatagttagcctgaaatagtttttaacaaaaatctttgtgacttcagccatctcaacctccatgaatgcgtcattctctccccacagtagtagtgttggagtggtcaccatgtgatgtttgagaggcaggcagctgaagatatttcggtaatggttaattgggccacttaatgctccaggctgagaaaagacataaatataagcttcaagatcctctgttgttaattggcatccttttcttccaatgccagtgctgtgactggtaaacagatgtttcaaaaccttgaaatcatttattgagaacataaattctgggaaccatggtatttggaagaagtaataataactggatttcaacagctgagcagggtgtcgtaaaatatattctgtaaatacatttggatgagggaagttaataacaataagcttcatcaccatttcaggataacagatggcaattagccaagcaatcatgcccccccagtcatggccaataagaacacatttgctataccctaaagaatctaaaatatcctttatatctgtaattagacaatccaatttataattctgtcgatgaatgggagcatctgtttctccataacctctc

SEQ ID NO: 476266 - DNA, 1000 bp, Homo Sapiens; identical to SEQ ID NO: 160976

SEQ ID NO: 476267 - DNA, 1000 bp, Homo Sapiens
aggcacaataagatatttataacaataactaataataagatacaatcataacactatactgtaacagaagtgatgtggctgtggcctctccctcagaatagcttaatattttcatactgtagctgtctgcaggtaacaaactgcagaaagtgaactgcgggtaacgaggcactgccggtgtgatttacacgtccaataatgggactggtggaggatgttctggatcatcagcatcatgaaattttacgccgtccgtaaattggactctagaaacaactgtggtgctgtggacccgtggccacaagaaaggtaaagagaaacgggcaggtgtaaaattgcaaacaccatctaactgcaactgtgcaaaacacaggtaggaaagacggcaatgtgccaaccacggaccgaagccctgggggccgtggcctggtgaactgctcttcctttctttgccttttgtccaactgcacggtgagcagcgcctcatccccaggcagcagtgtcatgaagccacttactttgctttccatcttcttcaggtctgagaggcaggcagaggagatctccatgcatttcaaggtcaaggaaaaacgcgccaattcaaaaagcaaaagcattttttcttcactgatagagggaaagcgctggtggttgtaatgacctaagtgtctgtaggccttcctcagaatgacattgatgtcacctggtaaatcattttgctccgcttttgcctttagcatattaatatagaaagtgactgacaggctaatggaatttttcttttcttcctttaactgaagttcgtccattaattcatgacgaaccataacagagaatatctgccggtatttctgtggcacgtgagacttaatgaacggagctgccgtggagcagaacctggcagcctcctcctttcttccggcttgcagataacactccagaagttccagcatcagctcagcacgccactccttgtcttcctcctcagtctgactcagca

SEQ ID NO: 476268 - DNA, 1000 bp, Homo Sapiens; identical to SEQ ID NO: 344699

SEQ ID NO: 476269 - DNA, 1000 bp, Homo Sapiens
ttttttttttttttttctaggtctagaaattaacttttattttaaatctgtcaagaactcctggcagttattaattttattaaaatgattacatatggcaaaacaaagaatagaggtaattctatttctctacaacataaattatgagttagattttcagctgccggctcagcattgttcaagattcttttaaaggactggggggattttaatatccagaaaatgttaaagcagcaaaagaaaaaataaattaaaaagtcattgcaattggagatattaccaaggatgtgcttactataaagtcttcttgacatgttaattataaaatcttccaacctttggtattaaaaaaaatcatgtgaatagttgtcctatattgccttgtcatctataatttataacatagaagaaatttgctgatttttttaaaaagatggcaaacatgaatcatgactcattcaaataaaatacaaccagcattcattcatttaactgaaatatgtcaaaacaaaaacacttttattaacatatttaataccagaataacttataatagtatgaaaaagagtgaagtatttgtctttagttttcattgacatgctcacattttggcatttttgtattgttttgcaaagattccaaagtttttatcagagatctctaactatttaaggatgcaaaccaaaagaactcatacttcatctgatcatacagtcataacttatatattttgctttgcgcttactgttactgcaaacagcaatttagaaaacaaagtaaaaatatatatatatacacaaaatatttttatatcaaattatcttcattacactaaataaacccaatccccaatgttatgttacatgaaaaagtgtcctacaatttagatcaagactgatactgtccatcaactagagcagcctttagttttaaaagcattttgcaaaataaagaaaaatgtcaccactggctgcactattgaccctcattcacactgaca

SEQ ID NO: 476270 - DNA, 1000 bp, Homo Sapiens
gcagcagagaaagagtttaatgattgcagggcaccaagtttggagatgggaggagaccttcaaatccatctccccaaggagttttggactgaattttttaaggagattgtggagggcaaggggctggaaatttgggattgttgattgcctaagcaaggggcatgaaataattgggattggaaaccgcattctttggtgagccagctcctcatggggaccagttgagtcagtagttttatcagcatgcaggatctgaaggaatacttcaaaaggaaaatttagcatttcatgttcaagttgttatttatacagcagttaagggcagctataatctagggtctttgtcactccgggacaacaggcaccaaccagccatgaggaagcaggtcagagagcagctgacctcatgatgaatactgagtatgctgcaggcttggtttattttcatcttttccccctacttcttccctaatttgtaggggtgggttgcccctacacacctgtgggtgtttctcgtaaggtgggacgagagatttggaaaagaaaaagacacagagacaaagtatagagaaagaaataaggggacccggggaaccagcgttcagcatatggaggatcccgccagcctctgagttcccttagtatttattgatcatctgtgggtgtttctcgaagagggggatgtgtcagggtcacaagacaattgtgggaagagggtcagcagacaaacacgtgaacaaaggtctttgcatcatagacaatgtaaaggattaagtgctgtgcttttagatatgcatacacataaacatctcaatgctttacaaagcagtattgctgcccgcaggtcccacctccagccctaaggcggtttttccctatctcagtagatggagcatacaatcgggttttataccgagacattccattgcccagggacaggcaggagacagatgccttcctcttgtctcaactgcaagaggcattccttcctcttttacta

SEQ ID NO: 476271 - DNA, 1000 bp, Homo Sapiens; identical to SEQ ID NO: 344701

SEQ ID NO: 476272 - DNA, 1000 bp, Homo Sapiens; identical to SEQ ID NO: 344702

SEQ ID NO: 476273 - DNA, 1000 bp, Homo Sapiens; identical to SEQ ID NO: 344703

SEQ ID NO: 476274 - DNA, 1000 bp, Homo Sapiens; identical to SEQ ID NO: 160977

SEQ ID NO: 476275 - DNA, 1000 bp, Homo Sapiens; identical to SEQ ID NO: 344706

SEQ ID NO: 476276 - DNA, 1000 bp, Homo Sapiens; identical to SEQ ID NO: 344707

SEQ ID NO: 476277 - DNA, 1000 bp, Homo Sapiens
cacacagcaggactttattcccttggttacagaggacagaagtctgagatcaaggtggcagcagggccgcgctccctgagggctccaggggaaggtgcttcctcatctctttcagcttctggtggctctggccctccttggcctgtggctgtgtaacccctgctggcctccaacctcacgtggcctccccctgctctccagtgtccctcctctcctttcctgtatagagacacttgtcattgcatttagggcccacacagatactccaggacgagctcatctcaaaatccttgtatctgccaagggccttttctccaggaagagctcgtgcacagcttccagcgactgggacgtggacacatcttctgaggccaccgtcggccatgacacgatggggcgggcattggctctgtcctccttgcaacaccgggagcagttgctccccctacggaggctccctccacgtattccacccgcaccagacccctcccagagagaacaagacagaccaaagcccagcctctgcggggccgacacccgtgccccataggggatacccagccaggtgagaaagtggaagcatggcctagacggtgggcaaacacgagaaggggctgtgggaggggtcaggggtgatggagaaaccagggttggtggctgcctgggcctgaccggggctggcggagctgcacaggacctcctccctaagaacttcaccccaagctgcctcaaacgactgcccttgcccagcactgtttgaagtgcccaatagaaagcgaccccagaaattaggccatcccactcccaatggcccttagacaggggaagtcctccacgggcaaagggttgcggtcgccgtcggagacctgggataggagactctgctacctgggatagaagccgggcgccctgcctggctcgaggatgtgcgagggatcaaaactcttcaccttgcgcactgtggctgaggctgagctcctcatcccgcacctgatggtga

SEQ ID NO: 476278 - DNA, 1000 bp, Homo Sapiens
ttttttttttttttttttttttttttttttttttttttttttttttttttttttttttgggatgggttctgtttattaaaatcctattgctcctactggccctgtgtcccgcctccattcctgtggttggggggaaggaagggcaacccgacccctttccactggccccatcagccctcagtggtcacgggcagtagccgctcctccagcagggttatggcaagcatgaggccgccccccagcagcagccccagcccctgcaggagcacatggggcgtaggcaggggctccggaggacgaagcagggctggtagcatgtccacaagggccacatagaggaagaccccagcagtgaccccaaacacccagggagtgagggggacagggcccaggctgagccccacccccaggactgcaccccccaatcccagggctccagacacgaggctcagcagcagcagccgccgaaaggacagccctgactggagcagcatggcaaagtcacccagttcgtggggcagctcatggcagaagaccgctaaggtggtactgaggccgctggagaagccatcagagaaggcagcacctatggccagcccatcagtgaggttgtgtagaccatctcccaggaggaccatccacgtgatatcagtgccaccctggtgcccatgactgtggccttggtgcccaggaggggccagagctggtgggtgctggctgttcttctccctctggccctgagcccctggctctggagctgcctgtaggggctgaagggccatcccactgccattctccggatccaagttgcgtgtttcgagattccttcgttttcgcctgcagcatcttggcctgagccctcggtgccgcaaaagccccagcatgttctccagcacaaagagcaggaagaggcctccgagcactgacagccccgggcccaggtccttctctggtagtccgccaggtcctgcgtgccgcccttcttgtgcatgcggtagca

SEQ ID NO: 476279 - DNA, 1000 bp, Homo Sapiens; identical to SEQ ID NO: 344710

SEQ ID NO: 476280 - DNA, 1000 bp, Homo Sapiens
tcacagctctgcagacttccagaaatgtccagggtgagacaggcgacggtttcgctttggcagtttctccagcatgtccatgagcttggtgaaggtaggtctctcttcttgttcaaaggcccagcagaagagaagaatgtccgagatttcttttcccatgccaatctggctgaggttgggtttcatgcctgtgcccatttgccagattattgcctctgctggttgggtcttgaaaggccattccctggcgtggagttcataccagattgtgccaagggcaaagacgtcagagtgcttggagaaggggagcttatcctcctctgtgtcgggggacagctggcggatgatctctggtgccaggtggcatagccagccattctggatgcgcagtttgtcctcccgcctgccagcctgcagcaccccagaaatgctgaagagtccaaagtccgtgatgaccactttgccgttgtcatagaagacgttctttgacttgaggtccttgtgtaggattcccttggcgtggaggtagcccatgcccttcacaatttcttgagcaatctgcctggttttgttgacatccaaaacgattttggcatccctcacaacggaatagagcgtccgtcccttacagaggctggtgatgatggccaggtgaggcgggctcatgcaggcacccatgaaaagcaccacgttctcatgccgtgtctgcctgtaggccatcacctcccgcttgaaggccttgagctggtcctcgttgtccctctcaatgtcaatcagccggatggccacctcgccatgccagcggccgtggtacacttgcccaaagcggccctttccaatgagctcgccgatctccagctgctcaaaggggatgtcccactcctgaaggaagatgctggtctggctggccttgcgtgggaagctccgggccgagaggagggacaggttcatctcctcgaagtcatcctctgactcttcggcctcatcatggacctcttca

SEQ ID NO: 476281 - DNA, 1000 bp, Homo Sapiens
gttgtttggggggttttattattaaaaacattaggaaataatggaataattaacaggaagataatagtctcatttcaaggattaaagttgttacctgagatggctctttgtgtatccagagatacaccattagactctacatcactatcatgcagctttttctgtctcctcattgtcagaataaattaagagaaaaagtgaaatttaggaagaaaggggcccgctctctccgatcctggtaatagataagtctatgtggttcttctggccagggaattgtggttgatgaattttgcatccctgagaagttcctatgtggctcccaccatagctgcaatagactgaaacttttggaggcgtagttgtaaaggtggaaagtgccaggaaaaagaatgggtgggttgggagcattgattctaaggctccattctctttccagtacccaggggaggcaagaacgctcagaatgaagcagagaaagtggagaatcaggcaggttcattccagtggcgtgtaagataatttaatccaagacatgtgtccaatccacatactttccagacatttagcttcctgtttcacaggtcagagggctttctgcaggaggatggttggtgagatgcacctcattctatttccaaagtaatgggtaggtgaattgtaatcaacgttacgttgcacttgctgtttactcatagaatgtccttccaccatcttcacatacgtctggcttcttattgtcattcagatcacatatccctgaatgacaggctacataatatgaggacctgcagaaagccatgattggtccatttgatgtactgtagtcctcccttatccatggtttctcgttccacagtttcagtttcaatttctgccctactccatactcctggactgcacctctgggccttattttatatcttgtcttctttgcacctgaataacggacacctgaatagtgcagaacatgtcagtatcagtgggcagaaaaatcctc

SEQ ID NO: 476282 - DNA, 1000 bp, Homo Sapiens; identical to SEQ ID NO: 160978

SEQ ID NO: 476283 - DNA, 1000 bp, Homo Sapiens; identical to SEQ ID NO: 160979

SEQ ID NO: 476284 - DNA, 1000 bp, Homo Sapiens
tttttttttttttttttttttttttttttttttttttttttttttttttttttttttttttgcaggaaagctgctacaatttatttccgagtcccctccagaccaccaggctgagcctgtcacgacctcctcaagggaccagtcattcctgtccccagtgctgctagccacaggcctgggatccggccagagtcagcccagccccacccctggagcgagcatgtgacgtgggctctgcatctgcatcgtccctgtggccacctggccttggaatctgctcctccaagacccagccaggctgggccagggcaggcttcccacacgagggcccgtcgacaggccctcagcgtccaggtggcgggatccagatgagaccagggcgggctcccaccagcctggccagttcctgccgacactgtccctgtagtcgacgtagcaccgcctccaggcaggcctcctggctcctcagcgtcctgatcaccacagctgcccgcaggtcccggtcccctgctgccccatcctctcgtctcaccagccggtgtggcccatggggctgggccgggccaccgtctcgctcccagcactgctgtagagctcccagctccttttccacagcctcccgagaggcccgccgcgcggcactccactctggcccccgtccacagcctccagccttggcctcccaggccgcccgcctgcgctccgcagcctcccgcagctcctcctccagtgcctgcagctcccgcactaccaggtccaactcgccacccccgcgctcggggacccagggcaggaaggtgggctgtgaggctgcagcaggcacctccggggcacaggtgcccaggaccgtgtccatccaccgccagaagaccagctcagagcgccgccacgccaggacagcctccaggcgctggttctcacgctccagagtccgcagcagctgctggcctccctctgggtccctgagcatctctgcttcagtgacagacagatggctaag

SEQ ID NO: 476285 - DNA, 1000 bp, Homo Sapiens; identical to SEQ ID NO: 344712

SEQ ID NO: 476286 - DNA, 1000 bp, Homo Sapiens
atgttttgagctctttatttgatgtgcttggagttgagtggcagaggctcatgagcacacaggtgacaatgataccattgagagcccaagaaagggctgtgacagccatgggacaggtcagtggctgtgcctgggttgtcaggaggaagtggggaggtgttggcttagctggccatggaggatggaggagtggcagttcagcatagggaaggtggaaggagggaggagggaatttcacacagtgagcccagcaacagcaaaagtgtgaggctttgcacagggtatcttcatcctggaggccctcagccagagcactgagtccaggggactccatgccagggcctgaggccagactatggctgatgccagacaatcaagggccttatatgggatgtcaagtgatttcaacttcatcctgtaggaaagggttttaagcagtggggaggtgatgtggtcagatttgcttgatacccagataactcctgctcttgcatgtaggatgggcttaagggtggggtagaggcggagcaggaatcctgtgcagactttgctattgcccaggggtctcggtgggagtttcagggactagggatgtggtgcaggtggagaagagggacaataagtagagacatttcagagatggagtcagtagactctcactggcagaaaattgaggacaaaatagtgttccttgccagacacttctgtgtctctgcagtgtttgtgggcatagacatgtgtccatctatgtacacatcacatgtgtgcatgcgtgtgcatgcatgtggggctgtctggatgcacactggcgatcatgcacgtatttgtgcatgtgagagtctgtgctctcaggcatcctgcaatctgcatgactgtctttatatgtctgtgcctacggcctgtatgtctgctgctcccagtccagctgtgaacccaccccgccagcccactcccattgtgctccgggctcagcacaagattctgtgtgccaggcaccctc

SEQ ID NO: 476287 - DNA, 1000 bp, Homo Sapiens; identical to SEQ ID NO: 344714

SEQ ID NO: 476288 - DNA, 1000 bp, Homo Sapiens; identical to SEQ ID NO: 344715

SEQ ID NO: 476289 - DNA, 1000 bp, Homo Sapiens
aagaaatgagattaatgcatttgaatacattaaaatttaacaattctgcacatgcttcgatagaacaaacgaagtcaaaggcaagccaaaggccagccacgtatccaacgtgtaatcacaaaaaatattgaccaacccaacaggaaatgggcaaagaactggaacaggtgacttgcaggaaaatcaaatggcccagaaacatattcgagatgttccacctgacttgtaatcagggaaatgcaagctaaaataagaagattccacgtcacactcagcagcgtggtgaaaactcaacatctcccatcgggatgttggccggttggtgagatggggcatctcacacctgctgtgcacagcctccttgggaggcatcaggcaaaatcaagtaagtggaagacatctgggcctacgatccagtgattccacctgcaggaatatcttctggagaaattcttccactgtgcaaaagtcactgcacctgcagccgactgtagctttgctcttggacggggaacatccactggctggggtcagtgcacaccgcacagagtgaccttccaccggacagaaccttccagaacgtgccttccacgggacggaaacttccggaacatgccttccacagcatggaaacttctggaacgtggcttccatgggatggaaccttccggaacgtgccttccatgggacagaaccttctggaatgtgccttccacgggaccctctcatgcccttgcacaactgcaccattttcctgtgtcaccgaggaggacgtgggctccgagccgctgagtgacctgttggggacagggctggcgctggccgtcccagcttaaggacttgccacagcttaagacccatggaaggaaggtacggggaggtgctgaagggatgaagggcagagctgggccttggggcaaggccagtggcagcgccgggctcctggacacagcagatggccccaggcaactggccctgccctgccctggagacccctccg

SEQ ID NO: 476290 - DNA, 1000 bp, Homo Sapiens; identical to SEQ ID NO: 160980

SEQ ID NO: 476291 - DNA, 1000 bp, Homo Sapiens; identical to SEQ ID NO: 160981

SEQ ID NO: 476292 - DNA, 1000 bp, Homo Sapiens
aaaaaaattattggaggaatttattgcctgcctccatgtctataaacgttccatggacacaaaatacaatcattcaaattccctggaaaccacctatatttttcgaagaattcattctggccaacagttgggaaccaataacaggtctagagctcctaatttaggcagctgtcccaacataaaagcacaagagccagaggtgagttctccaaagctgcacctgtgtctgcaaacgtttacacaagacccttgaatggagaacatgccttgtagggcaaattcaacttttccaaatgacactgctataagttactacatctcatcctctacatctctgtgagggatgatggattagtattaactgtcttgcaaatacacatacagaaactcaggtaaggtcagccttactcagtagataaaccccaaacatgaaaccagctgggtcagcctgtcataattggatccctcttgcatgtaaagacaaaggttgtctgcttggagatggagaagagttcagcatagctcgctttggggccaactcagagcaagggtgaaccaatcctagctgtcctctgacaaataacagctggagtcctgccaggagctcctcccccaagcacttggttccacaaggcaaaccccagagaagtacaggggaaaagagctctccatttctcagcaggggacaccctggtccccactgccactttgtttgccctccaagggaaaaacctctcaataccaggtccaggagcagctggatgggatcactcagaacccggccgagagctaattccctcttggcttcaaaatccatcctatgcttggagatgctggggctgggattctacaaaccacattctggctttgtgccctgataggctcagcccccagggggagctagaaggaatctgctaggctaaaggaggaagtaggaagtggccccttgctcacttcctgtttgcttcctgttcactttctatcagcttcctgtcccttg

SEQ ID NO: 476293 - DNA, 1000 bp, Homo Sapiens
ttttttttttttttttaagcatggcaatttcttttattaatggatgcctgaagggaaagtgtaacatttctgcaggctgatagaagaagcatcttcaggctgggtactctcgcctcacctctgttttcactggtgagattaagttgggctggtgagggaggtcaccagaggatgctcgggcactgaggtggcaagtctttgggctggtggggatgggcggaggtcgggccttgaccttgtgaagttgcagctgcctcagttctctcactcagggctcagagttatgcaccatgcccatccctgacctcatcttttatcttggagatgaagaccaactggcatagttctgttggtggactgagggcttttgactcctggaaatcatgagtccttctctgaaacactactcccgaagttgctttatctgggggagtattctggatgatggtgccatgtgaagaacccagagaagtgccactggtacggcaactggagtgtgtcctggggcagcaccaatccaaccccagaaatcatggtcctgtagcactgtaagctaactgggagggaacagaggcagggctgttggccccactgctgctactaggaactaatggaagaccagtatatctagatgagcaaacaaaacttcagttgattctgtgaacactggagacactgccggaagagacacattgtttcctgcaagttaagaggtaggaagggaaaagtggcagagatccagtctgattctagctcctctcacatcctttttggccagagatcaggcaatggctgtatgcttcttgatcctgcatacatgggtccctcatagcacttgcgtggcttctacaaggccttggatccagttgggctggagtggcaatcaccagcaggtccctcagagtaacattatagctctgaggactctgcaagaggagggaggacacatccagctgcctcttctcgccagagctgtcactgcgggagtggcactccccag

SEQ ID NO: 476294 - DNA, 1000 bp, Homo Sapiens; identical to SEQ ID NO: 344719

SEQ ID NO: 476295 - DNA, 1000 bp, Homo Sapiens; identical to SEQ ID NO: 160983

SEQ ID NO: 476296 - DNA, 1000 bp, Homo Sapiens; identical to SEQ ID NO: 344721

SEQ ID NO: 476297 - DNA, 1000 bp, Homo Sapiens; identical to SEQ ID NO: 344722

SEQ ID NO: 476298 - DNA, 1000 bp, Homo Sapiens; identical to SEQ ID NO: 344723

SEQ ID NO: 476299 - DNA, 1000 bp, Homo Sapiens
atagataaaaacgaatccttttttattttggcaagaaggggtaaaatgtctttctgccagggacccgagggaaggcccccggaatggagatgcggcagatggagtacgggtccgaggtcacagatccgagggagggtttcagggtcgagaccagcatcgcaatatccatcccggggtcgcagagtcctggagagtcacaggcagggtcccggcggtcaccacgggtgttccggagtccagcggggtcagaggtctcgaagggggccagggggccggaggtcacggaacagcgggagcccagaatccggcgccgctcggggcagggggaaggtggcgggcggggggatggagaagagctccgtgaagttgggcaccgagtcgctgataaacgtcacgttcccatagacgtgctgcgggaaggccttgtcagcggattggctccctccgggtccagggactccggctgaagcgatctgcgacgtgcgcacgtggtacgggaagttcttgttggccgctgacgggcgggtcatgatcagaaacacgccatgggcgtacaagtggatccccagctggatgccattgacaatcttctcccgggcccacttggggatgccgaaattggcaatcagggccatgacaggaaccgcaaagaaccagagggtataggcagcaaagaagggcacataaaaaggctgcttctcaggaaagtgtcgcagtgagacaagcacagcatagcagaaccacacgtaggccgccacctgcagtccaatgagcccgtagccggccggcgactcatacgtgtacagtacctggcctgggtcaaagaattccgcctcgtagatgagcagcaccacatgggtgagcgtgtacagggtcatgtagacaggcaacttcacggagcccgcgtggctgatgcggccccgtgtcaccgtgaatcccttccccaggaggataagcatcagcaggaagatgaggaagctggaggagaagagcagcttgg

SEQ ID NO: 476300 - DNA, 1000 bp, Homo Sapiens; identical to SEQ ID NO: 344724

SEQ ID NO: 476301 - DNA, 1000 bp, Homo Sapiens; identical to SEQ ID NO: 344726

SEQ ID NO: 476302 - DNA, 1000 bp, Homo Sapiens; identical to SEQ ID NO: 344727

SEQ ID NO: 476303 - DNA, 1000 bp, Homo Sapiens; identical to SEQ ID NO: 344728

SEQ ID NO: 476304 - DNA, 1000 bp, Homo Sapiens
tttttttttttttttgttcttgtgagtgtttttatatttgtctttgtaaaaaccacaaagctaggccatttgcttaaatcatcgttagaaaaaatgctgagtgcccagatgggatttctagtttctgtgcaaatgaaatcacattagtccagattttattcactcaaaactactagggaagcagtaggatttggtttaaatgctgccaaaaagcaggaattcacttaagttttaactcagaagcaatcctgttgttaatgttgtagccaggttcgggcagcatggagggtggggcccccattgtgcttgctgaggaatcccggatctctcccagttcaggctcactttcgctagaggtagacccactgttgatggtatagacgctctctgcaactccctgagctgaagcacagccatccggctcgttcttctcccttggactcgacagtcctgggaggacagccatctttccagtctgcctatttggcagcaaggacatggtatagtctgcaatgatcccacccacatctaagttgcatgcctggtcaaaggctaggaagccaacattagcatttgcctcacacaccacaaaggagccatcgtccatgataaggagatcaatgccacagaagtccatgcctaggatgttggacacctgaatagccaactgcttgccttgttctgtcagcggacacttgacgcccacgccaccgagagagcagttgctctgcatccgtccatcagtggagcagcgaagcatagagcctatgacctggccccctaccaccaccacccggatgtcctttccatgggactccttcacgtacttctggaacaggtagggcacatcgtggcggatcagatggcagatgtcagagaggtgatgtttatctcttgccagaaaaacagcttttccccggtggcctcgtgtgctcttcaccacgactgggtagcccaggggctcagcttcatcaatcatttttgaaaagtcttcatgccc

SEQ ID NO: 476305 - DNA, 1000 bp, Homo Sapiens; identical to SEQ ID NO: 344729

SEQ ID NO: 476306 - DNA, 1000 bp, Homo Sapiens; identical to SEQ ID NO: 344730

SEQ ID NO: 476307 - DNA, 1000 bp, Homo Sapiens
caccataaaatatacatgtatttttgtaggcacacaattacagaaagacagaaaattatccaggggcattgtcggtgagaacttcacacagtaattcactactataagaaaagggaatactttctgctaaaagcagtaagtcaaaacattgaatagattactcttgctctatattttttataatttccatttcctttttggtattctctgcccccattacagcagccatagagcacagaaggtgaactggagagtacactcggcttggagttagaagatccaggtctaggtcttactttgccattttttccttttgtaactctggaaggatagctttgagtactgaatgaaatagtttatgtgaaagttcagtgtaaaccatgatgtattaatcacatgaagcactgccctgtaactctgtgacctctgtcattgagactacctggaaactgctttataatgaagtactagcaacagtagtatgataaaaggctgatgggttagaagaaatatgaccgaacaccttgggatcaagtctaggctccttcctttcctagctctgtcatctttgaggactcatctataaaaagaggagattaatctaagctctcttaaaggtaccttacaactatccatctctacaaatataggttaaccaaaatagattgataacatgaagaatggagaatctgacatgatgaactgacagaatccataagtcatcaacgattcatggccttactaccttactaatattctattatcaaatattcaatctattgttttactttttttgcccaatattcaagccagatgtctagaaaccaaatattcccaggtccacaaacaacctggaaaaaaacaaataaggaatagtttacaattaacagggtcaaatatattattaacaacaatccttctctatctcagtactgcaggtagaagggaaatctgcaatgttttacatacagcactgtgggaaataccaataacactggcc

SEQ ID NO: 476308 - DNA, 1000 bp, Homo Sapiens; identical to SEQ ID NO: 344732

SEQ ID NO: 476309 - DNA, 1000 bp, Homo Sapiens
ggagtcaggaaacttaggaatttattgggtactctatactactgcagctaagctggcacccaagccagaagacaaagtttttccactcgtccctcccctctcctcaagcagaaagaatctctctatgccactcgggcctgtagcaagtactgcctggataccactaatgttcactcaaggctcttcagtcagcttgtgaggaaggctgccaggcctgggtctctcccttcagggcagtgggctcccctctggcccagtgggagtccagaaatgacatccaggagccaatgcctggaattgggaaccccaggagcctgcttggtgctccacttcactgtggccgaactggtacccaagctgcaagacaaaatcccctttactcctccctctcctttcctcaagcaggagtctctctctgtgaccactgtagctgggaaagtgctggatcacacctgaagcagcacagcactggctaaggcctgcagtgagtgttgtctggccactgctggtgtttattcgaagcccaagggctctttagtcagtaggtgatgaatcttgccagaactgggtccttctctttaaggcagtggattctcttccagccagagatgtgtctagaaatgttgtctgggagctagggcctggtatgggggcctcaggactctgcctgaggtgccctattctgctgtggctgagctggtatccagattcaagacaagtcctctttactctcccctctcctcctctcaagcaaaaggaaggcctctctcttgaagctgcaagctgtgctgcctggggctgggggatggctgctacaagcactcctttggctgccccagctggtgtctcactaggtcttgtgtaccctaagtccactgcctctgagcccagcagagcacctgaacttgcccaggaattgcagtccttgtggccgagactgcctttcaagcttatttaggacctcagagcacttcagcccacagtggtagggagagctgga

SEQ ID NO: 476310 - DNA, 1000 bp, Homo Sapiens
ggatgaaagctcttttatttactgacattctttagcctttctcctagtccagggagagaagtttgaggaattagtaggctgtgaccctgagtgggtgggaaatacacggtgtgaggaggatacgaaacagcagcacaaagaggcaagagtgggaaaagagtccagaaagtacaatcttttccagatcacatatttcatgcccctatttttaagaacaaattatatgtcaattggcctgcataatatgtgaaaaggatggaggcaagctggcactgatgtttgaacttcagttaacctacaggaccaaggctaatgcacgctgtgctggtagctgaagtccaaggataatctaaagatggaatgactacccctaagcctcaaatgcactcgcagttttcctgagttgactcatagtggcatggaatgaggctggcaatgccaatggccgtgggcaccagaagatgaaaccaactccatacaggcgttattggcttaggaatgaggctgatgctaggggttcttggtacacagagttgcaacaagggagaattaatgggtgcagcagctccagggacaggatccaccctgctcagttatcaggctcttggtggtgatatcgcaaggggctcagggatcctaccagctggcattggttccaataacaaggcagacacaggaaaaagactcttcaggaaaaatctgccaccactgcctgagacctcataaggggagggaggggagggctgctttctgacggagtaaaattgggactgcaactgaaaggaagagtagctgggcaaccccatacagagttgtggtaccaagggtagaggtgatgtccttactgggatcaacgtcatcagtgcttctgaagagattcttgagatccttataagaagaggggtcaaatcagggtcaatgtcaggacagggctacttgctcctctcttcaatgtgtccaggggactgggcagcagaaggcaccctcactgggtcagcac

SEQ ID NO: 476311 - DNA, 1000 bp, Homo Sapiens; identical to SEQ ID NO: 344734

SEQ ID NO: 476312 - DNA, 1000 bp, Homo Sapiens; identical to SEQ ID NO: 344735

SEQ ID NO: 476313 - DNA, 1000 bp, Homo Sapiens; identical to SEQ ID NO: 344736

SEQ ID NO: 476314 - DNA, 1000 bp, Homo Sapiens; identical to SEQ ID NO: 344737

SEQ ID NO: 476315 - DNA, 1000 bp, Homo Sapiens
ctggttgtgtagacatatgttgaaaagatgaagcctaggtagttctccatcatctgcagatccttccagaactgtgggaaaggagggttcagtgaatttttgctgtgttcttttaacctaacagtgttattatatattttgttgacaactctaaagtcagcttgtcttaaaactaaaaaggacaaaggatcggtgtttatgattttacttaacaggaaacacgctctaaaaggaagggacttgctcgcggttccactgctgctaaatgccagtgtcagggtgcaatcccagggctttgggctctatatactacgtgcctttcataacactgctgagtgaaaataagcacgtcttcattgcatttaaaaaatactgtgctttttttcttgcatataaaattagtatattctcatgtagataatctagaaagcatagaaaagtatacagaagaaaatagaaatcacctataatcctatcgcccagagatgatcactgttaacattttggtttacttccttctcaatttttcctatgcaaaaatatttttttaaattttggattgtatgtcattatcttccgtcttatccaatcatttccccatggcattaaattgtctttaaaaatgtttgcaatggctgcagaaccatcatatggatagctcatcattcatttcaaccctgtaatgttgaaaatctagttttcttctttcagtcgtatatgatgctgtcatgaacatccctttcattaatctttgtctacttctaattattttcttagaagtagagtatgattcttagaagtagaattaaagttgatactaaagaactactttttagaaaagcagcagtcagccctactacccacaatatttgttatttatgaggtttctttctcctcattatgtttcctctggtgttgaataagctgtgaactataccgataggctttcccacactcactacatttatagggtttctccttagtgtgggttctcaagtgt

SEQ ID NO: 476316 - DNA, 1000 bp, Homo Sapiens
ttttttttttttttttttgaggtaggaacttttattatcacaagtccagagaggtaaagttacttgcccaatgccacacagcaagcaagtggcctgtccaggatgtgatcttaggtttgtctgactgcagagcccccaccctcactttccagtgtgtgtgagggggtcaggaacagagggaggactattgtaagcggagccccaggcactgtagggtcctggagaaataagggggcagtggtgccaggagctcaacaggggtgtccctggccctggtgcctgggagaaggagccgatgtaggtggaggtgcaagggcagctgggcagcctgggagggggtcaggtggaggcgtctgaggagggcttcatccaggacctgtctttggggcttgttgttctcagctggcagcagaaatcgctggcccaggacagtgcccacacgggcagagtacatgtggtccccaagcacagggcagagctgtagtaccatgtgcacctgtagttgactggagaacactgtcagtggctgcagctggaccagggcacagccagagcctgtggctaccacacgaaagtgactgagagtcttcttgacaccttccaggatgtcctttcgggatggggccttcactggaactgtgagattgaccccatcaatgtgttccagtttcagggcagcctggatcttcccctcagaagcagctgggatcccatcagtgacagcacagtaggtggctgtgggcctttgggctctccgtgcatgggtgaagtacttctggaggcgactagctgtctggggacagctggagaggagtacaagcccagagctttctttcccagatgctcggacaacctgaagctcctgctccctgagccctagggactggctcagctctggcagcactgagaacaacgtcagctctcctggttttcctgtcactggtagaccctgtggcttgttcaacgtcactagaggtcctttccggtccaccacggctgc

SEQ ID NO: 476317 - DNA, 1000 bp, Homo Sapiens
catatgctattcttcatttattcttccataatgaacattttcataatttaaaaaatcctcccattatccacagacccgattttcaggaggtgccaccatctggttcacaggcatatgcccaaaagtaagcgaggagctctgagcagccagcgtggcagtcaccaagccctccaggctgcagctcccaaggtgggtgtttattgattgagctcaacgtctgctcccccttcccatctgctctgacttccgtttggagatccacgtggtttaggagaagctggctcccctccaatctgaatattctatcccctgaccacagagagtcagggacacacatgtgatctaaggcagtccagtccccccacagggggcaggagttgcccacaaccagctcaagaatgaaggggaaccaaccctaagcaaagccaatagattcatttaggctgcgatgctgctgcttgcaatcagaaagatgctgagtcatacaattccatagaagaatccctcggaccctcacttccagccggaaatcagtaaacaatgttcaggtgccattctgaaatctgtatcttgtttccgggaactcaggagtggagaccctgtagactaagagaggcaagggccgtgcaggcaggcacgccacccgcacccacagtgagtgctgacagcccgcaagccggcaggctcttcccaggagaggaagcctggcactcagcctctgcataattagagaaatggaaattaaaaccacaacaagatccacttcacacccaccaggctggcaaaatctccaagccgggataatatccagtgctggcaaggatgtgtgacacctcagatacccaaatgctgctggtaggagtgtaaatttatggaattcacgttggatagcaattggcagatatctacatatgttatatgcacgtgtatatacatgtatatatgtgtgtatgcatatgcttgtgtgtggatgtgtgtgagtgtgtgtgtatttccatgt

SEQ ID NO: 476318 - DNA, 1000 bp, Homo Sapiens
ttttttttttttttttttttttttttttttttttttttttacaaccacaataagaaaagtttattatatcacaataacttctttccttttttcctttatcttatgaataaaatagaaattttcaaatcatcttttatttgtatacatccttatagaaaaaatagtagagaaactttaaaaatagctatagtaaaatgttataccttcctaatcaactacaatacagaattttataattatagtatttcatagttgctcattattagaattgactgactaaaatattacaacttttaaatatccaattttactgcaaatttcaacaaattttcaaaaattctttttacctaataatgctttagctttggaagatacaatggattaaaaatcatacttttctgttatgtatataactaaatgtacatatatataactgagtatatgtgcttatatatatgcgtatatttaataaacagataaaggagcttatatgtgtataagcatatatactcatttatatatatgtgtgtatacacacagtttcacaaatactgtttgtcatatgcaatcaagagaaattaaactcttatttaaagtatttttggcttatatttccaatatctttaacaatttaataagaaagaaaatacttttataactacaattatagaaaaaaatgcatgagaaatgtatactgcaaaatttcattacattcattttctaattttcatgtttgcagtgagatttaaccaaatagaaaacatcttagaaaattaaacatattaaaagacttaagttaaaccaaacaaaaattttaaatgtcactaacccaaagcatgcactgctcctctatgcttgctggagctcttgcttgttttaaccacacgaacagcattttctctgaactgcagctcacaaaaattttcaagaaattttgccatttcttctgtaacagtatccaggtaagtttctttaatgaatttcaccattgaagatggag

SEQ ID NO: 476319 - DNA, 1000 bp, Homo Sapiens; identical to SEQ ID NO: 344738

SEQ ID NO: 476320 - DNA, 1000 bp, Homo Sapiens; identical to SEQ ID NO: 160985

SEQ ID NO: 476321 - DNA, 1000 bp, Homo Sapiens
gccaagtaaaataagctttaatttatttaaaaagtataccacacatgtttagacacaggggagggtgtcctggaatcaagagaacagtcgtaagtatttcaaaagcttgagtcttgtcaattacattaaaaaactaaaccaatttttttggatacaataaatgcaagaaataaagtaagatgagatggtctatgtgtgtggttttgtggttggaaaagacacggaaggaggtggttagtcgggacactattttagtggaaaagtgactttacttactaatggctgaattagcactgactgccaattagaaacctagttcataggtcctctctacctgcttgcactaaacactggtgccttgaagttggtgtcaaagatctctgtacagtattagtttctttaaaacaaacgaacacagaccacataaactggcagctagtcatggtaagctaaattttgtcagtgtttctcttagcttctgactgaaactgttaacctgaggccctgagattacacacaggttacatattgctgctctgcaatatccaattattaacctcctcggtcatcaagaggttagtaactaaaccaccactgtgggtttaccactgggaagttggcttattgccattatgttttactatagcttccaaatctccaataaaatatgtttcctgatacgtcactgcctcaggcctcacagctttctttattcagaacacccacttcaatcatctgataaatctgaacatggatttcttcaagagtcacacacatatgcactcaaaaaaagacatcactgaaaaaagcatcctttttttactaaacaggtctgccttttccctggagaactcaatttcactgtttactttttattctttatatcactgtctatttaaaattagaaccacgtttacattccaataagaaattccttactagataatttttatttaatcctttatcaactgttaattgcttttcaaaagaagttcctttt

SEQ ID NO: 476322 - DNA, 1000 bp, Homo Sapiens; identical to SEQ ID NO: 344740

SEQ ID NO: 476323 - DNA, 1000 bp, Homo Sapiens; identical to SEQ ID NO: 344742

SEQ ID NO: 476324 - DNA, 1000 bp, Homo Sapiens; identical to SEQ ID NO: 344743

SEQ ID NO: 476325 - DNA, 1000 bp, Homo Sapiens; identical to SEQ ID NO: 344744

SEQ ID NO: 476326 - DNA, 1000 bp, Homo Sapiens; identical to SEQ ID NO: 246600

SEQ ID NO: 476327 - DNA, 1000 bp, Homo Sapiens; identical to SEQ ID NO: 160987

SEQ ID NO: 476328 - DNA, 1000 bp, Homo Sapiens
cttccatgtttttattagagtcaatcccatttgcttcatctagtgcccactccaaggtcccaacctgaccccctctgggtgagccagtcacagttccattagtaggagacctcaggcttcctggaagatcctccgggatgaggttccctgggcaagcccaagtgaccatgcctaaagccccgctgagagactggttgctgtgtgctgctggtcaccgcattctgatgccctttgaagaatcaaaattccagggcaaggagcgcctgggaccttattcagtgcctgcctccacctccctcttgacaccagaaggtggcattgctgtggtcccctggacctttgcacattcaagacaggagaagaaaaatccataagactctgctgtccttgaaacagtgggaagaggagagagaagaagggagagaaaggtggtgaccctgtcctggggactgacagtcgctgtcagccccggccagtacagatggatttatgtccagcgaccccatattccaggacgcgcggctgccaacaggctgatgcctgaagggctgtccagagaggcgcatcctctgaagcagcagaggcagaaatgtgacaatgtttactctccaagaaaaaagatttaaaccatgcctgttcttcctgactcgcacgcagccttgcttctcctgtctcttttgaagaggttctccaaacttctgctgctttagtctccgaggactcctccacctcagtggcctcttggcaggtccccttttcttcatccccctcagcaaagactgcttagaagtgggcacactgggaaccttctagcataaacctagtggtgcaggtggaggaaggtctggagggctgtgtgtgtcacaggccggggtgaaggggctgtgagatctgctaagaccagggaagccaggttctctgtgtaacttagggacccagctcccgagagtgttttgtgtgtgtccattttacggcacttgactctgtttccctaagctgt

SEQ ID NO: 476329 - DNA, 1000 bp, Homo Sapiens
ttttttttttttttttttttttttttttttttttttttttttttttttttttttttttttttttttttttttgtgcccaagtagagatacgatgcgattgaaacgatgccctagaacagaaatattctttaaaggaacaatactttgaaaaataaaaaaaaatttaaatcgttgaacatacttgcaacacctgcagaaattcaacttgatacaatgagaaaataaacagtggaatcaaatcctcacccaaatggcatggcctctaaggcctgcagtccgctgctggtgtgagtcttgccacccaaaccagggctcgtgggcaggcagcatcacttccccaccactccagagcccccgcccccatgctctgctgaaccaagccgtgatccaagttcgtcttacatcagttttgtatatctctggcaagactttgcagcagggacacacacatatatacgtgtgctatgggcacacacacacatacacacacaaacacacacatactacacacacaaaatttcccattcaacccagatgcaccaggtgagctgaatgattttcagccaaccacaatggtgaaagacagaagcaccaaacagtctttgaaatgggtcagttattacaattttgactttttatatatatgtatatatatatatatattctagttttcctctttgtgttatttttttttttaaaaaagcacaaatgaaaaatgaagaattctttccagatcaatttaaggcttcccaccaaatggaaacagaagaggctttacacaatatcacatgtgataaatgtctaccattcacagccttaaaatgatggaactaatcgttgttgccagtcactgattaagtattgtgcctttaaactgatgtcgttctttttgctactatgctgagttttattattactgactatgtgtacagaaatctcctttaatttgctttagaatatcctgtccttaccgaattattgcggtggctttttgttttgt

SEQ ID NO: 476330 - DNA, 1000 bp, Homo Sapiens; identical to SEQ ID NO: 160988

SEQ ID NO: 476331 - DNA, 1000 bp, Homo Sapiens; identical to SEQ ID NO: 344745

SEQ ID NO: 476332 - DNA, 1000 bp, Homo Sapiens; identical to SEQ ID NO: 344746

SEQ ID NO: 476333 - DNA, 1000 bp, Homo Sapiens
cagctttcatctgcatgttaggttccacataaaatatcctaggagttacagctgacacaggttttccaaatctctaacttagtaaactgaccctggaaccagccgcctcctccccacgctcccaagggttgtagagaaagttcagggaaaggtggtcccacctcctacaggataaggaccaagcaagcccctgagcctggtgttcagggccctctctatcccagcgtctgctgacttcccagtcccatgtcccagtcccccacgttgtcacgtggctccccacattggactggacacccatgcctctgggacccgccaaaaccaaaaggaaaagctgactgtcgacccaaaagtgtaaacggatctactggcctgggaagcaggaaggatgaaagggcacatctccaggtccatgaagctggaaggaggccaggccctcaggcaggtgcccttcagggatgggaggtcacagtgtgatgggcatcgccggggaaggggctgggagcaagcagcagagtctcctctgagtcggcctctgcaggcccagccccgactcagaggcagcgccagtgttcactgagcccctgtactcagcagacaacccagagggcttccttcaagtcctctcgccgagtctgtgtagaggcagccagtcatcaggggaaggagtgagctcaccaggctgctaggaaggaccggagctggagaaccagaggtggtcaggtgagctgggggggttcagggcaggagaagggttgctctgtcatcctcatcccagaaggacacccagacggtccttcccatcagacggcagttgaagacttccagattctttccccactgtcgtcctctctgatcctcacaacagccctgtgaggtaggcagtgggtgccttccccctttgacaaatgaccacagcagggtgggaagctccaggcagcccctcctctgctccctcgggctgctccggctgagggggcgggtgggtctgtggttccct

SEQ ID NO: 476334 - DNA, 1000 bp, Homo Sapiens
cgacaacagggtttttgttttaatagtcatcaatggtattctcaaagaacacgtttcgaacatccagaatggatgctaattccaaaatgtgcttctggagatgaggattctccactgtttcatcccttggcagttgtggatatgattctggataatttcgtgtttcccgaaaaatcttgtgcgtcctcatggtggctgaacaaaagataaatcttgtgaggagcaagcgaagaaattcatctccaaaaaactggagaaatgcctgatctattgaacgtgaatgagtcagtagctgggcaatatcacggttgatttttcgaagatattcttgacacttttcccataggcctctgcgcatgcttgacaatccagagacaaataggaaggccattagaggattgttcaaaaagagagtgaagaggctacctcgctgagattgatcttgtaaagcttttggatatgctgtaggagaaagcaagcagactagtggctgtccaaacaagtttgtgaaattcttatacgcaacactattagacgaatccacaaagatgaacagtggcttcctggtgaaaggatagagatccccgggatgaaggcagtgcatttccttgtgggactgatttcgtttgtggatggcatctccattaataatatcccggttactattagtaagtacacctccaaaatcataaggaccttcactatcagaacgacctgtggggaaaacgccagtggccgacaggtaaatcagaagcacactattggcaggcagctccttaaaagacgctgctaagaaggtatatagctggctgaaggttggtttgtagagcagatacttgtgggggttttctcgtctagtaggcttgtcagctgattcctgcattcctggtttattcatctgggaagctaaattcattggctccctttccagagcttgtaacatccggaacatgtcaacagttagttcactgaacttaacctgattattacaattaccaat

SEQ ID NO: 476335 - DNA, 1000 bp, Homo Sapiens
agccttgtccagtgctgtttattgagtccatcatcagaggcaggaaagacgccactcatcacagagggcatgtgggctgcgggcaggggcttagggtcctgcagaggacaagtagctgggacagcccttcaccccgacaccccatggccactgtgaggcaggctgaggagacaggacagggaatggccaggtgcagaatctgcacagccccctgccgggtcgcagatggccaccacccagcaggcccctggcactcacccacaggcagttccccaccccacttcccccttggaccctcccaaaccagggccggggagtgagacccagacctggccccgatggcaggaggcaccctagctgcttccagggccaggaggggtgggtgggatacagtgaggccaaacaaggcagaagcgggtgcagtagtccctggctactgcccagcttccgggactcccacagctgggctcagccttggtcctggcagtgctgggcttagaaatacagggctggctcgctgcggaagtccgagaggtcattctgactggcgggtgtgagctgaaagtgagaggacagaatgtggacacatgggctcgcccgggtgtcagactccccccagcgctccactcccccgcatctcaccatggcctccacgggcgggggctctgcctccctcggggcctgctccagcgcctgctcctgccacttgctgaaggccacagagtgcttcggggtgtagctggacaggcctgagctaccctctggcagccgagagctctcgggtctcacgctgctcacaaacgtggcccggggcaggaagagtgcaaagggcttctcctctgagccggatccctcttcctcctcttcctcttcctcctcctcctcctcctcctcctcctgctggtccacctcttcctcctgctctagggagctctcggaagggtactcaaatgtggtctgcaggcttttgtcgttgaaggagatcttcatcttctttctt

SEQ ID NO: 476336 - DNA, 1000 bp, Homo Sapiens
atatatataaacgggaatttattaggaagaattggctgaacaatcacaaaggcgaagtcccacagtaggctggctacaaactgcagaatgacagaagccaataggggctcccagggaagccagaagcatggctcaggccaagtcccaaatcccccaaaccagggaagctacagtgcaggccccattctgaggccgaaggctgaaagcccaaaggaggctgctggtgcaagtcctagagtccaaaggctgaaaaacctggaatcagatgtccaagggcagaaggagaaaaaaatgcatcctgctccaaagggagaaagagatcacgacaaaaataaaaaagaacaaacaaacaaaaaaacaagcaaactgaatatcccccttcttctgtctctttgttctggccactgccacagccaatcggatggtaacaacccacactgagggcatatcttcctttctcaggccactgactcctgcatccatctcctttggaaacaccctcagacacacctgtatttccacgtcaaagtcaatttcataaagagtatttacaataatcaggcaattgtgcagatactcttcaggactttttggtcgtgtgtacatatttataaaatgagactcaatcaagaatgggcaataggctcccaactgtgttgcaaaaacaagaccatctgaaaggtctttgtcaaaatttactatccatctctcagaagggataacatctttgtgacagtttttccatatcacatgtcgagtattctcataatttatgttcatccaactaagcaaaattctttcagaatcagaatatatgttgctggatgcaaaacaaggattgacttttggtgtattttgcacacatatggggggcatattattgctgcagtatggcactacacgggatagaaccaaaaccttgtatatctgtagaaatacatctgtccatgcccgtttgctccaggcttcaaatttagacatttctataacaatagaacat

SEQ ID NO: 476337 - DNA, 1000 bp, Homo Sapiens; identical to SEQ ID NO: 344747

SEQ ID NO: 476338 - DNA, 1000 bp, Homo Sapiens; identical to SEQ ID NO: 344748

SEQ ID NO: 476339 - DNA, 1000 bp, Homo Sapiens; identical to SEQ ID NO: 344749

SEQ ID NO: 476340 - DNA, 1000 bp, Homo Sapiens; identical to SEQ ID NO: 344750

SEQ ID NO: 476341 - DNA, 1000 bp, Homo Sapiens; identical to SEQ ID NO: 344751

SEQ ID NO: 476342 - DNA, 1000 bp, Homo Sapiens; identical to SEQ ID NO: 344754

SEQ ID NO: 476343 - DNA, 1000 bp, Homo Sapiens
ttttttttttttttttgctgatatatatatttattgacatagaagctcacaacatatattgtttggtgaaaaaatacagatagaacagcacttatatttcatcacttttatctatgcatatatctatctgggtacataggtatagggaaatatcactcatcaaagggttgacaatgattatataagggtggagagatttgggtaatttgtacttcactttttgtaccttttttattgttcaaatatttaacaataaattataccactttcacaaagaataaagctgtcaaggaaatgggcacacacagaaaacagacccgtaggctgcagggagaaggagcaaggacagaggtcaggctatctccctccaatgtgctggtatccaagaccctttctactccaccccaaaagatagccgctttgtggattaattcatgcagttagaagtcccacccccacccccaccccagttttcccactactggatgctgaatataggtaagggttcactgaaacctgggggtggtcccttacagtggctcagagaagtcattgtattcgccaggggccactcttgacctctccatctcagtatgggtcagctcctggagagtgatgatcaaattctcaaaaacctgggccttgtcactctcgttgtcacaggtttcttttgagtggccttcctcaccacaatacgaacagcggattgtgtgttttcgcttcctggctctacgcatctccccaggaccgttattcttatagccagaaccaccactggtggaaggaaactgagccctggaattgtggggggaatcaatgaccagcacttcatcctgaggtctggccctgtctctgaggggaggggcaccccaggatggaagtggagggtcctgagactccaccaggatcacatcctcatcggagtcgtcgagggtatcatctatctctatcacattgcagtcagcactgccgatcactatcggtggggagccctgaaatg

SEQ ID NO: 476344 - DNA, 1000 bp, Homo Sapiens; identical to SEQ ID NO: 344755

SEQ ID NO: 476345 - DNA, 1000 bp, Homo Sapiens; identical to SEQ ID NO: 160990

SEQ ID NO: 476346 - DNA, 1000 bp, Homo Sapiens; identical to SEQ ID NO: 344756

SEQ ID NO: 476347 - DNA, 1000 bp, Homo Sapiens; identical to SEQ ID NO: 344757

SEQ ID NO: 476348 - DNA, 1000 bp, Homo Sapiens
tttttttttttttttttttttttttttttttttgtgagtctacagacagtccttgataagtacagcaaacttgtgcctggtgaggcacaaaacttgggtgtctgcaagataaatgctcatatgaccacagatttgctaaccaacctttgataccagttgggctttaccctcttcaacttgggcacaatcttccagccaaaatgcatctgaggtagaggaggtagaggaggaagagctttcattgtcttgcttcaccattatccagtatggagaaggggccctcacttctttcttgtcgtctctgtgaatcatcacgtcacaattaatgtcttttcctacactaatagtatggttcttcttcttatatccatgccagtctctggagatggatattggtctccttgcagggtgatgcacagttgaccacggatatctataatattgaagtcttttatctaaatctacattttcattatcatcactgcttgtgaaagattcatcttttgccagctcaattttctttggtgtgcttgttactgggaatttggcctcagggattaaatcatatatttcttgccattcttcaggaatgttaataaaatctcggtaaaccttgatttgtagcactgttccaatagtgatatgttgcaaaagctgtaaaaattctcgaagagtatatcctaacacattggcatggccaacactaatcagaacatcacctccttcctcttcaccttctgccatgattgtaagtttcctgaggcctccccagccatgcttcctgtacagcctggctggagtttcccgtcgttggctgcagcccccttcctgatgaggtgggtgatctggaggtagggtccatgctggatgatgatgaggcctaatcccaggctacccacagtgagtttggtctgctgtgttttgctcaagttgtgtacagatgttttgaccttgttgctgactcctctttcttttttgtttttgtgggaggccttctgca

SEQ ID NO: 476349 - DNA, 1000 bp, Homo Sapiens; identical to SEQ ID NO: 344758

SEQ ID NO: 476350 - DNA, 1000 bp, Homo Sapiens; identical to SEQ ID NO: 344759

SEQ ID NO: 476351 - DNA, 1000 bp, Homo Sapiens; identical to SEQ ID NO: 344760

SEQ ID NO: 476352 - DNA, 1000 bp, Homo Sapiens; identical to SEQ ID NO: 160991

SEQ ID NO: 476353 - DNA, 1000 bp, Homo Sapiens; identical to SEQ ID NO: 344762

SEQ ID NO: 476354 - DNA, 1000 bp, Homo Sapiens; identical to SEQ ID NO: 344763

SEQ ID NO: 476355 - DNA, 1000 bp, Homo Sapiens; identical to SEQ ID NO: 344764

SEQ ID NO: 476356 - DNA, 1000 bp, Homo Sapiens; identical to SEQ ID NO: 160992

SEQ ID NO: 476357 - DNA, 1000 bp, Homo Sapiens; identical to SEQ ID NO: 344765

SEQ ID NO: 476358 - DNA, 1000 bp, Homo Sapiens; identical to SEQ ID NO: 344766

SEQ ID NO: 476359 - DNA, 1000 bp, Homo Sapiens; identical to SEQ ID NO: 344767

SEQ ID NO: 476360 - DNA, 1000 bp, Homo Sapiens; identical to SEQ ID NO: 344768

SEQ ID NO: 476361 - DNA, 1000 bp, Homo Sapiens; identical to SEQ ID NO: 246601

SEQ ID NO: 476362 - DNA, 1000 bp, Homo Sapiens; identical to SEQ ID NO: 344771

SEQ ID NO: 476363 - DNA, 1000 bp, Homo Sapiens; identical to SEQ ID NO: 344773

SEQ ID NO: 476364 - DNA, 1000 bp, Homo Sapiens
tcgagtcagaaatcaatgtttactgcagagaacacagaagccagcaagcagtaggcaagggaggcgtcgcagtgagtgtgtcgggcaggctgggaaccagcgcaacggcccacgtggaccgaggactcacgcagagcaagtcacagaaagcgcagctgaaaacaaacggatgcttatcccagatgcacaggacacttaccaaggactgatggtctatcagagtaatgctcagcagctttggctggcaggacagttaaacttttggacaacagaaagtaactgggaaatgggacatctgccaccaacacgagaggccaagaccacagctgttacaggaggggtcagcgccacagtacatgggtggcggcggcggctgcacatgcatgcctggggaatgtgagtgttcagacatgccaggcatccagcctcaccaggaaacaggcacacggggacacaggcacaaacactaaaaaccctcgctgaatccatttggctgagcggtggccacgggagcacggggctgccctcctcacagacctgcacctgggccccagggcaagacgggcgtgggaggtgcaggggtgcgggtgtgggcaggggctgccggagaggggcgtgggaggtgcagaggtgcgggcgcgggcaggggctgccggagacagccgtgaggggtgcgggtgcaggcaggggctgccggagacgggcgtggcaggtgcaggggtgcgggtgcgggcaggggctgccggagacgggcgtggcaggtgctgccggagacgggcgtggcaggtgctgccggagacgggcgtggcaggtgctgccggagacgggcgtggcaggtgcaggggtgcgggtgcgggcaggggctgccggagacaggcgtggcaggtgcaggggtgcgggtgggggcaggggctgctggagacgggcgtggaaggtgcacgggtgcgggtaggggctgccggctcagaggcgtgtccaggaacccccgtcaggccagagc

SEQ ID NO: 476365 - DNA, 1000 bp, Homo Sapiens; identical to SEQ ID NO: 344774

SEQ ID NO: 476366 - DNA, 1000 bp, Homo Sapiens; identical to SEQ ID NO: 464669

SEQ ID NO: 476367 - DNA, 1000 bp, Homo Sapiens; identical to SEQ ID NO: 160994

SEQ ID NO: 476368 - DNA, 791 bp, Homo Sapiens
tttttttttttttttttttttttttttttttttttttttttttttttttttttttttttttttttttttttttttttttttttttttttttttttttttttttttttttttgctgcacacacagatgtttattgttttccaagctccctggtgttaaacatgcagggtcagggggctagcaggctgagatgaagctcctctctacttggtcttcttatcgtaggtgccagaacccttgtaaccactcacatagcctgtgttgtcagtcatctcttcccgtcccgcaatgcccttgcccttgccactctcatcaaagagctccttgtgggtgccggtgtacttgctggtgtctgtcaaacggtccactgcacccactgttgttgctttagtagcgccagtggtggctgggtctttgccctccatgagtccataaatgttctccaggacttcatctggactcttccctttgaagcgcttctggcccagttccttcactgcctctttgaactgttgaaacgtgatggttcgggcgttcttggccttgactttgctgaacacgatgtccacgtccgtggaggtgactgtcttgccatccatgatgccacagtctttgcacagcttggagaagttcttgttgttcatttcagtgccactgcttgatgattctccaaacgcagcaaaccgatggaatgttttttctgcctctgatgccatggtcagctagaggtcggggagggcagtcgtgggagacacttgggggtgaaggagaagggggagggaggacttagagt

SEQ ID NO: 476369 - DNA, 820 bp, Homo Sapiens
aacgttcaaccatcctttattcgctggcttgtcttcccaagcctaggtcaggaaccaaaccacatttcccagcctgctgtgcatggttccgtccatcctagaagtcacagccatccacccattcagtgaggtcttttccctggcagtgatgcctccaggcctcccagtaacccagaccctgaggctcttgggttatcttcatggcacagataacggtatccttgagattaggattcaacaaatctgagcagtacatccggcacacgttggggacgttcggggtgaggttgctgcaccacctccggctgttgatctggaagatcccgttgttggtgctcccatcagcctcgtagtccaaagcagctgcgttgaaaccgcttgtgaaataagcaaggcagacccagtcagccaggctgtatccccggtatccgtccagcccgaagtcatgtagcactctggccagttcacaacgaccgtagagcttggcctcactggagggtagcaggcagctgagcagacagaccagggccaacaacatgatcccagctgggcaccaccgccttctgagagccctgctcctggcttctatgccggcggcagaggtggagccaccaccactctggctcagagctgagctttgggatgacaggcagctcaccagcctccgtggtccactcacagaaggagaagaaacagggcttgagtgcaccctgatcaggggtgctccccgcagagctgagaccatggtgacaatggcagcagcagcagtggctcaaaaccctgcttcagctcaagatgtcccccacaaccttgccagggc

SEQ ID NO: 476370 - DNA, 1000 bp, Homo Sapiens
gctttaaaagaaacagtatttattaagaaattatatgttgaattctcctacagtctgtgaagatggtttcttccatttccacagcacaagacaacagctaagattatctggaaaacactggcaatgcttgggaatggagagttcctaggaacaggaggtgaaatgacatgatgtatgcactaatttaaacttttggatccaagggcaagacagtcttttccttggcaatctagtccttacttgtccatggaatctcatatccagactgaagtaataattggatcatttagttcagtagagcggagcatgctcaacttaatcacagatcaaaccaacagttctttaactattatatcacatctgaaatatctgcattctttattaataaaaagggtgcttatacagggcagaaatataactttttcaagtattttatcattatgatctgaagtactttaaactataaattataaataaattataaaaactagcataagatgcatcttttcttacatgacattgttggaaataagctttaaatacagaattgcaatatcacctgactttatatatgatcaacagtgaaacatgctaatcataaaaatagcttttacaaatatacatttgtatatagtgtctcccttaccattcataaatgcctttcacattttaagactgaaaaaaaaaacataattagcaaaggggaaaacacatttacaatttaaaccataaaaacctgacaattgtacagcttaaaacatagaagaaatggaatttctaaaactgagcaatactgtccattttatttatttgggtttttatataaattgaaccaaagatgctgctgtccagtaagaaacctcctttcacatttctgggggttgtcacagtttctcttttctgctttgcggcatcatgcgttatttcagatcactttatctgtagaaacagctcatgacccccatcttcatcgaagtcctcctctatcccatctgtcatc

SEQ ID NO: 476371 - DNA, 1000 bp, Homo Sapiens; identical to SEQ ID NO: 246602

SEQ ID NO: 476372 - DNA, 577 bp, Homo Sapiens
tttttttttttttttttttttttttttttttacaaagaatcaactttattgaacattcagggtcagtttctcttcttgctcttgcctgtgaccttggctggtgtgaggactggagctgctgcctggtacagggtggaggagatcttgttgatgtagtacagaccaaccatggagaagatgaagcaggtggtgacacagactcggtggatgaggccagatgcaaagagagccaacaggaggcacaggagaatctcagggaagatctttgcttggaatcctttgccaaagacaagattctccagattattgaaggcagtgagcgagaacacgaagagacccgaaccaagcaggccgccctggatggtgagccactcggtggaggccagctgacggctgtacatctgcatcccagcaaagagcagcagggacaggagggaggagagcgccagcgaggtgcccgtacccaccaccatcatgccccgcccgtgagtccaaccggcgcctctggccaagaaaggcgagctgaaccgggtgcggttagctatgcgcatgcgtcagcgcttaccgcggacttgct

SEQ ID NO: 476373 - DNA, 876 bp, Homo Sapiens; identical to SEQ ID NO: 344778

SEQ ID NO: 476374 - DNA, 1000 bp, Homo Sapiens; identical to SEQ ID NO: 344779

SEQ ID NO: 476375 - DNA, 1000 bp, Homo Sapiens
tcacttcttagtactgccacattggcgattaaatttcaacatgagctttggaggagacaaatatttaaaccataacatttgcagagtcttgaatatttggttatcagcataaattagcatcaaaggactaattgcggcatagctattggccacaataacctggagccacactagcagagaatcatttatccatgtcacacctcctgaaaatgagaacgtaaagtccacccagtatgtgaagacaaaactcaccagcagtaagatagcctgggaggctcttttcactggtgagactcggggacaggctggctgtgtgaaggcactgagatagcctcttattgtctgtataaaataatcaccatgtagcctcttgagaggaccatgaaccctataaaggtgacatccctcaaagtcattagtgtgaaaaacagtctcctgtgggtgtagctcatgggcaaaaaggaacagtgctgtatgacaaacagaagactggccccgtttcactgggggtagccgcagtgtacagcagaagattacaccaatgaacatgttgaggacccatgagaaaaggaagaatcctaagatgtgacttgcagaaggatgtttgagctttgccaaggagaagatgctggggctgatgatggcctggagcacactcaggaggcagggggtgcagatggagaggcccctcatcaccttgtttaaaaagacaatgaccttatacctaagatcatcctgagtattctgtgaaccaaagaagtctaaggacaccaatattgcctgagtgaagagcagcagtatgtggatgagagacaggtgactaattatcatgtcaatggacttagacctgtgactgaaaacaaaggtgaagatgtggaaaagaagaaggatggtgtttgctgaaattccaaagctggcttgtggataaaagaagatttgtatggtaataaaaccaggaagtttgatcatcttagaaggaaaattaaagcaaaggatatct

SEQ ID NO: 476376 - DNA, 1000 bp, Homo Sapiens; identical to SEQ ID NO: 160995

SEQ ID NO: 476377 - DNA, 1000 bp, Homo Sapiens
ttggttcatgttctttattgaacaccttacatgggtatggacagggcctatgggtggggcaaggcagcaatgacagcctcagtgaagtcatggcaagtagcatagccacccatgtcagaggttcgaaccttgccaactttgatcaccttcttcaccgcatctgcgatcatgctggagtgatactcaagattaagatgccgcagcatgttggaagccgacagcagcatggccgtgggattggctatattcctgcccactgcctgggcaaatgggtgccgggcacccgtctcaaagactgcgtattctgcactatagctctcaccagggaccacaccagctcccccaaccaggccagcagccagattgtcaataatgttcccatagagattgggcatcacaagcacatcaaactggtaaggattctgcaccagctgcatgcagcagttgtctatgatcattgtctcaaatttgattttggggtacagttcagcaacttcctcacagcactgcaggaacaacccatccccaagtttcatgatgttggccttgtggacagcagtgaccttgccccgccccttcttggtggcatagtcaaaggcgaactttgcaatccgctgagacttggctcgtgtgacaatcttcaaacactcaatcacaccccttgcactctcatgttccagagagctgtactccccttctgtctgctctcgaatgatcaccaggtctagattgttgtgccgagtcatatacccaggaagtgacttcacatggactacgttggcaaataagtccaacttacgcctcagccgcatatcataggaggctagctcccccttatactccatcggggtatgaatctttccaatgatggccactttgttctccttcatggaactcagcacctgctccagcttctcctcagatgccatattctgcacctcactcaggtggtgctcctggaactccactgggacagcggcagccttgaacacctccttga

SEQ ID NO: 476378 - DNA, 1000 bp, Homo Sapiens; identical to SEQ ID NO: 160996

SEQ ID NO: 476379 - DNA, 1000 bp, Homo Sapiens
agcatctggaaactcggtgtgttctgatgtctgctggcgaatagcgaattgacaccagagcaagttatttctcaggtatacggttgtttcatccttgtaaatagttccaaagggaaacagtgttttattttaaggagtactttcaaacctattatatgagggctgctgagtactcagcacctgtggtcagaggcctagtgatctgtttgctgtcattctctgctttttccttggtgctttctggaggacagcaggttgaggatgaaggaagggtcagttccaggctcagctgtggcctttagtcagctgcagatcaatttgatgggtaattcaggggaaaaaaaaagttgacctgggtcatgcttggtgacagccagaacaagaccaagatgatacagtgataccgtcataatcccagatttaatataattttcataattgcatattagtactcgagacactatagctagaaaaacagcccctaataagtcattttgcatcaaatgtactaagcagagatcatttttcatgattcctcagtggtcctaacaattatgttcattgaaagtactgtcgtgaatgtaattgggactcaggcacgggaggaaaaataccctaagcttggttttttcttcttttcttcttttagagtttgcagattttgaccaacagacatggttaataagactatgcttttttaaagcctatattttatatttattttattttttaattttgttagtgacagggtctcactttattgcccaggctgtaactcgaactcctgaactcaaatgatcttcccaccttggcctcctgaagtgctggaattacaggtgtgagtcaccacgcctggcctaagagtatactttaaacaaattttttaaaatgtgtgttgatacattttatagatgttcatttaatacactactgttttaggaaagcgattgcagctcagttttctgaaatctggcaacaaatgtgtggatatattagagat

SEQ ID NO: 476380 - DNA, 1000 bp, Homo Sapiens
ttttgttacatctcactactaattttatataaatatataaaagtgaatagccccatcctctcttgacctcaggggcagagtctttgaagtaccttcttccctgctattaagcactgggtggatctgactgcccagagagggcactgcctttccccaaggtcacacagcaatgaagggagacagatgcaggagaggggacctagatgggcaggcagccctgcaccgtctccttggagtcctgaggggcccgggcctcggctgcatgggagaactgaaagaaaggagagggggttgtggggcctgctggacacacagagaaaagttggttccgcaagcaggggggtgggtcccgagccccagcaccctgagctgcaggcacagccaagcagaggcaacatgctgcacagagcccaccacatgggtgcccccagcctctccccacaagtcctcctgagccatcagaggctggtgtctcggtggcagctgcggtgtacaagccagcaacccgcagtcctgggcagtgttggtggctgcagcaggccccagcgttcagatgagccgctcttccggcggcaacttgaggttgggggtcggtggcacgcgggcacccacctgctcctcgctactgggccggtaggtgccctccgtctgccgcttctcccgaagcttccgcaccaacagtgccagccccacagccaggagcaaggcagccaagagggagaagaccacgatgatagcagtgatggcttctggacgcaggttgccatcggagctggagctggtggatgaaggcaaaacagtgctattctcatttgcagaagtggtctgtatttgcccccaggctcggccccagcgggccagcaggaacggcaggcccagcgccagaagcagccccagcccggggttcgccatgggctgggtggcgggttggcagcgccgaggaaggggcttctcgcgctcgcccctcctaccgcatctccggccaggggcacctgcgacg

SEQ ID NO: 476381 - DNA, 1000 bp, Homo Sapiens; identical to SEQ ID NO: 160997

SEQ ID NO: 476382 - DNA, 1000 bp, Homo Sapiens; identical to SEQ ID NO: 344785

SEQ ID NO: 476383 - DNA, 1000 bp, Homo Sapiens; identical to SEQ ID NO: 344786

SEQ ID NO: 476384 - DNA, 1000 bp, Homo Sapiens
tttttttttttttttttttttttttttttttttccagagagattgacggattcattgaatatcaacaggaagaaacggtgggaaaagaatgacatcacgttgacaagcgcccatgtcccctcgcccctgagtccagctggtgaagcaccatgctttggctttccctcccgcggagcggtgccgtcctccctgggtctggtcggatcttcgggaagctggatccaggaaagcattccaggaggtagggccctggggctggtggactgtgggtcttggtccctcacagaatgactcaggggatcttagccgggctcgaactctcctctctggccattatggaattttcaggcccatcattggccagagacctaaattcagttcaaagtcagagaaagtttctctttggctgaaggacaagaagaggggaggctctgggtgccatgctagggaccagagggtcccctctcctttatccactgctgacagtcagtactccctattagaaccaagagcaggttggaggcgtcctcatgggtgttcaaagggcaacatgccgaacatgtgtggtgtgtttgcttgtgggcaggtgggggcgggagcacatctcacatgggaaggtccctttggtgtgagggtccctcaaccatacagcacaaagtgaccacattcaagggcctcatcgccgtgggtgaagcctgtgaggagacagaaccacttccctaggacagttttcattagtaacatgatttcaacatcaccgaaaagggagggtgccatttcctgcgatggttttcgttactgccctccccacctggaggtggttcttgaggcctgacaggctcttttggggaggagacccaagctgtcatgctgaggaggctcccaagctgcagcccctcggaggtgggggaataggcagggagcttggggagctaggaggaggaagaggtgggagggggaggacaagcaccgggccgggccagggaggttcccattgcct

SEQ ID NO: 476385 - DNA, 841 bp, Homo Sapiens
tttttttttttttttgagagggaaatctttattgttttctgtataaaaatgtccatcagatgaaggtcaaaggggttgggggcagatgcttatgcgggaatagcgaggtggcagccccagcagcctttcagccctctctcgtgcaggccttgctcggagtcccaggagatccacaggtccggcatgaacagtgagaggtcagaggtggaaggctcagcaggagaggagaggaggatcagcagaggtcatgagaaggccagaatccagggtcaggcctggtcgaagttgagtttcttagctggaggagtttctcctagcccttcaatatccaccacgtcactgttggcatcggagtcgttcagagcactgagtgtcacatcagccttctgtttctttatggggggacccccggcctcagggacactggagctgctgggaggaggggcagctggaggaggtgacaagacaccagatgccaccttcttgggccctttcttgggtgactcagctggaagggggatgccagaatcttcatataccttgcgtttcacagtggcctttatctgggccactgtccgttccttgatgacacagctgatgtgattaagatcgtccccaaatcgcttcacagcagccctcagcatctctatttccgtctccgtccacttcgcgcccgcaggagaagagtcggccacgggatgcagctgcatcgtcagctccccgagcttcgtgaaggcggcgccggccgccgagaagatctctccgacctttgtggacgctgacgtcatggccccgcgcgcctcctcacggagacgccgccgccgccgctacacgcgagccg

SEQ ID NO: 476386 - DNA, 720 bp, Homo Sapiens
ttttttttttttttttcatttaagtgttttattcttttatcagtttttgggggccgagtgagacccaggatgcctcaggccctcagggggcttgtgtcgggggctgggggctgctgttccgacggaagccgagagcggtcgggtcctgaggggtgagcaggggttggggactgagggtcccagctcgtttctgtgctccgtccttggaccccacgggctggaagccgggcaggctgctgactgtcacacgttggtcatccatgcggcggccctgggtactggccagcatgtccatgaggctgtccatctcgggggtggggtcgctctggctcttggtggtctggcccggcccggcttgcagtgaacagcgctgtccctccatccggtcgccctgcacgtggctcagcagattgaagaagccctcctggtctggggagcccgcctcggcacaggggcctgagccttcctccgtcttctcctcctgatccatcatgtccctggactccagtcacttttctgctggcctctgccccggcccagtgccagagagggccttttaaacgtccaggacgtgggggtgtggattccccccatccccaaatccccagctcatgccccatctgctcccacccaagcttaagccccataaagatcatccagataattgtttgcccacaacgatgctggatctggcatggtgggtagggggcagggcgacct

SEQ ID NO: 476387 - DNA, 946 bp, Homo Sapiens; identical to SEQ ID NO: 344787

SEQ ID NO: 476388 - DNA, 1000 bp, Homo Sapiens
ttttttttttttttttttttttttttgcaggtcaaaattcttcctttaatgtgattcatgttattttaatgacttttaggtcaaactcagattcccagttacaggtgcccttggctagttttatctgtgtaacatttgaggctgcatatgtgatcatggtcttgggtttcatctgagatgttagaagccatgtctcttgaggtacttggctcgtgcaaggacatcattgcagaagtcacagctcaggtcctggctgcttcggacatagccagcacccccactgtaggcacagagtccacctctcaggtactggtcaggggtccaggttggaaacctcctctggatttctttgattctagtagtcagaacttcagttgtctgggaaacctgagactcactaatccaggatgtgggagcttgagagccagggtcctgcaccatgctagtcctatcgcccatgttgaccagaattttgtcaccgggagacttcctggacaagacaccagcgatcacggcaggatccatgcagtacttttggccaatggtttgcatcatgggttgatatttcaggaggtatggcatgtctatttcagccagcctttcagaagcacgaactccacagtagttcaggccgtgacgtcttccaatcccacaagatgctccaggggtgtccaggctttggatgtttccatagcatccccagttgctgctttcagacaagtccatcagggcaaggaggcccagcagcagccacaatgcagacatgatgacgatctggctctacggctcctgaaacacctctctccactgagtactttggaattcccaaagcactgtgtaagtttgtaaggcataatggaccatgtcttcttcagttcatcaatttttctgtcttcagtcagtgctcctccttagaggtggtgagcccacagcgatttatatagggtcctgttctcttgttaaaagtgttcatctcatcctattttggagagatttatga

SEQ ID NO: 476389 - DNA, 924 bp, Homo Sapiens
ttttttttttttttttgctaataatcatttattgtttgtttatatacaatagaaacctcttttataatgggtgtgggataaggatgatgatggcctatggggctccctgtcttacagcccttgtcctcgggccatgatttgacctcagaatgacggtgactctagcaaggcactggggagccagactctgctgcatttgtgtgcaaatcccctacgagtttcaaatggctccacgcatcaacaaaacctcttagttcttaagaaaaggagacagaagagatttggacactgaagagaaacacagccatgcctgagctccctgctggtaggaaaatgtgtgcctaaggttgcttttctctcaggtttccatatttttgtttcctcttgcggagctgccgctggagctggagcttgttggtgaagaacagctgtctccagcctgtgtcctccgccagggccctcacgtcaggagtgatggtgtcgcaggtcgactggactatctgttcccacagtttatcagacatgcacagctttgcaaatctgtgtgatgtttgacaaagcctggcaatatcttcaagatccagataagaaatgatagtcaggagcaaatcgtctgagagccgttcaaggaagtcaaatttacctttgcaaaaattgatgacatagtctaatattcttgcaccaaatattaaggcagtttgaccttgaagatgtgaattctctaggaagtcttcatgggtttcttttgcttctccaggttttgttgatcgatactcactccttagagagatcttccaccatctaaagattacctgagaccgggtgaccagtaactggtaatagtctttgctaggcggcgggccttgtcctacagtttcaaagagagtctccggcagccacgacgccatcttgggacgccccgct

SEQ ID NO: 476390 - DNA, 1000 bp, Homo Sapiens; identical to SEQ ID NO: 344788

SEQ ID NO: 476391 - DNA, 1000 bp, Homo Sapiens
ttttttttttttttttttttttttttttgttttttttttttttttttttttttttttttttttttttttttttttttttttttttttttttttttttttttttttttttttttttttttttttttttttttttttttttttttaaaactaaattatctttaatgttaaaatttaattgactgtgtatgtaactgtgcaattctgctttctcacagaactgtctagggttcattcaacagatcatagaaacgtggtctggcatttaacaaacagactaataatagaagagatatactaatttatacaagaattaactaaacactgtcatgtggtttagtgtagctcaagttatgcatgtatcatataacataggttcaagttcttttgtcagtcaccagaataacagaggttgaagatacatctgaataagtgccaactcttgctgcagctgtttcaaaaaaataaatttaagtaattgcgatacacatttctacaaataaaatattccagtgcttacatcaatcctgagtttttaagataaaatatgcactacttacaattaccacaatattattttggaacatggcaatttattttttaagttgactctcttcaccaaaaagagggctttcattatactcttccaagtcctcacactctaaaacaaaaagtctagttcactgacaaaccatcactttacaactcacattttaaagagagtaaattaaatgtcaaaaggaaacagcttttaatattcaaaggatgctggtcatttatttcaaatttaaaaactgtaatcagtacatggagctccaaatacttaaaatttttaatgccagattttagtgaaatattattatagcaggtccaacagtcatgtactttgcttgaagaaaatggtttgatgaatatgttatggtcaagatggagcaaaaacagaaaaagactggtagtcttagatcatgaaataccatattttttcaccagatagtgacccatt

SEQ ID NO: 476392 - DNA, 1000 bp, Homo Sapiens; identical to SEQ ID NO: 344789

SEQ ID NO: 476393 - DNA, 1000 bp, Homo Sapiens
gtttttttgctgtcataaattaaatttattctctggagaacatggttcttggtattgacgtgaatgggagcagggcatttggggactcaggaataggagatggggggcttgggtgccaaataccaaggaaagccttaaacggactccccagagattaccgatagcattagcatctcatggaggaccccccgcccccgaccaccagtccccctttacttcttcttcttcttcttgcgaccccaacactgggggcctccatcctctcttcggctcctccaggtgggcatgggaggctccagctcatttgggcggcccccccggtctggaacgttgcccataagcacgacaggtcggctcgggcagccagaacgtgtgcaatggagatgtccgattctggggtcagaacctctcgaattgggatcagcactgccctcatggcctctccttgggcctctgcccggtcactccagtggaaagcagatgtagtgaggtcaaggcgcttgaggaggaggcagcggcggcagcggtactgatctctgaggctttgggacagagactccaacgcttcccatctgggtgcatctagcgagcagctgaggaggggctgcagggaccctgggggcagagaaggctgcagctctgagatcttagcatgcaactcctgcagcagctggctggcgggggtccctggtgcaggtctgggcagccccagggcttggagggtaaggtccagttcttggaccatgccggctccctccactaccccttcaccaaggggtggcctaggactcggatccagcagagagcggaggcacaggaggcgggtggcttggagctctgagcagagaaagcgcagcaggcgcagtccggcaccgggttcccgaagcgcagccgcgccatccccgccgcagagcgcgcgatccgggcagtgcagctcccgcagcaggctgccgagctgccgcagaaagtcctcctccgcgccagggccgtcgccggcgct

SEQ ID NO: 476394 - DNA, 1000 bp, Homo Sapiens; identical to SEQ ID NO: 160998

SEQ ID NO: 476395 - DNA, 1000 bp, Homo Sapiens
caacaaaaagctatttcttatattcttttattctgcgttgcatccaaacattgtttcactttgatcattcatctccataaaatttgaattgctaaataaggcctactccctagataccaaactccatacctaacaaaatggcagtttacaaaggtcttagatactatatcccaagaagtatatgcagcatagaggtggccaatattcagaagctacattttcttatactgcccaagtgatcatgaataaccaaaacatttgaaatgaattaaaattacttatggtcagaaatgcacttgaggataaatcccaggaatgcaaacacaggagaaaaaaagtaagtgtagaattcattctgtatcacccagtaatatttgctatagtgagtccattttcaaggcagattcctaggtttttaatgtttgtaatgaaaacctttatgagaggactctgattttgagaaatgccgtgtggaactctgctggtttgtaaaatgagtgtaatccgcatcttcaccatctgtcatgataggtggtggtggccgtgctggcctttcattcttagaatggtgaggttcatcactctcttttgacttggaatttgctgctttagctgtttttggcttccactcggggtcttgctttcttttgtccaaagatgatttctcccgctccttggcttttttgtaagctttcttttcttcagccattagaagtcgagcgatttcttcatcttgagctacttgagcggctctcatgtccacctgggtagccaaaagttcttcttcttgcagttttctggcaatttcagcatcataccattcctgatccctgtgggccattcgtgatggagtagatacagcttctttcatcactcttggcttcattcctccatcttcataatagtaactatctgcataagcacgggttgcagggaactctggaaagtgtttctttctctttttctcttcctgtaactccttttcttgcaaaaggcgagc

SEQ ID NO: 476396 - DNA, 747 bp, Homo Sapiens
aaatatgtaaatttcatttatttttgaaaagttcggaagtaaacaatccttagtacctgtaatgagctattcataataaagggcaaacaccaagaccagtgccacgtaggattctgcttcgtgtttagctgcgacccagctgtcccatgcaatgtcccagatccatctgctggcaatatttattgcttggccagtcttttgaataaataatacttttataatgaacttataacggtggtacccaaattctttgactgctaacagtatgcggtctgccaattcaagtgacaagtgagagaatactttatcatcatatttgacatctttaagactttctgttagtatctgctggactttagtttctactgaatgagcttggaatttcttcaatggctccattctatatgaattagcaaactttaattttgccagggcactcttccattctttacctatatcagcaattgagtcatcaaaaggaggctccacatactgaacattgtgaattgactctctcagtctttctcttaaaatctgtgtatatgcctccttctcgaacatgctaggcctcctttctttcctaggcgtcaccggagcctgctgaggggtctggttcggggtctggatggggctcgacttcacgcctcggcctcgcttctccatctcgctctgttctccaagacgcccaccgcctccccttcaccgccggcggtcaaacgccctagccagtcccgcgagggcggaagt

SEQ ID NO: 476397 - DNA, 1000 bp, Homo Sapiens; identical to SEQ ID NO: 344790

SEQ ID NO: 476398 - DNA, 1000 bp, Homo Sapiens; identical to SEQ ID NO: 160999

SEQ ID NO: 476399 - DNA, 1000 bp, Homo Sapiens; identical to SEQ ID NO: 344793

SEQ ID NO: 476400 - DNA, 1000 bp, Homo Sapiens; identical to SEQ ID NO: 344794

SEQ ID NO: 476401 - DNA, 1000 bp, Homo Sapiens; identical to SEQ ID NO: 344795

SEQ ID NO: 476402 - DNA, 1000 bp, Homo Sapiens
ttttttttttttttttttttttttttttttttttttttcagttcaagcgcaattttgccaccaattggattacgaaaagcctctgggcttccagggagctttggagcttgggaattgctgatgagggactgcgggcgtgcacccctcacgtttcgcggttggggagagggagctcatccgaagtcttcggacagaggtgggcgtcgtgcccgacgctgagcggagcgggtctccttgcgccccggctccgtgcgggcgcggtccctagcgcgccacccgcctccgcgccccagcgcccggggaggtacctgctctgcgctctcctccggcggcgggacgtgcaagtcctggatgacctcgtagacgttctctgagtcgctgcgcgccagaggccgcgggcacacccaggagcccgccacgctgcaggccttgaagctgccgctgcttcctaggaggccggcgggaggcgagacggcggcgcaggccaggtcgttcagggactgcgcgggccgcacgggcgccgcgggccgcaggtacaggcaggctggcaggccgggcgccaggctgctgcgctgggtcgcggcgccgcgttgcgcagggccgcacagggagctggctcggcctccggactcctcgggggcgccgtcggggcccgcggtcgccgccgcgctcacaaaccggtagtcgtaggcgagcggctcaggggccgcggggctcgggtggggacctggcggcgcggcggcggcagggttgcccagcgcgggcagctcgcgcacgtactgcgcaggcaggtagaaggggcggccgccgggctcacgccgcacgtgccaccagtgctcggtgttgcgccgcagcagccggtagcgctcattcggccggatggccacgcggcgcccgtccttgccggtgtactcgaaggggtgctccaccagcacgtacacgtcccccaccacgtccgccgccatcgcagccgcggcgttttcgtcggctgggcgggcct

SEQ ID NO: 476403 - DNA, 1000 bp, Homo Sapiens
tttttttttttttttttttttttttttttttttttcctcaaaataggatttattactaggccctctccctggggtctccctttctggggtctctgggtctagaccaagtgacagggtaagagagagcatgtcccccctgagagcgtgggaccaggctagcccaagtgcagcgcccaggtccagcctccctggtgaggcctgtgcccgcggagccagtggctgcccctgccgggtgccagcgcctgtgcaccctcccctagctcttcttggcctcctgctctcggcgccggagcttctcccgctgccgcgcagccttctcctgggccttgcgctccttctcggcagctgctgccatctccttcaacttgcgcttcaccagtgcccggtcatgagagttgctgagccccaggctctttagtttgcttccgtccagctgcagcagctgcggcccgtctacctgccgtgcagcaaactcagcagcatactgttccaggttgaggctctgcagccactggcccacctgctggctggtccagtggtggacaggggggaggggttcatccaggaactcatctgaagactgagacagcgtgtggtaggggtaagaacatttggcctcctgccagggcccactggggatcttggggctgctgctggggggcgtggagtcatcactcagagtggattccatccctatctgggtggagccgaagtcctggactaggcaccaggagttgctcagtgcctcctgtgcatgagccaggagctgggcctgggaagctgacttcttagggctgaagccctcgtgtttaggggagcaggtgggggaggtggtgctacccgaggatgctgagcccttgccgctgtccgtgaaccaggaaaaaggcaggaacggggagccccctgacctgccggacccctccactgactccctgctgcccatggacagtcggttgctgcctttctccttccggctcttgcccgtggatgctcggcgcag

SEQ ID NO: 476404 - DNA, 1000 bp, Homo Sapiens; identical to SEQ ID NO: 344796

SEQ ID NO: 476405 - DNA, 1000 bp, Homo Sapiens
ttttttttttttttttttttttttttttttttttttttttttttttttttttttttttttttttttttccaaggacactcagaggctttattatccacccctacccccgccccacctaccctaccacaatgatatatgcttttattggaatcaatccattcagaaaatgatgccaggatctggaaaataagcatcttttttcctggtattggagaagctaaagttcttccttgacttttggtttcttcttttgcactggaggtccctttggcttagccaccaccaccaccacctcctcagatgttttcttcttcccagcgggctcttccagcttggatacgtacttggtcatgttctccagctcaggcgactgctgttcaggtaaccctttcctcatcataggcacctccttttcctcagctagcacttcctcttctatcacttcattttgctcaacagacaacagctcatcctcatcctcaatcttagttttgatgtggctttccaggaagtcagagaagcccttcagggtgtgttctcccttatacaggacagcttgttgagagccgctggggaacagcctgaagaatgggtaccggtccaggtacatcagctgaatgtcatttgctgtgacatcgatcttggcaatgataattgtggagtggttttgatattttctgcccaattcctccaacagtgggaacagcatcttgcactttttagaccagggtgcatagaacatcacaaatacgtccttttctttgtcaaagacgactacgttgaagttcttccccacgagctgcttaaccagtccctggtcccagtattttggaatctcttcactggattgatgttttgtggcatttttactcaggaagctgcggccaaatttcttgaggctttcgtaggttatgtcatctgaaggcattttgtacctggcgtcagagctcaagtttaggatttggacggatgggatatcgacctctgtgacccggaagta

SEQ ID NO: 476406 - DNA, 1000 bp, Homo Sapiens
tttttttttttgatgtttaatttttttattttaaaaataaaattgattcataaagtgcaagaagaagtcatttctttccggtagtctatatgcatcttcaacaagcaacactccaggaagagccggccatggcaggcggggactgtgtggcaagcctggttctgggcgccggcggaccggggctccggcgcggacatggcaaggtggccatgagggggacagaatggggcggaaggcgcagagtctcaggccaggtccagcttcttctgcgtcgccgccagcttgtcctgcagcctccttttcctccagtccaagtagcgcctccgcagtcggttcgcctgccagcccaggagtactccagaagcgaaggctactagcacggacaactgcagtgtcctctctgacacatccgccatggctgccgccggcgtgcagcgcggtctacggcgcggcggcggggtcaaaaggcgccgcgcgttcaagggtggggcgtgagacaaaaatgaagcgaaggcggcgaggcgttggatctctcgaaactcactaatagtcccatctgtctcgccttcaactgaagactttcccaggctttggacgaccccaccttccactttcctgaacccccacatttcttgttgatgccttacatcattagctaacattgggggcgtatcttgctcacccgactgtaagctcttcaccgctctgtattttctctcagcaatagaatgggagtgactggcgtaactttaaattttctggtaacccctgtttaggaccaccatcctcaaggaacttccacatgtttagctatccagaagctcaatcaaacccaatccttttggtttttacggaagcttcattacataggcataactgattacatcattggccattggtgatcaaattaaccttcaggtcctttctcctccctggaagcactctactgcttccaacaggtccaagctgccatcgcctcttttctgagtgattgcaatag

SEQ ID NO: 476407 - DNA, 890 bp, Homo Sapiens
ttttttttttttttttggagatcgcacactttattttgaaaaccaggccagggacagctccagtttggggggaggggaagagattataacttttaaatctactacgaaaatacaaaaagaggaatgtgacagggttccttcctgtgttatgtcaccgtctgtaatcagatcccacagtccagcccagaatcataattcacataacagcgaaactcatttgccaagttccgggtgtgtcttggaacaaacgtgcacatcttcactccaaggagttctgctgcctgttcttccatgatggcacctgtgcacagcagaatcttgccccgcgtcaggtacttgacggtttccgatgtttttctgagacattcctccgaaagatagggaggatctgctattacgatgtcaaaactatgtgcagcaattctttcgggtaagtccaatggattattgtaatcatagaaaataaactcctctccatacatggcaaatcttttgtcatattcaaagatgtatatcgaaaagttttctctgcacagctctctgagtttctggtaaacactaggggcactcacacatgcgattctgccaccttctcctacagctgcaattgcctcctgtgccagctgcagagcagtttcctgactataccaaaactggctcagttgccaattctcttctattattccaatgttatatttatcatcctcgcctggctcaatttgttgcttttgctcagcataaaattcctggagagctgctaaggcatgggcagaaagctggggtgtctcatcatcttccaaatcactcatttcacaagttgtttataacccagtccaaaacgcctcggcggcgcgcagccaaccctacagctgcgcccgaacccgccactc

SEQ ID NO: 476408 - DNA, 1000 bp, Homo Sapiens; identical to SEQ ID NO: 161000

SEQ ID NO: 476409 - DNA, 1000 bp, Homo Sapiens; identical to SEQ ID NO: 161001

SEQ ID NO: 476410 - DNA, 1000 bp, Homo Sapiens; identical to SEQ ID NO: 344799

SEQ ID NO: 476411 - DNA, 1000 bp, Homo Sapiens
aggacaacgtttgtttgtttttattttaaaaagtcaccatattaataaaaatgctacaaaacccagaataaatatcttcaagttacaaaagcaaaacaggtctagaaaagttggctgtaaaaaggcaacagagaggacagacccaaaagataaatgtctgcttgcttgggtggggctggtgctcaaggagggacagttgttggccctctcccccgaccatgccttagaagcatctccgccaggccagtgaatcaggcctgggtgataacggaaaaagttccatgcctgcaggcatcgttctgccatcactcaccgagcttcctggtctgtgttccccttcccagcctcactgttacccgtaaaaatgaggagcccagccgggtgaagtaagaagaggcttggcttcagagccagcccaatctgcgtttctggctcagttcctgctgtgtgagcttggcaggcacgccccctctggttccaggtttcttcctctgtgaagtaggggtgcgaatgtgtaccctgccgggtagtggagcgggttggctgagacagtgcatgcaccactgcacactgccgagtcagtcctaggtgatggctccccgcaggccacctttgggtgttgctagcacagcctggcatagagcagagtaaaggtggctcaggaaaccaaggcacagcctgtgaccaccaggggcgcacctgtctccagcctctggctagatgccatccagaaagctaagcctccattaatcagggagcccccaggggcttctccacagttagctggagatgagggccatcagcacctttcacactcaccccccaacgatgtttgtccctgcagcccctaccgccccctcccctatccatgggaagaatcctgcctccttggtggagacctgaggattgaatgcctggcacggaacaagagctcaataaaagtcattctgcccacggacatcggcacattgggagcagctggcagcacccgagcacagct

SEQ ID NO: 476412 - DNA, 1000 bp, Homo Sapiens
ttttttttttttttttggtttaaaatatttattgattaaaaaaaattaaaaattttttatacaaaggtgatgagaaaaaatctcatgcaaactccgggcatacaataaaaataactcaaatattaatatgatgattttgtacaaaataattcttttgaagtaggaccggtggcaaccaacacggctccctgctccaggccgggacgcccctctgggaggaacgcgcggccacccttggaaacctgtaagtgatccacggtccaggtgtggaatgctcacagttgtcactatgatgaatgatgaaaaccctattgctgctactcagaaacgagactgagacctagggacagagtaaggaattcctcaacactgcgggaatcctggaggaacgaagtaattcacaaaggttttcagaaaagttttcgccaatcgtcttaggtgatgacacaaatgccttgagattgttacagaggctcccgttcctgcttccccacagtcctgcagtggattgataatttgtgtatattacaagtaatttgcataattaaaacaattaagggatcgacgtatcacggtgattagaaatgcatcaaactctgaatgtacaaaagagagagcttcaatatgaaacagtaatcctctgagaacgaagaccccgcagtgccggtgcccgctgggccgtgcaggtctcggccgccccacgcccgtgtccgtctccaccgtgaccccctcgcccccggcacgcccagggtcaacccccgggcttattgcattttttcacaaactcatctcattttccgcagccttagtctgttttccttgtcccgtttcttaagaataagtatgaatttgttgaaaaaatgctcctggtcctttcttttttgaacaagtcggaacctctgatcccggccgtatttctctgcaaactccttaaacgtggtcctgggagacactttagatttctctagaagtttcttgaattcttctttggctagcagca

SEQ ID NO: 476413 - DNA, 767 bp, Homo Sapiens
tttttttttttttttctttttttttttttttttttgtgatcaaatcgcatgctttattgaagaactaagaaaaaagagcaatggaaaggatttcattagaatgcgttttccatgtggctgcttgaaaaaattagagttcttcgctaattcacaattaatcttttgttcttgactggagtcacactggttctttgcaaattatgaagaaatagaagttgtgcgtggtgtgatttccaaggattccgacagtgagatttccgagggcgaagtgccttatatctcgtaacaggcttctgtattacactactggatcctgagttgatgaactgagctccgggatagttctgttttaggcgaggtaaaggcaggttctctgagcagtttctctatggaaccaccaggtagatctaacaagcagctgcagttctttgaggataagatttgctttgctccctctgttactgggtacatgtggccactgaatagtttcatctttcgttaaaaagagtataatttcacatgcaattagaagtataccaattattgcaaggccgaaactgtttaaattcatccatatggcatacatcaaccccaacattctggtttcttctttcaacacaatgtgagatgatggcatgttatccaaaatatggtgtagacattagaaaggatgaatggaatctatctgcgtgggccaacagagtgtgatctggcagtcaacttcctcaatttggggcctggcagccccgggagcccggtgggccctt

SEQ ID NO: 476414 - DNA, 1000 bp, Homo Sapiens
aacagtgatatacataattcaatttttattatcaccagtctttatcaatttagctgttctcctattgttcaagaaatgttatttggacaagttttccatagggcaacttgacttcctctttattcatttaaaagttgttgtctccttcaaagatatttagaggttgatctggtgagccctggaagtctaaagtcattttgtggcttcagaggcaggaagaactcccaacagcgatgtgtcgctagcatcttcacaaccatggttgggggtgtcatctgaggttcttgtcccatgtgggtcctctctcttgaggcaggtctccatctcatggaataaattctcctcgagagaacccctccttctggttgaaactctgaggggcagatgtttttgtttctgaactcggcaccacgtgagaaatagaataaacagaaccaggagaaggagcccaaagatactggataaaataagtgctaaatgacctgaggaggcattcagtgatttcagcgactgtccagagcacctcacgccagcatcttccttgtgtccacagtcactctgtccccagggtttggcgtgacagtcccatagaaatgactcatttcctttgcaccgcatgtcatccaaccagatggttccagttccctggccaaacgaagcgtccctcagggcagccagagcagagccacagcccagctgctgacacaccacttccgcctcggccaggtcccaggagtcatcacacactgtgccccaggagcctgcgtgccagatctccactctcccagagcactcggtgtctcctccacgcactcttattctatcttcacatgtgatccaggtctcttctgctgggctggagattcttcgctcccatggggcagacaggcactgccatatggagatatgcgttttaggacactgaatgtcatccacccacatgaaaccagagcctgtcttagataaaggggcgaggctgacaactccattctccccacag

SEQ ID NO: 476415 - DNA, 1000 bp, Homo Sapiens
tttttttttttttttataatgagtatgtatttattttctaggtttcttacttccagtcatgacaaaataatggtcatcatcttcctttttctttgcagtaggttttttatctccactatctgcatccttaacagatgagggtggtttcctgattgaagctggggttttgccacttctgggaggccctttagttgaatgctggctcttagcgacagtctgtgctgacttcggtgcagtttgtgttttggtagaagactggggtaggctcacgatggacagtggggtacggccaggagacttcaaggagctgggtcctgtcttctgaaatgcacttttattctgaggctgctttttggtagctgaaactatattcttatcttttgatttctgtgtggcttttacaggagaaactgaggacacagaaactggctgatttaaattcaaggccgatttaagtttctgtgctgggactggctttgcttgtggggctccatcggatggttgagactgtgttcctagacccgtggctatggttttggaactggtttttgtcatttttgcagaggactggaaagaaggtttaggtcttacaggtatatttgctttaggcagcttgggacattttgaggatgaatttgaatgtgcagctaagtgagatactgcattatctctggaagaaatatgattatgtttcaaatacttaggttgagtttttcctgaacacttatttggcaaaagtgtggactcgggcagatctgctgaattctgggctggaataaccttggccttgggggtattgggggatgaaatacattttctcggtgactcagatatacaaggtgcagttcttggtaaagctggtgaagaagtgtttttacctactggatttaatgaagcaagtgaagatgatgcattgtttgaaggagcctgcggtttcttcgttatgccttttgaagacttgagcttgggatgagaagatgctgctggagaatttggcaat

SEQ ID NO: 476416 - DNA, 891 bp, Homo Sapiens; identical to SEQ ID NO: 344801

SEQ ID NO: 476417 - DNA, 1000 bp, Homo Sapiens
tttttttttgatgaaactaaatcagacttagatttatttttggtaaaaaagatttttagcccaagacctcctgctttgctcctctcttagccccctccctcagccattttcaggtcgtaatttgcaaggattggtgctgtttagtggtgttgtggagctggcacatggcctcaagcagcctgatctcatgggtgggttgctcaggctggaacttgagcacccaggaatccttgatgatgtccagaatggtggcacgcttagtggcttggcgtagcatctggaggatcaggttcttgcactcctgggagatggtatggttagctgggaaagtgacctccttctgagtctctcttagcagctttttgagattggtgtcatcaaagggcagatgggcgaccactagagtgtaaaggatgacgcccatgctccaggtgtcagacaggaaagggttgtagggcaagcctcgtaagatctctgggcaagcgtaagcaaagctgccacagtaagtctggctgaggtgggaaaagcagttcacttggcggtaagaagggctacaacccacaggctggttagaaggcaccatcttggcaaagccaaagtctgatatcttcacattctcccacttgtccagcaacaggttctccaactttaagtcccggtgcacgatgctcttgctgtgcaggtaggcaatgcccagggtcagctgggagaaccacttgccagcaaggggctcagagcaggccccgtagcgctggatccattcaaggacatcaccaccctgagccagttccagaatgatgtatactcgagatgtgctctcaatggcccgatagaagttgatgaggtacttgtgccgcaagactttcattacctgtatttcacggggcaggaacttgttaagatagtcatcagaggccttcttctttgagatgatcttgactgccaccataaccttctgctttgtgtagaaagcctcatataccgacccataggagccatg

SEQ ID NO: 476418 - DNA, 696 bp, Homo Sapiens
ggtttattctttgatgcctttattgattcaacacatgcttattatatgcctgctgtgtgccgggccccggaccaggcgctggggacacagcagtgaaaatactaacattgtttctgccctcacggagctcacagtgtaacagggagacaaatagacctgtcagtagataacatgaaaataattggactatgtgctgcagacacaatatcccaggtctatgagaatgtcaatacagacttcacgtgggaaatggtgaggcaataaggatcgtttcccttgatgaaatggagcttgcagaagaaggcagggtcagttgtggggagctctgggtggaggtggagggagtgcattccaagctggaggagctgtccagggttctggagacgaaacggagcccgctgggaactgtcctgagccccggtgctgaaacagatcgcggttctcttctcggacctcccgagaggcgctgtccggatatttggtgctcccaagcagtcagccctgctggtctctgctttccagaccgtcaaacttcgccgtctctgtccctttctgggaaaatgtccatgcgccaacctgcaaaccagcctcattcccggcatcccacgtccctcagaccacccctcctcccacgcagctgcgggcctccccctctgtgtgcctcacctgcttccagtcttgttggcagatgcaggt

SEQ ID NO: 476419 - DNA, 1000 bp, Homo Sapiens
ttttttttttttttttttttttttttttttttttttttttttttttttcaaaaacaacttaaaatatagtttaatgctgtaaccataggaaaaaagcatgattatttgtgggaagaacattattaaaagccatattcccaaatacgaattatacaaagatagattatgttacttgaaaaaaacttaaagatttctcaattttactttgagaaattataaaatgttattttgtggcaagtaagatgaagtacagtattatcatcaatcactgttgctatcttatatacaagatttttggaaacatccttttagcaataccctttccacttgagcagcattagaaattttgttcttgttaataggtataagcatgttctaatcctgtacttttgttaaattatctattttattgactttcgtaatagatttttttgagaatattctttttttctgattagagtttaagtagattataatttttcactagaaagcatttaaaatgctgctcattttctatagttagtgtggcttgattatctgacaaatcctgccagcagcctgtaggtctgatacaccttatataacatcatctgcattattattattatagcagccattttataagcagataggaatatttaaataatcattatcagataatcaaatctaacatactcttaagggtaaattaatttaagaaaaaaattactattactaacatcatgattgtacaaccagttttacaattttgtacaacctttagttactaaatctgatttttgtgtatacttttcaaatctttctttaatgcagtgtcttaaaacaaacataaatgcacaagtcaagcttgatcagtttttcagtagttttccagcctttcttgattactaaaaaataaaaggaaagaaaattttgagaagaaagaaaacagtccacttaaagaaatctccctactggaactggttctttatataccatatgcaattaagttattgccata

SEQ ID NO: 476420 - DNA, 1000 bp, Homo Sapiens
tttattagagaaaaatgtacttttctatgcccgtgctttctacgtttttgaaactgatacagatccacagaggtgaactgaaatctaaattatctttaatgttaaaatttaattgaccatgtacataactgtgcaatccctgccttctcacagaagtgtctaggattcattcaacagatcatagaaacgaggtctggcatttaacagacaagtgacagaggagctataccgatttatacaacaattatcaaaacactgtcatgtagtttactgtagctcaagttgtgctcgtatcatataacataggttcaagttctttcttcagtcattataataacagaggttgaagagacaatgaagtgccaactcttccaaaagagttctgacacgattctttttaaaaacacggctagttatcaagttcactttcttcactggaagaaatgatgcaataattgtctttagtgtccttggcagcctttagtaattgctcaagtagcggcttcatctctctcagcctccagctcctaacacctgtaggttgttgccacctcttctgtttttcttgaaatgctttaatttgttcttcctcttcctcttcttcttcttcctcttcctcttcttctgtttcttctccttctcctcctcctcctccttcttctccttcttctcctcctccttcttcttctccttcttcttcctcctcttctttctcctcctcctcctccttctcttcctcctcttcgtcttctactactattacttctgctgctgctgctgcggcttctgctgctgctgcggcttctgctgctgctgctgcggcttctgcttcttctgcttcatcatctttctgcttctctgcgatgtattctttaaggacattcagcaacttccgagtatgtctataatcacgtttctgcctttttagttgtttttttttcaaagcacgttcaattgtgttcttggttttcctgtaagctgctttatctatttttatcat

SEQ ID NO: 476421 - DNA, 1000 bp, Homo Sapiens; identical to SEQ ID NO: 158522

SEQ ID NO: 476422 - DNA, 1000 bp, Homo Sapiens
gaatgtttgcaaaggtttgttaactgtcagtgactgatagaggggaatcggatgaggggagtacatgctgaacaggaaacagagtgaggggggcttgaccaggatgcacggcaatgggaaaagcagatgggagatgcttataatggtacttggtgtgtgtgtgtgtgtgtgtgtgttgtgtggtgtgtaaatgcagaggaagaagtctgaaattaaacactcaggactgccctcagtagtcacatctggggagagatgaggatagtgctgttctatgcagagaatacatgacaatacttgttttctgacgtaggtgcatggatacacaaaccgaaatatgcattaagtatgtcttgctcatcattgaaaaggatagtatctaacagaatggcacagtgtaagaaaatacaatggaaacactaacatcgaactcttggcacactaagaaaaatgacgctcaacttttcactgttgtgaacacttgctttcacttgctatgcacctgatgacgagggtccgcagccatgcccatgttcgtgaaaggtcaccatgttctgcttctcatcatgggcatgtgtcatatcccccaggggagttactcatcatcttcctcagggtctctgatctcttcataaatcaccagctggtttctctcacgcagtctgtgggtccaggcatgtctcccccttttgggtccagatctcttattaatcttctcagaagtatttgcttttcccggggcggcgcagctgtttcccatcgttctgtgggccagatgcttctgacactcccttcgaatcatttccttcctctgctggcttcttgggcatgatcttcgggatgattctctggagcctgccaaaagtcatctgaggacgttcaacctgaatcctgcggttacggtcattatcaaaataattcccctggaagtctgtggcctgtttattacacatgaaaggtgggagggtgacattgaaacctagtttagtcatggcctcat

SEQ ID NO: 476423 - DNA, 1000 bp, Homo Sapiens
aaaaccatatattttattgatgttcttcaaggacaatacagggccatgtgtacaaatgctactcaagtctcacatctggcaacctccccaccgtcatcccccattgaccagtctgcgagcagccaacatcctgtaggtctccctgttgcccttccccaggatgtcaggcctcaccgtgctgagccttcaggaggctggaaatagcagggctggcttctaagcttgagctctggagccaggaaagagtcaaggccaaaattgcccagatcttcccctcctccctctccctcccattgcttaagtatggccagaattgtgggtgaaaatgcccccagcgactcctccattgaggcagcctaggcttcccctcttcagccatctctatcacattctttatttccaaatgacctgccccaccaaccaccaagatggcagagtgaccattttgcagggagtgtgaatcagtgcacagacggcagtgacaaggtgcccctgatggcatgaatcttgtcatcctgttcatcactgcattgccagtgcctggaagaggctgggaacgtagttggcactcaataaatatacgtaggatggatgagtgaaggaatgagtatgggagggagaaatgtgagcaggtggagccaatactacattagctctctagggggtgtgaaggcagaaccacagtaaagtcctcccaatctctgctcaagaacccaggctgttgcgcagctatcagcgggtcactgcagttgggggttggacattgcagggcatggattcagcactgctgcctgcatggatgtcatattggctttgggacccagtcaggaggggtctggtcctctaggtttcagaaaacacacagcagtgcctccaccggagtcagtcagatgcgcagggatggtctgggaattgcacccttatattctggtcatctccactcctcagccttagctcaccactgccccccatgccctgccactgacaatgacactgctcc

SEQ ID NO: 476424 - DNA, 1000 bp, Homo Sapiens; identical to SEQ ID NO: 344805

SEQ ID NO: 476425 - DNA, 1000 bp, Homo Sapiens; identical to SEQ ID NO: 344806

SEQ ID NO: 476426 - DNA, 1000 bp, Homo Sapiens
cctaagctgtccactgtacttaaatattggttttcgttaatgcttcttcattcaattgcatagcccttagaagtttatcagtcttttctttcacactttcaatttcctccaaaattttattttcccttagctggttctgatgttttgtttcatctagttccagtcttagcacggcaatttcttcctgcaacacgctgttttcacgcaagagatcttcttctttcttatgactaagagaaagctcagaattcattttctgttcagccacttctatctgcttttgtttattagtcagaatctcatcttgtgatattccagtgttctgttcttcagaaagttgtttccgggtatcattttgttcgtcactgtgatactcttcattctcagtgtcaggaaattgctgattttcaggttttctgctcctcctttgtggaattaatccatcatcaccattgccagcactggcaccattagtcaggttttctggtaatcccacaggattacttccatgcttctttatttcttcttcaacctctctatcacagtccttatttatttctggttcttgagacattttctctggctggctattttcactgactttaagcctttgtgactcttcctctgatgtcagctttaagtcttgttctggattgctgttttcagaagagatttttagcatctgtttttctttatagtcagaaagtaattcacaaattacatgatgatgactagaaacagcatactctctggccgtctgtccagatagatcttgagaagatacatcaacattttgctcaagtagaagattgactatacttgctgatccacaacatacagcaagtatgagggcagttcttccatatctatcaagtacatttaaattagcttttttcttgattaaaaatttcaccacttgctgtttttgttcatgtacgccaagcaaaagtggtgtgaggccacacttgttttttgattcaatatcagcaccatataagag

SEQ ID NO: 476427 - DNA, 1000 bp, Homo Sapiens; identical to SEQ ID NO: 344807

SEQ ID NO: 476428 - DNA, 1000 bp, Homo Sapiens; identical to SEQ ID NO: 344808

SEQ ID NO: 476429 - DNA, 1000 bp, Homo Sapiens
ttttttttttttttttttttttttttttttttttttttttttaaggtaaaatgtttgcagttttatttgctattatgaattttcttcacttgataatgcttgagtgtgatttctcatgactttttttttaaaagtagttacctatttatgcttttaagactttatttaaaaatattcaaaaaatattcaaaatattcaaaaataatgtattccagtatatcttcaagagactgtgtttttcaacatgtcaactcagcatacttttctatctatctttatattgtactatttcatatttcaatatccatgtttctgtcatttagctaatttttctaaggaactaaaacaatccaaaaaaactgtacagatataaaaattgatcattaaaaactgcttatatttatgatgtgattataattccatttctactgttgagtttttttcagttaataggttaatcaaacacacaattcatcaaatatcttttaaccgttaatgaaaaacaaacatgcacgcttaattatgttaaaaaaacataaaattcaaatatactaacatacacaaataccacatataaagagaaattaaagaaatatggctcaggatatcaaatataaacttgctaaactatgttcttactatctcctagataattattaataaaaagtaacattaacataaatctattacatcattccatagtaatattcataatctttatacaacaaataaaatcacacaaaactaatgagtatgaagaagagatactaagaaaaaagtttgtgtggaatattaaatttaataaaattgccatttgcctcccccctcacctcaccaaaaaaagctgtgtgaatcttgttgctatgacaggatcactttttctttcaactacgcaataattataatattctattccagggtaaatgtaatttaaatgttgcacagaaaaggatatcatagacaaatatttgtttgaggttttagtaatactttaaaattt

SEQ ID NO: 476430 - DNA, 1000 bp, Homo Sapiens
ttttttttttttttttttttttttttttttttttttttttttttttttttttttttttttttttttttcagcagaaattcagagtctttaattcaaacaaaagaggaaatagatgctgccattcttaggaatatttacaccctgagccacgacatctggactaggcagtaccactcagcgacagaaaagccagctccactcactgagctcagctcatggcaccaaaaattgagagtcagaagctatgtaggacacagccccagagagactgtggaagacaaatcacatacccacagtcctgacaaaaggcaatgtaattacgctgccctcatcaaaaagaatggtgactttgacagcccttttgttaaaaaggcagtgacacaccacagaaaaagcatagatccttgtgtcggccaggcctgactctggcacataggtgggtgactggggccagttcagcagcctcttgggatcaggctcccagtctgttccaaggatgctcattgcatcttctttgcaggaatggatgagaataggaggcaatatgtgtagggtgtctggcatctagtaggtgcttgacaaatgatggtagctattgctgataatgaaggaggtgggtgggtgacacaggctggcagagaatccccaatacaccttcacttggctttgtggagatgggtgcagctggtggtctacagatgtacacgtggtgtcctaaatattggcgtcatcctgcaaagttgtttctgatggagcaagtaaaggctgtctaacttctcaccacctgcttacaggtctcgtgtcaccccaccatgctggcaggggatgtaaaacctctcagacagtagctaacttggcctaagcacagaacaaaccagcccctcccctgtcgtctcctgctccttccctctttctagggatgatcacagcttccttagggccaagaaggttataatggcttgtgcctccaaagcctcctgccagccaaaggcagcgagga

SEQ ID NO: 476431 - DNA, 1000 bp, Homo Sapiens; identical to SEQ ID NO: 344810

SEQ ID NO: 476432 - DNA, 1000 bp, Homo Sapiens; identical to SEQ ID NO: 344811

SEQ ID NO: 476433 - DNA, 1000 bp, Homo Sapiens; identical to SEQ ID NO: 344812

SEQ ID NO: 476434 - DNA, 1000 bp, Homo Sapiens
taggcgtacgggtgtgtttatagtgactagagtttacaagggggctgggtggcgggactgccgtgtacacactgtaactccatgtgtccagtttgtcctgttgacgcgttccacagctgtcaccggaaagctatctcctggggccagcagcatccaggaagggggtacctggggctgcagagacaagctcgtcggcagggcagggtgagggaccatgggtggaatggcagtggctgccagtgggctcggggctggcgcaggcatctcacgtcgcaccgtgatgcctgctgtggctccagaagttcccaagccacgtggtgacagactgtgggtggtggccaaagtggcacatgtcaccaagcaaggtctcgagcttgcagtggtcccaccctctggggcagtgttgtgtccttgccgaggatggacagactgaccaggccccacggtcctgaaggcaggatgtccccaaggcatgtgccgcccgcacgtctggaggccctgggtcctgccagggccaaagtcccataaaaggtctcctgtgcccgtatggccactgtggggggggggggggcgggcagcaggccacagggtcggcatttgcaaaatagtgaggcactccctggcctctgcccactgggccactgaggcagggctgtggacggcttctgcgggctccagctcttcctcgtccctcagctcagcgctttcatgtcttccccaaaatagaagatcttagagctttccatctttctttttctgtttggttctctgggctctcactttcgtaagaagccaaataaagaccatcctcactgaagatgggggcggtgtacaggtagtgggtgatgctggcgtcttgctcgaagggacactccacttgtttccaggtgatgaactcccccacctgcttggccagctccaggaatttctcaaagttgacgtgtccattgggaaggcggttggcgcagccctcattcaggaagtagatgtctttgatgag

SEQ ID NO: 476435 - DNA, 1000 bp, Homo Sapiens
ttttttttttttttttttttttttttttttttttttttttgggctttataagtttattggtaagacacaggagcagggaggtgaggcctaaacaaggacaagtacccacagatgaagagcacaaatcccttggttggtagaattagcctcaaggggtactcctggctatgtaatatgcagtggctatacaagatacaacttcccaccaggtgttttgcctgagccagtattgctctaacatgagagagttcctgcaggtctatcagtagatctgaaaacttgtgtacccagggagcacatggccaaatagttactgagacagggtatgaaagagcagcacaggcagattggggttacccttgagagacagccttcctctgcacagggacatgcaggcagagaaaaggccaagtcttcttccagaaggggaggctgagttaaaaggcctctttggatggaggcagaaagatgggctccagctctcaaatcctgattcaacattaacaaagactgaggcagagaggtcaaggagaaggaggagaggtccacagcaaagcaaagcaagaaggagatgaggacaaatgagacagaggaatttcctagaagagtccggagcagtctgccagggcaaggcagactactgggaaatgggctgtgttgcacttttatctcatggtttttttggtgggtgagcttagagctaaggtctttccctgggagtccctgaattcacttgcactccccagcctggtcctggcttccccacgggggctacagttcccactgccagtgacacagcccccaggcagcatgctgtagcccccgctgacagagctgggccagtagccgtaggtgccagcattgctgaatccaaagccagcccctgtgcctgccatcccggccatggagctgttgatgaccgaaatgctcacggagttggtatattctccggacatcctgcactcctcgccctccagcagcttgcggtaggtggcgatct

SEQ ID NO: 476436 - DNA, 1000 bp, Homo Sapiens
ttttttttttttttttttacaactgttttatccaaatttattctcagggaaaaagaaagtagtggctctacgcaactttttcattcaccaaccacctttccatgcatcagaacctatgctgtgattgttagctgaacttcaatagtttccacctacttaagagagatgcctcaaacaaattaactttattttcagacaacaggtccaagaagacttcacagctcaatcatgacgaacatgtggctgtttcctcacagccaggaaccctcggtattagaagaaaactccaaccccccacaccatcatctagcctcttttctcactgtgaagaactgatgagacagaattcctgagaagggaacatttaggtaatctgggatagaagggcatggaaggactggacaaactaagcctccccatgaaggaagggaaaagaatattacaaaacagactaacagaaaacaagacccatcagtatcttcaggataaacaagaggccactctagatgctctgattaaaggttgtccatgcctacagaggcggaggataaatctaagaaacagaaatgtataaccagcccaatgcttccatactctgcattaggtcagtgtgaacatggctttgctcccaatggtcagacctgacatgggtccttctgaagatggtgggtcaggtatatcccagccaccctcaccagagaatacatctatgacaaacccaaattcctaatcctgaagtactttgagccactctacattgtggccactcaataatagaataaatttgtgaaaaagctgcatgttttaatttaggaaatgagtagaagttcacaagcaacccagaataggtgccagcagtttgctccagtgggccacaccacagcagcagctcaggctctgcagaatcactgtgtccagtgcttcctgagatgttctttcagctgaggaatggaaggcagcagctgctggcactcatgacaacgaaggggcagcttcaaga

SEQ ID NO: 476437 - DNA, 1000 bp, Homo Sapiens; identical to SEQ ID NO: 344814

SEQ ID NO: 476438 - DNA, 1000 bp, Homo Sapiens; identical to SEQ ID NO: 344815

SEQ ID NO: 476439 - DNA, 1000 bp, Homo Sapiens
tttttttttttttttccaactaagactttattgattttacaagtcaacagtttgtacataccaacaatgaatcagtaagaggtcaaaaaatacattttagtaatagatacaaacgcagtgataaaatgagactgtcaaactttacagtataatcaaatcaaattacaaagttagatgaccagtattctcatcttcagttctttgataaaaccatgaactatgtttcaaatacaacactatgtgataacgcaaggaataaaaatcagtatcaggccaagtgcagcggctcatgcctataatcccagcattttgggaggccaaagcaggaggatcacttgagcccaggatttcagactggccttggcaacatggtgaaaccccatctccacaaaaaatacaaaaaaattagccaggtgtggtggcctgtgcctgtagtcccagctatttgggaggctgaggcatgagaacttgggcgagagaggaagaccctgttaaaaaaattaaaaatataaattaaaaaaaatagaaaacaaataaaaatcagtaccactgtgattttgctaaactttccaaacttacgctatcatgaagttttttccatttaatttgagtattgctataaccagttttgattcaaacaaaatacaaaccaagactgtatcactcccacagagagaaaagaatactgaatgacttatagggttaatgaaatgttctacatagccatttaggccagtttctgaaatggcactacagctaacttgcttagagttttacctgggctgctggaggaaagctatggcacgaaagccgacgtctttcctataaattgctccctcaaactttatagcagctagtcctttcttggcttcctcaagggctgatatgagattttcccggatggctgtgactgcaagaactctacccccatgagttactactttgccatttttgagggcagtgcctgcatggaacacctccagtcctagagcttgagcct

SEQ ID NO: 476440 - DNA, 1000 bp, Homo Sapiens; identical to SEQ ID NO: 470066

SEQ ID NO: 476441 - DNA, 1000 bp, Homo Sapiens; identical to SEQ ID NO: 344816

SEQ ID NO: 476442 - DNA, 1000 bp, Homo Sapiens; identical to SEQ ID NO: 161005

SEQ ID NO: 476443 - DNA, 1000 bp, Homo Sapiens
tttttttttttttttttgatactatgagcttttaattggtatcttcctccttatatttgaggaagaaatgaggacgccccacaaggaccttcttcagcttggaggggcagggacagaatagggcagaggagggtagtgggggcagatgcagagctgacagtggggtttcccaatcctctctctagcggccggagggccaggatcacacaggaagcctggaaacacaaaaaaatcatcgacgagctgccccatcctttgcccaggtctcacaaagagcctccttccaggttcccgtgggttcctgaggccgccaccagatgggagcatcgagcaatgttccttttccttctccagccacctccctcctctctcagtcctttactacccccttccctgcctgctttttcatcttccttcatttctcctgctaccaaacagatcccggggcttttgtctgatctatgtccaaggaagccagtggcatatgaaagcacaccatccatcagacagaaactccagacagttgtgagtccagcggaggggtgtgtctgggggccctgggatgagggtatctgtgttggggctctaagaactgggcagtgactaacatctctctgtggtcctggcacccagtaagcattcagagaacatccactgagttgaactgaactagatcgacaaaccagtgcagccaaggagaagaaatacgtattctgctggtgccgtggtggcctcagaggcaagccgaccaccacccaaaggcacccgtttcagcagcttccattcagggcaagtcatatgctgggctggactctgccgccagcttgctattgcccatgcccctaactccgagtggcctctgctcacagcaatcgaggaggctgtgggaaaggtgtcccatgagtccctgggccctcctatctctccccacctaccccctttgcaagccaatccattcaacacttcctgtgaccagcacacagcggccatctcttaaacc

SEQ ID NO: 476444 - DNA, 1000 bp, Homo Sapiens; identical to SEQ ID NO: 161006

SEQ ID NO: 476445 - DNA, 1000 bp, Homo Sapiens
ttttttttttttctggaaaaaaaccctgttgttttattattatttagaaagcacacacaacaatttattggggaaaaagaaaaaatgcaaaataattgagcatacaaatttattttaaaagaactggtgtcacttcccaagtcatatctatgtgagctttttaaacttttgtatttcttatatctgtattcataatcagagttatggatatagatatatggaaacacatcacacactcctcagaaatcctttctccaaaaatctgtagggaatgcatcctttttcttcctacaggcgtttccttggatcacgccacagtctcttttctctgagttcgtctctgatgacaagtaaggatacttgtgaaggaagatttccccttagttcttgactttttctttatttttttctgattcttcagtgagattcccagttcttccatgatagcgttgaaagagagacactgttcaatatcattattcttccgtgatttgtatatgaattctccaatagctacaaatacagaaaggaccagtccggcagccagaacaatgaagatgcctccaatattttccactcccagggcactggcttctttgttgtcttcctcggggcagccattcccacgccaccacttctctttcatcatatgcagcttcccttcttcttggagttgaagaatagcaatagtaattttatcccggtaaggagaaccaataggtgttcccactccgtaacctttggagtcaatgaggcccccgatctgagtgaggttgcagtttctctgcgtcacatactcaatgctggtggactccatcagcagcgcgtagtctgtggtgagcactctctggatcccctcatcactgtttcttaccagggcggtctgctgcctgctgctcatgaaagcccacatcttctcataggtggagatttttgatttcttgaagaaggtcattgttgatccatctctaaccgccccatattctatcttggtttgctt

SEQ ID NO: 476446 - DNA, 1000 bp, Homo Sapiens
tctttacaaatgacagaatatttattaacaatacctttaaaaaagattacatatgctagatcactggtaaatatcatttacactggggttgggaactccctgggtgtcattttttttcgttcattttattattttgctgattttttttttgcatgtgattttaaattttatttcaacatagaagtaaccatatcaaactaagaaaggaacacagcttgaaatactgacaatatttttttccggttaccaccctagtttttacacaaatggaatcccgattatgactttattggataaatataactagaaggttgaaaagttatattatttgtaagcaaaaatgacaaactatagcaaatttgagttctctgagaaagaagaaaaggtggcagcatgtttacatgagaaaatgtttatagaaaattccattgccttttatgtcactgtccagtagggtttactcacaaaacctttctcattgtaacaaatagttcttttcataagaatacagttttgttgatattgtcattttccaatgtgtgattttaagacctagaaggtaaagcatataaagcaactaggctacctattgcaaaacagaatcatcaagaaaccatacaattgtactaaagagcttttatagagtcatattaaaaattcttgcagcaactatttgttgaaataggagcaatcttccaaagtccatatgtaattttgattcaaaagaagggctctattattacagagatacacatattatatataagaaattttgtaaagaaattacgaatccattgacagagaattactttttttaaatttacattcaaaatagatacagttaaagataataaaatgatcttttatcctttgaaagacttggttgactatagtaactttgggtctatgttactacaggatatatgttacttcaaatttaatgtctaagataatgctaccacaaagacaatgctaactcagttgagtgaaaagaaaatct

SEQ ID NO: 476447 - DNA, 1000 bp, Homo Sapiens
ttttttttttttttttttaaagaagcaaaaaacatttttattccagtaataagatgtacttgaacaacaatattacttagtactgggtgtcttcaaaacaactagctaaatgttgcttatattataaacagcaagtccttcagataacttttgtcataaactggacctagctgtgagggaaatcattattgtactgatggctgacagcgtacatgcattcgaagtggaagccccagatcctctcgcgtaggcatttgatatctttggaattcgaatttgttcactgctgctgccatctcctccgtcgctgaatggcttaatttctattatataatcttcatcgaaaggcaaagaaagctccaccgatgttttatttgtttcaatgacagatgtgctgctttgtctgttccatctgtacaagactttgtatccttttacttccgactcattatccagggccttcacttgatcccaattcaggataattttggagtctgatgaattccatatgatgtttccggggggttgacttggtggtggctttcgggttgtcacattgactgttgcactagaggggcctgtcccagcagaattatatgccttgacagctaagtgatacagcacactgccttttaagttcgtgatttttgttgatgtctgatttccaactgttcgtatttttctagcattttcttctttgtcttcatgtctccaatatttaacctcataaccttgtattcgtcctctattcttctccagtggggaggcccagaaaacttcaatatctgtggcagaaagacttctggcaaagatactggctggtggtttggtgggttcttcttctgcagaatacaccaccgtggtgggactgaaagggccttctcctttgttgttgaagacacctactttaacctcaaagggagagaaggggtgcacgctctcattcctgaacacgtatctagaggcatcagctgaggccagcactgtcagcatccagatc

SEQ ID NO: 476448 - DNA, 819 bp, Homo Sapiens; identical to SEQ ID NO: 344818

SEQ ID NO: 476449 - DNA, 1000 bp, Homo Sapiens; identical to SEQ ID NO: 344824

SEQ ID NO: 476450 - DNA, 825 bp, Homo Sapiens; identical to SEQ ID NO: 161007

SEQ ID NO: 476451 - DNA, 1000 bp, Homo Sapiens; identical to SEQ ID NO: 344826

SEQ ID NO: 476452 - DNA, 1000 bp, Homo Sapiens; identical to SEQ ID NO: 344827

SEQ ID NO: 476453 - DNA, 1000 bp, Homo Sapiens; identical to SEQ ID NO: 161008

SEQ ID NO: 476454 - DNA, 1000 bp, Homo Sapiens
gaacaggaagaattatttattcagatttaatttcttttgcattctcaaagaagcaaaaacatacacatatttttaattttacataatagactgaggtataaggcaagaattaactatcttttgagttccttgtatcatgtattttactgctaattcgttcacaatataggcaaatacatattccactgctgttattatgtgacaactcacaaaatggaatggatttcccaatctgaataaaaaacaggactcttacccctaaactatataaacagcactatgtgtgactactgtcattcataaacttggatgctgaagttcatccaaccatttgttaaaaggaacatttgaacaattccaacaggaaacaaagataaatctcaaagtcatccaacagaacagaaactcactgctaagaatgctgactgctctcttcaaagaggcaggaatgggcctcatatcacacgaggcagtggaagctaatggatggggccctggaaggtgcactggcccagaccccctcccactggccctggctgcaacatgtgctgagactcactcttctccctctctcaaagcccgttcatgcaggggtgggtaggaaatgtgaggttctccaccgatctttagtgtatggtgcaggactttcacatagctggtttcaatgagggcccttggaccccacaggaactcgtagcatgcaggatcactgccgggcacctgccggtactccaggtagttttcctgcaccagatcttgcatgagcagcttcctgggatgtgcgaagacactgtcctccctcccctcaaacacctccaacatactcagctcctcccagattttctcctcaggggcacagtcgccctctattgcgattatggccaggacgattatcaggaggcctgtcttgggcatgacctgattgtcgcccagcaggccatcgtaggagaggcccaggcaggtgacaaggatgtacaagtggctgatggggaccacttcc

SEQ ID NO: 476455 - DNA, 1000 bp, Homo Sapiens; identical to SEQ ID NO: 344829

SEQ ID NO: 476456 - DNA, 1000 bp, Homo Sapiens
cacgatttaaaggttcttttttatttgaaatctcatccagaaacactggttattaataaatatatcatagttatcaagaatatataaaaaataaagacaggtatcgtctttgaggccctaacaaaatatttcaagcaaatgttcaggaaaataaaaacggcacccctcccaaaaccaggataagttttcaaagctgataatagagagagccaaccccgcatgcagaataactgagcgagggggggtggcgcaagctactagagggagcccaggcttttacaatagcggccccagaacagcaaaggaaggttccgaataaagtttgaagggggtgggggtgggagaagaagcgcgtgtgcgtgagtgtgggtctttgcactctgccccttttttcatttcatacaaccacagacagatatatggagtacttgggataattcactaataaatccttgttacaaggaaaacggcaccacagcctgcacgacatattcagacaagattcatttagaagcgtgcatgcattcttttgacctacactgcgtcgaaaggaaaacccacataggaggtgtcatgccctggacctcggttgagattcaaaacttgggtcttgatctctctcgcgctctctctctctttctctctccattgtctctagaaaaactgtggcaaggacagagacaatcataatcgcatccatctcaagaaaatatttacatttgttttgcacaaaagggatggccgtctttttccaaagcgagaacacagagtcagagaaagccaactcaaaagtcccttcgcaagtttttaactacaccgatcccatctttatacaacaaatgcagttttgacaagagcatatggcagtgaaaaatactggcgcggcatggggaaaagaagcatgcatgcaaaacacacgacatctggttcgagtccccctttgctaccacctagaaattgcggtttgattttggtcctttccctccgggggtcaagtgga

SEQ ID NO: 476457 - DNA, 1000 bp, Homo Sapiens; identical to SEQ ID NO: 344831

SEQ ID NO: 476458 - DNA, 1000 bp, Homo Sapiens; identical to SEQ ID NO: 158045

SEQ ID NO: 476459 - DNA, 1000 bp, Homo Sapiens; identical to SEQ ID NO: 344833

SEQ ID NO: 476460 - DNA, 1000 bp, Homo Sapiens; identical to SEQ ID NO: 344834

SEQ ID NO: 476461 - DNA, 1000 bp, Homo Sapiens; identical to SEQ ID NO: 161009

SEQ ID NO: 476462 - DNA, 1000 bp, Homo Sapiens; identical to SEQ ID NO: 161010

SEQ ID NO: 476463 - DNA, 1000 bp, Homo Sapiens
ggtataatcagtgcttcataaaggcatcctaatttttatatctttaaagacaacctaccatgaaataagaagaatccataattataattctaaaaaccatgtaatcaacttgtgtccatgaactcacgcatagcagcatcctctactcagggacacattatgttgctatgaatccttttcagaattctttgagtttttcttcctttctacttctacctcattatatctacacctttcttaactaccttgcagtcaaaagccaaactacctgggatgctgctcctctagtttgtcttcagctaaggatagaggcaaagaatgagggaaggggaggaaaaagggagcagggatacgagaaacagaaaggaagaaaaaagaatccttttattttccaccctctcttcgcccattttttttcttttcccttcactgtacatctaattcttttgacccacttcaattttcatcatagtaggtagagccacatcttgagaaaccttaaaactatagatttactacaaaaaagatgagctaatacaaagtctaaagtaaactaaaagaggggttgatttacatctggcacaacttagtctttgttccaatcattttagaagtctcaatttaactccaggctagactccagtttgttctgggcctctcaggaattatgttttgtcatttacattgtatcagacagactacctctcaaaaaatgtatatcctaaatcttacggatgtgaaacaggtagggaagaaataagtatagactgtattagctcacaggattcacactataaagtacactgactcaaattttctctaatcattcatactcacacattcactcaagcatacatactagacataaaaattgtgcaagatcaagcatcagctttctattttaaaagccttaatttaaaaaaacttagataggctcactgcagttcctttaaaggaatattcagtactacagtactgctttaagaaaaaattcacaact

SEQ ID NO: 476464 - DNA, 1000 bp, Homo Sapiens; identical to SEQ ID NO: 344838

SEQ ID NO: 476465 - DNA, 1000 bp, Homo Sapiens; identical to SEQ ID NO: 161013

SEQ ID NO: 476466 - DNA, 1000 bp, Homo Sapiens; identical to SEQ ID NO: 161014

SEQ ID NO: 476467 - DNA, 1000 bp, Homo Sapiens; identical to SEQ ID NO: 344841

SEQ ID NO: 476468 - DNA, 1000 bp, Homo Sapiens
ttttttttttttttttttttttttttttaattatttctttttattttaataaagcaaaactacaggtaaatgttttgccagatgacttttgtgtacttatgttctaacatagcacatgcttggcaccaaaagatcttagaaactactatgaaaaaccataagattttaagtagttttctgacagaaatgaacatttctgttgcatccctacttgtcactggctttcttaaacacagaaatattcatttccatagtctttatcgctttttggaggatctctaagattggtcccatagccttgacaatttgttccaacaaatctgctgctgactttgtgggatttttggaatcctcagtttttagtacatcctgcagttttttcaaggtgtctatcatagtggttttggaagaacctggaggacttctggttctctcagatgtggtgacatctgattgctctttggtgtcttctgtatagaagtcacttaattgaagattcatgatggggaatttcatcaagtgtgaaagagaagattccagactcccaaggatgttactgctgtttagcacagagatgatgactggcgtatgggcacttttgaatacttctttagctgactgatgcaactcctctacattggtactcttctgaaccacagagcacatggccattgcaaccttggaacataaagactccttttgaattttgtcatgtcttgcatccactacagattgcatctccttaaaaattttgagcatttgctcaaaaaaatccttaatgtaactattgtttctcacagccatcaaaaggatttgagtattcatactgcggctaaacaattcagtcagtgtgtttatgacagaagcaagatcttgtacatgaaagaagaacattttggcagcttgaatcagtctctctttatccttttctgactctgaagacatttctccaacaaataagttccaacacaggctcccagcaactaagtcaagatgcctc

SEQ ID NO: 476469 - DNA, 1000 bp, Homo Sapiens; identical to SEQ ID NO: 344842

SEQ ID NO: 476470 - DNA, 1000 bp, Homo Sapiens; identical to SEQ ID NO: 344843

SEQ ID NO: 476471 - DNA, 1000 bp, Homo Sapiens
tttttttttttttttctttttttttttttcacaggagaacataaatgaattttattagaaaccacttccaagattttgctgtgtatattttttaaatttaagagcctcttaacaagtcacattcagcatctttactcattgttctgtgaaagtatatatgtatattttatgaacatgtcatactttttctgattgaaaaatatccaaccctattgcaggagttacagtaattcctcagctgcttatttttattcttttcagttttctcgatgtttacataatagtacggtgcttctggctgattttcagtacgtcctggcaacactttgcctgactgccatgggtacaaatactgatagaagaggagcataaagccagtggccaataggtagcttatgatgagctgcacggcaattaatgagtcacaacaattcagcaaagttttccctccaaagaacctaaataccaatatcattatcacattttctaaaaaactgaaagctgtagtgtaggattctatggccccacctctgtctcccgtcaattattttgtcatctgacaactgcagtttcactgctgaccagcaggagaagttgatggcagcatatagcagtgtgatcaagaaaagcatcagtactgtacccaccatattggaattattttctttgttgccaggaagatgagctccacttttccaaaactccagccacggtgccaacaatgatacaaaatatatgattaacaaaacgggtaggctcttcagtttcagagatgcaatgaacaatgccagagtcactacacgtgagataacctccaaaaaacgccacatcacgacacagaagaattctatcggcggtagcttaatggtagtatcatcattgctgatctggatggccagtatattgcagcgaatggccccataagtaactgataacagggaaaatgtcatcagcaatgctctattcaaaggccattctcgtatagtgagactgatataca

SEQ ID NO: 476472 - DNA, 1000 bp, Homo Sapiens; identical to SEQ ID NO: 344844

SEQ ID NO: 476473 - DNA, 1000 bp, Homo Sapiens
tcacaagggagcctgggtcgacatgctctttcttactttcaaacccttcctcttgtggagtcccgcccagggcaggccagtctcgtgggcctgggcctgggcatggacatggcccagctctgagggcgggggcatcaggggcatgagtgggatcagcatggccattggcatcagtggcatcagctcctccgaggccccaggggggatgaagggcagctcattaggatccaagtgggcgtcactccagccctcggagctatcactgcggtcctctggattggtggcttcattctcagatatggtgacaatctcagtggtgtcttctccagggttgctgtctaagtcccctgctcctcggctggtgcctctctcaagtgtgctggctgtgtgggcatctgctgcgccctcctgcttctgcctagagccagccgaaggggcacagccgagcccacacatcttagctctgccctggccagtccagaagaggctgagctcttggcggcaggcagccacagccaggctggtgagcagggtgctggacactaggtagagcaaggcaggttggcccatctgcatgaggaccatggccatgaatgtgaccagcaggcccacagcataggccacggtgcaggccacgaagtagatctgacgggagcagacttgcacatcaaagcggcaacagtaagcaaccaggaagccggggaccacaatgtcaccgaagccaaggatggagaagggctggctgcacagggtcaaggcggagactcttagccggggcactttgagtaccatgggcagcctctcatggcttgaagactctgcagggcccaaggcaacctgcgccatgatgctctcaccggttttggtgaagaagggggtgacgaagacaaagaagacatcaaaggccagcagggccagcaggaaggaggagcagttcttgagagtgggcagccgcacacggtgcaggacgaacaggcagtaggaaatgcccagtgtgtcc

SEQ ID NO: 476474 - DNA, 1000 bp, Homo Sapiens; identical to SEQ ID NO: 344845

SEQ ID NO: 476475 - DNA, 1000 bp, Homo Sapiens; identical to SEQ ID NO: 344846

SEQ ID NO: 476476 - DNA, 1000 bp, Homo Sapiens
tttttttttttttttttttttttttttttttttttttttccttacagtgcaagggttttaatagtccacactaaaataggctgtacagttttgtagtttaacattaaaagcaatcctgccttattttaaaatgcttctacttaagaatgcttcttcctcccccactccttcacttaaggtataagtctacccctaaagtgcatttctcaggcattaaaaacagcactgtgatttgctttccacagagtcctaaataacagccaccttcttcatttgagaggctacagagttcaagctgagctgtgacaggagccagggggccagggccccagaatagctttttgaaaaaaaaataattatgccaccctcctccgcggcaggtatcttctcttaccacaaataaatatttaatgcatccttggagtcatgaaatattgagaacccaattgacacttcaatttccagaaaaataaaatcatgaaggcattgtgtaaatattctgaatttggtggaatgagacaacgcgtaagggggcgggcctgaagtctcgggtttggaactgggggtttggggtagtgctgggtaggcagtcctggagcgcgcaggctattggggctactgcttgtcctcgtgggggtcaccaggaaagcctgcctcctccggggacctgcccgcctccgggagcagcgtggcgcgcactttcctcttctccttaaagcggccggagcgcgagatcttcaaattgcggcggctgctgccggatttgtccccgtataacttgtctggtttggggggctcgccggcgcccccgaggagattggggtgctggttctcccgggagctgctggtccagtccgggctgggcggcgcaggtggcgtgggctccccgggagcgggctgggcgggaggcggcacccccactgcggcttccttgcttttctttctgctgttggtgagcgatttccaccaggggccggagctgccagcatcgccgctgtcg

SEQ ID NO: 476477 - DNA, 1000 bp, Homo Sapiens
acatcttgattttataatcgtgtgtgctttattttttacacaaatggaatggaagtgttgaatatttacacttaacaggagtgtaagctgtgcagtgtctctgtaaactccagcctaggcaaggagtattcccacctccctcccatcctgtgctacagctcggtggagaaacatcctgtcagagagaagcacaaaactgtcatattgaaaggatctaacgggtacagcctggtgcactcagaagttaagaaacacttaggaaacacaaactcaaaaaggagagaagaaaagtctgccatcccattgggagtcaaccttgccacttggttgtctgtcctcatgagttgctagggagatactatactctttagatgatctttgtctaaattgtccgcctgtcttagctttgtcctcagctgttacaagaaactgcacagctgtacaagaaatgatttccaaagcacaggtttcagtgaggaaggatatttacagacttgagtgtgtgtgtgtgtttccaaccacagtcattcatactcaatgtaacgtgtgtacatggtatacataccatatataccatacatacacagaagtaaaatgtatatcacagaattctgtagggagtcccctggcaagtcagctgtcacaggaggtactccacatgcttcaagggaattgatctttttccctctaggagtaacaaattaatgtgatcaacttaggaattagcctgagtccttggcttaaatatatttgtaggaatttaggcaggaccaagacaggaaagaagagatttcatttcaccagcaagtccattcagtctcaccagagcaatcaccagctgaaaagcagagggggcttcacataaaaatgggaaaaagaaagcttatgaatgggaaaaaaatgtctctctccaaaccaaggtgatggcatggcttcaatgaggaggaagaggtttgctatcagaataattggggccagagtctgcctttattgaaagaaa

SEQ ID NO: 476478 - DNA, 1000 bp, Homo Sapiens
gccagttatttaatttttaatttgcaattaaactcttggccaagaggatctgttgtccaaaattacatcgtgatagcttaagaaaaaaaaaatcttactttgccagaaagggaattatacaaggatatctttatgagttgctgccaaattttgttctagaccacggccctctggcctccatgaaggatcaaagtctgggcaaagacaattctaagttgtaggtaaacatgcttttcatttccctccattccttacttttgtcataagcagtctggattttcaggggtaaaggctgatagggttgccagatacagtcattaaaaattgagaatgtgcagttaaattggaatatcagataaacaattttaaaaatatatgtaacacacatatgccaaaacactggttatctgaaattccaatttaactgggcgtcctgtattttatctgacaagccctaactacttctttaaaataatttgttaacttcctacaaaaaatctctaaatgggaggaaaaaaaaaatcccgtaagttgtctgggccaaaagcagaagtggctccatggcagtcagccttctccctaacttggcttaaaaagaaaaagccaaaaccagaagtcccaaaagcttgcgtttaaagcgggctgtgccgcagctttcccgcctgttttctgcggaatgtagcacggcagccaccccgcgtgggtggggctcgtatggttgtgtccttgctggttgggaaaggaggtgccggaaacttcaaaccacggccagggtacaacgtgtccgcttaggcggcgatatgcgccgccatcttctttgcgggcaaaggccgaaaaaagtttgggactccactcccccccgctgagccgatggagggcatcgcccgctgcctcagcactctggtgacgtggaatcggggtcccctctttcagggctgatttctggtagcacgctgacgcctgccaaggcagggaaaggggacgccgcctctgtcccgga

SEQ ID NO: 476479 - DNA, 1000 bp, Homo Sapiens; identical to SEQ ID NO: 344849

SEQ ID NO: 476480 - DNA, 1000 bp, Homo Sapiens; identical to SEQ ID NO: 344850

SEQ ID NO: 476481 - DNA, 1000 bp, Homo Sapiens; identical to SEQ ID NO: 161016

SEQ ID NO: 476482 - DNA, 1000 bp, Homo Sapiens; identical to SEQ ID NO: 344852

SEQ ID NO: 476483 - DNA, 1000 bp, Homo Sapiens
ttttttttttttttttttttttttttttttaccttagcatgtgcattttacttgttaattttcagttcatcagcaatattgtatataacaaaaatatgtttgtatacaccatacatgcacatacacatgcatatataacttctgaaactattgattggggatgctctaagaatgtgctgtccaacactatagacactgactactgggcacttgaaatgtgttttgtccaagctgcactgcactctataaaacaaacacaagactttgaagacttagaatgcaaacagagtaaaaggcaacattaacaaatttgtgttattacatgaagaaattctatgtcaatatacaagaataaacattatcacgttaatagtaatatatgtacaaacatgtactataatatattgcatataatttattgaaatagtatgctatgtaattaacatcaatattgttaatattaatattaattataacattgttttgaattaaatatattatttaaatttatttgactgcttaaatgtacctattagaaaattttaaattatgttgtatttctattggacaaccctgctctagcgtgttggaatcaacttggaaagaggaaatacaaagggagtggggatggccatgattattctttcaggaaagagaatatcccaaacactctcctcatagcccccaggacttccttattcctcaggctgtagataatgggattgagcatgggggtaaggatggtgtagaagactgccaggatcttgtcttcagctggtgagcggagattcctgggccgaagataggtgtagacaaaaggtgcatagtaaaagatcactacagttaaatgtgttgaaatggtggtgaaggccttttttctcccctcctttgagtgcatatgatagacagcaaataggactcggccacaggaagaagtgatgccaatgaaagggaaaaggagaaagaggcttgtacttacaaaaaccatatattcatagac

SEQ ID NO: 476484 - DNA, 1000 bp, Homo Sapiens; identical to SEQ ID NO: 161017

SEQ ID NO: 476485 - DNA, 1000 bp, Homo Sapiens; identical to SEQ ID NO: 344854

SEQ ID NO: 476486 - DNA, 1000 bp, Homo Sapiens; identical to SEQ ID NO: 161018

SEQ ID NO: 476487 - DNA, 1000 bp, Homo Sapiens; identical to SEQ ID NO: 344855

SEQ ID NO: 476488 - DNA, 1000 bp, Homo Sapiens
ttgcaacagagaagttcggagacagcaaagaataagcattagcttacttcctgctgctcttcagccacggagcaggaatgtctggtgaggataaatcactcaactgtgctcaggacgaataagtcacaacacctgtgaggatctggctatgttgtcttactcttgttgactggtttgcctccattcattattgcagacgcacttgtgcttttacttggcgtcaccccaggcttcgggaccgtttccccaacatcatgcaaagatggttctcggtacatggcaacttccaatggcttgggtagaaaatgagctgctggtttggttttctttactctgttccctttcatagcttgcccttccttatttaatcccaaaaaccaggctctaccagattcctgttgtctgtacaacatggatgagtagattacataataattttcaaaaacagattctttaaacttgcattcaggggtaaaaagttctgatgggtagaggtaaccttctccattcatggctatatacaaccctgttttcactccctggatggcaacaacacgtagtcccactggtatgaggttgaagagtgtagaattagtgctgtcatccttggttccatcgagagctccatcggggtgcatttgcaagtagtagccttgcctgcaatataacctggtcactatacccttgagctggggatcagttgggttcttgtttttcttaagactcttgccacaaagacactgcagcatatgcgttcctttgctgaaaatgttccaaagaaaccacattgatttgggcgaaaagcaatccagcagcttagacaccctgagaaagaagagatccttgtggttgcataataataatttgaaatcagttctcctgaagaggggcaccggttttaccataggaaaaacgataatattccggatcttctcccagttttttcccctcacgtggtatatttctttgagacttctcagtgattgtttgttttcggcca

SEQ ID NO: 476489 - DNA, 1000 bp, Homo Sapiens; identical to SEQ ID NO: 338184

SEQ ID NO: 476490 - DNA, 1000 bp, Homo Sapiens; identical to SEQ ID NO: 161019

SEQ ID NO: 476491 - DNA, 1000 bp, Homo Sapiens
ttttttttttttttttttttttcagcggcaactccgtttattgagcacctaactacattgcgcagttagtcccccacccacaggacccagacatatgagggacctctcaggggggatgtcctgtgatacaggggagccccacctccccaccccacaggggtagagccagacaccgtcccctcccagctccctcccccatacaggcccttccctggaccccagacccacggagtaacccagacgcctctcctttcacgcctcatttccccacttgtaaaatgggaggagagggttagacccctattttttctcagttttccaaagcagcaggagtctctccttgtaggaagctcccccagaccctcccagcacggctgcactgggaggacaaacagcatggagctgtttgtccctgtctgcagaatgaaggcccagacagctttcattcatggggacgcggaagaaaaggcatccagggttcagccagccatgggcctccagacactccagggttgcctcccccttacctctgccaggcccagagaagctactggaggctcaggactctaggtccctctgaggttggggacatttaggggccacacccctgccccaggccgccccgcccagcccagcccagccacaccctccctgcctgtctgcccccgattaggaggcctgggcaggggcacctggtgggagagtctgcctagctgtgtgccggcagctggcccaggatctcaaggcttcagctgccagccccaaagtccaggcacagggcctgagggggtgtggggggcatgaatgcaggggccagggcactgaatggggacagcagagagcagccctggctggggaggctgcaggcctggcaggggcagcctgggaagcagactcagggctgctcctgagatccggagcctcaccagcaggagaactcgagccaagcccagggcccagcccaggtggtgctggcatcaggcaggcaatgcccatagcc

SEQ ID NO: 476492 - DNA, 1000 bp, Homo Sapiens; identical to SEQ ID NO: 344858

SEQ ID NO: 476493 - DNA, 1000 bp, Homo Sapiens; identical to SEQ ID NO: 339320

SEQ ID NO: 476494 - DNA, 1000 bp, Homo Sapiens; identical to SEQ ID NO: 161020

SEQ ID NO: 476495 - DNA, 1000 bp, Homo Sapiens; identical to SEQ ID NO: 344861

SEQ ID NO: 476496 - DNA, 894 bp, Homo Sapiens
aagtgctcaacaaacatttactgcccaaatgaattataaactaggaaacatatttaagatgtgaagtgtcttgtcacttctggagcttatagccaagtagtggatgacaagggttcaggacggtaatgggtatttccccaaggaagatcggatgactgaactgatattgggtcgggccagccgggcaggaggatctgcggtgcaactgcagacagtctcaggccagtgtccaatggcttggtggcactgcccagccggctgcggaggatgaatggcaatagctatgtgcttctgaggcagagcaacaatggagtaccagcagggccctgctccttcgccgaggaactcagccgcatcctgggctggggcaggatcctgaacctctcgggggcgtagcccgcggaacgtggtcggcttgttggtgaaggggtgccactggccctggatgctagggttgtcggtgtggaagggcttgcggatgcggatcacgtccaagcccgactggtcggccagcttctgcaccagcgtcgagatctcctcgaccgacttgcagtggatgctctcctcgcgcacagccccgttaaggtattcggccactactctgggcacgcagcacggacgcgagtttacatatattacgacccctggattccgtcgggcgaagtcgatcacctcccgctccacgaactccctggcgccgcgagacgaggcgccgtcgcggctgacgctgaagctcagacgctgcagctgctgcacatagcgacccagtccgttgtggagaacgctggccaagaagcggctcggagtcccgcgcgccgtcatagctacagcttggaggccgcggagcctaagcagcgaggagaggggggcgggactaaacctcgaggcttccgg

SEQ ID NO: 476497 - DNA, 1000 bp, Homo Sapiens
ttttgacagtacacgtcacactgtatttttgtgagcaccttaatgtggtttccccagctctccatggctgactgggacctctcaagagccaggcccaggtctgtccatctccatgcccacagggtctgggccagagaaggggctgaagaaatagtttttggtgagcttctgggtcctgtgagggatcttaactccatgcccagctgagctgaactctaattctccgcatggtttggggttggtggggctcctggtgccccggacacaatggcaaatatgaaggctgcccaggacctggaggactcagcgaccctgcctctgccatttggctgtgagtttctgtaggagctcatgtggtcgccggcggaacttcttctgggtgaagtagaagaggatggggtccagcacgctgttggcactggcaaacggccgcgtgcctttgtaggccgctgcaaaggcctccaatacagtgcaggggacgcccggcgtcgagcgcactgccaggtaggctgtcttggtgatgtgaaaaggcaggaagctgatggcaaaggcagcagccaccaccacggccatgcgggccgccttgccacgccgctcctgggccacaggctctgccgggccatcctggcggcacaggcggcaggccaggagacagtagcaggccagcagggcagcaaagggcagcaggaagccgatgacagtgagagccatgccatagggcatatagtgggtggccagggcaggcgggctgaggtcatagcagacagtgcggttacgctggatgcctgtggcagcgaagatggctgtgggcaggcactgggttgtcacggccagccacacggctacacacactagccaggcagcccggcggcccccacgtttgtgccagggggccagcgggtggcagatgcccaggtagcgctggaagctgatgcaggtgaggaagaggatgctgccgtgcaggttggcatagaagaggaagcggaccaggcggcaggcg

SEQ ID NO: 476498 - DNA, 1000 bp, Homo Sapiens; identical to SEQ ID NO: 161021

SEQ ID NO: 476499 - DNA, 1000 bp, Homo Sapiens; identical to SEQ ID NO: 344863

SEQ ID NO: 476500 - DNA, 1000 bp, Homo Sapiens
tcacccgagtttctgcagcctgcatgtcgactttttcaaagccttacatagcatcttgacaccatcagtatccaattcattgcctagaaggttcagattgaccaggctcttactgctgctgagaacagagaagagatgctggcagcaagcagttgtcagattgcatttcgccaacccaagtgtgtgcaatgcacgatgtggtttcagagcctcacacagtagcttcactccatcatcctgaagatcattttctcccaaatccaagattttcacattatgattatggctgagggcattagccagctctccacagccctctcttgtgaaagaacaacctgacaaattcaggctctgcaggttaccatctgggcgacccaaggcctcacacaggaacttgactccctcgtctctcaggctgttcttgctcagattcaggtgtgtcaggctcctgttctgcaggagagcatctgacaagtgcttgcaagcgggtgctgccagctggcaaaaccagagctccagtctctctaaggcacacttggggtgagtcagggccgcacacaatagctttatgccatcatcttggagccgattaaatcccaggcacaatcgagttacgtgttggatgctggtgagaaacaaggctaggtcctgacagctggctgccgacaagttgcatttctccaggcacagatacttgaggttgcaagctgagtgtctcaaagctttaagaatcagggggacagtcattcccagcttgttagagctgaagttcagatgggtcagcttgctgttaccctgaagggcaataatgaggtcctgcagaacccactcaggagttaccgatttgcacgtcagtttctggactttgcatcttggatttttcagtgcaagacagagacccttcacagaggaagcatgaagtttgctgttactcaggtctagctcatgcagattctcatttgtgaccaacgtagagcaaatgctgttccatgcgtgcatc

SEQ ID NO: 476501 - DNA, 763 bp, Homo Sapiens
ttttttttttttttcagtctcagatttaaaaaacatttattttaataagactattgcaaacacattaaaaaaactaaatagtaatattacaaaatctatatacttgcacatttagtatttgtcaatgtgccagaggttttcttcatgaaatttgacttctttgaagtgaaggcttttttctatcatctcttatagctctgactgaataagtcttaatgctttcttcatgttttctatcaataggggtaaatcccgaggctcatatgtgtacaatctgttagagtatcttccagctatgtcagctctaactgttaaagaagggtctacaaacatgattctaggcacatattgcccatcaggtgataaattcttatcagtggtttcatgcataaggtttagcatgatgaacttattctgagccatttcttgtatttcttcattttgggcaaatactttctttagtgcttgagagtattgacaatcctccaggtgatgaataaccattaatggcttcttacttttttgagcataaaagagaccttcttcataagtttgtacccaagtgatgtcatctccccatcctcttgagagtgtctgaggaggcctcttttccttttttattgcaatggcaaggttggaagaaactgtgacgagtaagaggcagagacccaaagctgagtgtagcatcatgtcttctagagactctctcagaagaagctgacttggccagtgctcttgttggaaatgtattctggatgtttct

SEQ ID NO: 476502 - DNA, 1000 bp, Homo Sapiens; identical to SEQ ID NO: 161023

SEQ ID NO: 476503 - DNA, 1000 bp, Homo Sapiens
ttttttttttttttttcgtaagcaaagttgtttatttaaaatcagaaaatataaagatgctgagtcccaaaaatgtgataaaattaatatgacctctttccaagtataacacattgcctttctctaacagaaataaactatgattcttattacagtcttaaaattctttttttaatgaatgagtgtaactttttattaagatagaattatttttattaaagaaatatatgaaaatggttaagtaaaatcaaatggctccaaaagtcttacaatgaaaacagtcctgcgacttgttctttccagaggaaagcacttttcattctcttagtttttccttctggtagttacctccatgggttttaaaaaattactatttttttagtttttcaagtgaatacatatattaatacatgtaatctttaaaagcctcttcagtttataatgcatcctaacagtcccctgccccatccctcctaattctctggagcaatgacttctaactcttctagcaatgttccattcttttcttcacataactacttagtcatttcttgattatgttatacattatatagtgatttcttgatatgacagatgaggatttagctcttacaccatcactatcttcacttttccccccatattgtcccaaagtagttaccagatttaggggctaagcagtcagtcaccacatcattatgactatgtacatattgcccattgttgagaaaaacagcgtatgatgctcttacttcctatcctgtacttcttcctgccctagaattaattattgcctaaccaacccttcccccttgtttttttttgtttttttttttttttacttttgctttatcttcaatgcacttctttctaaatgccccaaatctggcaataacctattatttttaagagaagggatctcactatggtggccaggctgctctgaactcttgggctcaagccatccttttgcttagcctcctgagtagctgggactaca

SEQ ID NO: 476504 - DNA, 1000 bp, Homo Sapiens; identical to SEQ ID NO: 344865

SEQ ID NO: 476505 - DNA, 1000 bp, Homo Sapiens; identical to SEQ ID NO: 161024

SEQ ID NO: 476506 - DNA, 1000 bp, Homo Sapiens
cagagagttttatgcttttcattttattttagcctctcgaccactgtgtgaagtagaacagacattttacagagaagtagatgaatggtatctgacagctgccaagtgcactatctctgggcatagagtatctgaagctaagcacccaagtctgggtatatatctatgtatgtatgtatttatatttatatttttaaaggaatgtcagtttcttcaaatcagaaacaccaccaccaagacacatcttcttcattatgatagttacaatctggcttaatgattaagtgtggattgctaactcccacagcttccagcagcttctgggcttcctcatcaaatgcctctttgcacaaccctagaacttgtagtttacacttaggagacttcaagactttatataacttcacaattccttcatatcctaaggtattctgtgtcagattcatttttatcagtcttttgttgcagataagagcagaggagagatcttgacagcagagagatgtcaaaccacagtattccaacccgagcctctgaatgttacagtttggatatctcaaagcatcacacagaattttcactccatcatcctgcaaatcgttgttcccaaggtccaggctcctcaggtttgggttattcaaaataacagaagccagatccagacaacatgcattagtgagaacacagcccatcaattccaagtcctgaagattacagcttggatgccgaaagacatcacacagaagcttcactccattgtcttgtagccagtttgatcctagatccagatgcgtcaggctcttgttgtgtagaagagaagttgacagatattcactgctaagtgaagtgaaatggcaacgcctcagcacaaggctcttcagagtacattgtgcatgttgcagggcatcactcataagctttactccaccatcacccaagacattgtctgccaagcacaaatgtgtcagtcttttattgctgatgagagccaaagaaagat

SEQ ID NO: 476507 - DNA, 1000 bp, Homo Sapiens; identical to SEQ ID NO: 344868

SEQ ID NO: 476508 - DNA, 1000 bp, Homo Sapiens; identical to SEQ ID NO: 344869

SEQ ID NO: 476509 - DNA, 1000 bp, Homo Sapiens; identical to SEQ ID NO: 344870

SEQ ID NO: 476510 - DNA, 1000 bp, Homo Sapiens; identical to SEQ ID NO: 344871

SEQ ID NO: 476511 - DNA, 1000 bp, Homo Sapiens
cagattttaaaactttataaaatggggaaactgaggcccacagccaatctctgcgcaggccagccgaatgacagccaagtgccagaattgctggccatgtctcaacagagtcacattcaagcccaggcccttccctgctagccatgggtcctctgggttgcccccaccctgcccagtcctcctagacagtacccattccgcttctcacaggcagagagagaaccagagtgctgggtctccaggaactgccttatgcaagaccaagaagatgtgtggaatcacaccccggccgtgccagagccctgccagccctccctgggtaggagggagcccagactccctccaaagtaagagggtgggggagggagcctttgccagatcgcgccctgaatttggagaatgtggggcgggattccaaacagtctctgtggtgactctgggacaggaatgcatctggaaacaggaagcccagccagcaggaatgcagtgtctcagcacaatgctttgtgtgtgactcaaaagaacctccacacacacaccccaacacacactcccctccaggccatggcgcacccctcctccccaccaccgccatgcagatgcgtcctggcccaggaccagctcagaggaacctgagccctggcgggcacgggggcaggatctgacccaacacccaaagtagggggatgcccccttcctgtggcagccgcagtcccaagcctagagccaggccagggctctctgagtgatgcttgaaggaatgggaggggcagcccgtccatgcactcctgacaaggtaaaccactgccatgagttcctgagacagacagtgtcctgagcagggtcagccctcaggctgcccagtggcccctgcacttcccatggggaagtcctggcttcaggaagtgggtttcctgcaagctcagctggagctagtacccgtgggaggaagcacaaagctgagagcctacagagcgctggggagggctgtggtgacctc

SEQ ID NO: 476512 - DNA, 1000 bp, Homo Sapiens
tcaggaggaagccaaacaatttattatttcttgaacagtttgggtaaggaaggagagggcagggccacggtccttaactggaaagggatgaagaaccttttcagtgcagaacagcctgttggtcagaggtatgagattaggcctgatggtattttcagtgctgattgggaagggtcactgtgaggtcaaactaggagcatcccagagtcagtcctgtgccaggctccatagtctctaaaacaatcagtgccattaatctatgtgtgtgagaggcaggtcagcccttgtcagagttcccactgtgtagaaatagttcactgctagggacgctgtgtctctccaaggtcagtgtcatgtttctatgggccaggctcagtcccatatcagaggcatgcctcctttcccatgtactgctccattcttattcctcttgtgtcaggtaagctaccttttcctgtgcgttggggttagtccatgctttgggtgttggtttcctgtgtcagttgtggtttgtgttttctatgtctggaagggtcagtgcatgtcatttgccctgcctcaacccccacggcccctctactcctcagccagggcccagtgtgctgatggtggtgtagctaagcctggacagcgaagcaatggagggagtgggagggtcctcatcgggaagagccctggggcgagctcgtggaggccgggggcagcagcgagcgcaagtttccaggcaggcctggcgaaagcgacggtgcatgaagcagtagaccagggggttgacacaggccgaggcgtagctcagcaagtgaatgaaggagataggagcacccgagagtgctcggtgtgcacccgggccatcaaaggcgcgccacgtgttggcactataaactggcaaccaacacagaaaaaaaagcacaacgatcaccagcaacattcgcaccacgcgcttcttagccagcagcttggcctgggtgggccgggagccggatcccggcccaggagccgt

SEQ ID NO: 476513 - DNA, 1000 bp, Homo Sapiens; identical to SEQ ID NO: 161025

SEQ ID NO: 476514 - DNA, 1000 bp, Homo Sapiens; identical to SEQ ID NO: 344874

SEQ ID NO: 476515 - DNA, 900 bp, Homo Sapiens
tcagcgtgtcatctgccacaaaactgaaagaaaggtctgttttagcttcctacttcccataatcaggatgaatgagtggaatgaaggatacatgattgcaacagtttggcaaagcaggagtacaagtttgctctgctgtgtcctaagattccaagttgatgtgattatacacagaaagtaaatggcaaataacatgaggaaggaggtcacagtttgcaaagcttttatatggaccttggtgctgggatcttgagatcctttgctatggagccgcatcttcttgagatgtttacaaagagaacagattaacagcagaaaacatattaggctcagagtaaagggtatgaggtttgctagagtagttacagtcaagcttgaaaggtgtattgcattcctcaatttgatcttccaagtcacatttccttcatattcttttgtccacactctctcatccatggttatcacagcaagattacaaatcaaaaataccaagggccccaacagtatcaccagaacaacactcttaattctcttctttaggtggagagaaataaggttggagaaattggcaatcttgagcaaacaaaatatgctgaggctagcagcaagccacatgctgaaatggttcgttacagcccaggcattagaagcaacaattcttacttctaaaccatataaagcagaattaaacacagttgcataccaaaggaataacatgacccagagtaaaccaattctggagaccaccagagcagtgagaatttgctcagctgaggagatctttcgtgtgttaacccagtcaatgacatttactagggctatgaagccattggcaacatttccaagaacaaatgcaaacactaccagaattgatgaaatgatgagcagaaaacacatcat

SEQ ID NO: 476516 - DNA, 1000 bp, Homo Sapiens
tttttttttttttttttttttttttttttgaagaatcaaccatattaatgaatttattttgacatacaaacaatttaaaatggatagaatatataaagccacattacaaaataaaaacaattgtggtcaatatgcacaatcttaaaactcagataaatatatatatacacaaaatcaaagcaatgtgattgtactataaattgtattaccactctatgaagaatcatgtctggagaagtcctctagtccctccacctacctcgggcttctaaactctgtagtaagctcttgcttcatgtcgttcaagggtcttccttgtttgctcagtttttctgtgagactgaacacaaagaacagacatcggctgatttctacttggacaatggcccaggcacaggtgctgtagtcctggttttccaggtaatcatggatccttcggaagtacattttaacttgtaatctaaggttatcactacccaaagtaccacttagcttctctgcttccagtcccatgagtgcttctaggtattctagctgttgatgaagttgaatgaggaatttctccgtgtggttttcctcccaaccatccagagaaatatttgccctgaagaggctgaagatctgctgaagcatctcatggagaatggccagagtgtgtcctttttggtactgctgaggactcaaagacttctgaggaagcagaaagtttttcctgtgtggtagacactgctgaattgacaaggtttgcaacttattcaagagttttaaactttcttgattcacttgtctttgctggaagataatcagtttcaaatctagagagaagatagtggtagaggccagcagcaccaacacagttccaaagaagtgcttgataatcatggtgaaggtcaaatatgctacttatccctgcatagacttagggaaattccagctctagtgaatgtttgcctttcatgcatctcagattattttggagagtgttctcttttgttgcttt

SEQ ID NO: 476517 - DNA, 1000 bp, Homo Sapiens; identical to SEQ ID NO: 344875

SEQ ID NO: 476518 - DNA, 1000 bp, Homo Sapiens
ttttttttttttttttttggttctcccatacattttaatatgtattatatttaaatcaaacatcattcatagaaagcatattacatacatgtttatacataagcattacatttttttaataaaaatgtatacaggtggggcactgttttggtggaaggcttggagtttttttaatgagtttagagctattagataaccactgagttaaaggtaactatgtacacacaaagtgtgcatccaagaggcatagcagcagcagaagtctttaaaggcttgtacaccaggaagaaagatgcatcctcttgccttgtggcaatcattttcctttagaaaacaggccagcttcacctgggcaccctgctgcctttcaaggctggtgattgctcggatagtgattcccagttgttggtgtttcatgcagagttgtatgagagtcctcctcttttctttctttaaaagaagttctttctttgaagaaatccgatacatatacagcaactaatattgcaaccagagctccctgaatgagtccagtcaacacatcgctccagtggtgtttataatcagaaactcgagaaaggcccacataaatggatacggcaacaagaccaaattgcagtgtggggcgtaagagtcttgcccagtctcccttcatcctggcttgaagataaagtgccacaaacagcatgcagtacatggaaaacgaagagtggcctgaatagaaggacaacctgccttccttaactctttctgcattccctcgacatatgtagtattcaatgtaaccatcgctgcagttgatttttgaccaatctggatcacaaacatccaagaagtgaggccgcagtctgcctattgaatacttggcaatgtcagtcagggactgactagcagctgcaccaaataaaaaggttccaatggctttgtaaatagtggctatgtagttattcctgataaaggaatttgagtgcaaaaggttacagtaaacagacagggtttc

SEQ ID NO: 476519 - DNA, 1000 bp, Homo Sapiens; identical to SEQ ID NO: 344876

SEQ ID NO: 476520 - DNA, 834 bp, Homo Sapiens
tcacaaggcgtcccccgcgccgccgccgcacgggctgaccagcgccaagttcgagggtttgtgcttcttgagcagccgcgtgatcttctcgtcgtccgagttggggtccaggggccggttgtattcgtcgtcgtcctccgcgtccgagccgcccaccttcagcttctcggcgtccgagtcctgcttcttcttggccgacgccatctccgccgcgtgccgcttgcgccacttggtccggcggttctggaaccagaccttcacctggctctcggtcatgcccagcgagtaggcgagacgcgcgcgctccgggcccgccaggtacttggtctgctcgaaggttttctccagcgcgaagatctgctggcccgagaaggtcgggcgcgagtgcttcttcttcccgtccttgtccaggacgccgccggccggggccgggccagccagacgcgggtccctccagggcgcgccctgcaccacgccgggccagaagatgggcgggcgccccggcagctcggccaggggcttggggtagccgcgcgccacagcggccgcgggcccgaagtaaacgccggcggacgacgcgagcccgttgagccggggcagcccccccaggaggcccccgcccgccgcgcccacgggccggcccaggatgtcgctgatgccgtgcggggtcccgagcgggagctgcgcgcccaggccccccagcgcgggcgccttgaagccggccggaccctgcagcgcgtaggggaacagcgacgtcttcatctcggccatgttgtgcagcgcggccagcggggcactgctcagcacgaacgcgcccgggcggttagtgtccat

SEQ ID NO: 476521 - DNA, 1000 bp, Homo Sapiens; identical to SEQ ID NO: 344877

SEQ ID NO: 476522 - DNA, 1000 bp, Homo Sapiens
aaaaacaaagaaggacacatttattatttgttgtgcacctttagaaatggtccacaggtccactgcagtgcacaagctgctgcatgcacaccgcacgtgacaatccagtctgcctgactcccaggacagcctgtgtgatatgcaaaatgccattcccatgagggcgcatcatgtttcccaggagctctgaaggacacagatagagcttgtgctctaggctgcccccctgttcccgtgctggctccatgctggtgtccagaatgagccagttcacactccagtgccacgtggggggagaagtggctcccaaactcccctgctgacctccccccggcccctaggtgtaccttccaagtcagatgacagtcataggctaacatccccagctttgcctggaactcaggaaaggatacttacgggtagacagaaagattctgcagtgggcttggacttggccattgaagaccctgagaggacatcttgtccaccctctccaggctaggccctgtctgtgctgcctgctatttggaaatatctgtctagagtctgcgtctctccctcaccagatgtcggctccaggagggcagagtccctgtgttttgtttgtcactggacttcaatgcatcgtacatagtagatacgcaaaaataaacttgtcaaagaagtaaataaatgcatattgacaacagctactggatttaagcacagcttctggtcctcaaaaccacactgtgatacagggggcaaggcacatctcacccccacaggacagataaacaaattgagactcagagatttatgtgagttgcctgagcacccagcaaggaggaatgagccatggtcccttgtggcttctcctgtgctccctcagtcttctaccctggagggagcagagggggtctcaggcacgacagcttctgccaggagctgaggcgggcccagcatgtggggtccagacctttactccttagtctgctcgttgaaggaggctgagctgtgc

SEQ ID NO: 476523 - DNA, 1000 bp, Homo Sapiens; identical to SEQ ID NO: 246604

SEQ ID NO: 476524 - DNA, 1000 bp, Homo Sapiens; identical to SEQ ID NO: 337526

SEQ ID NO: 476525 - DNA, 1000 bp, Homo Sapiens; identical to SEQ ID NO: 344880

SEQ ID NO: 476526 - DNA, 1000 bp, Homo Sapiens; identical to SEQ ID NO: 161026

SEQ ID NO: 476527 - DNA, 1000 bp, Homo Sapiens; identical to SEQ ID NO: 336993

SEQ ID NO: 476528 - DNA, 1000 bp, Homo Sapiens; identical to SEQ ID NO: 344882

SEQ ID NO: 476529 - DNA, 1000 bp, Homo Sapiens; identical to SEQ ID NO: 344883

SEQ ID NO: 476530 - DNA, 1000 bp, Homo Sapiens; identical to SEQ ID NO: 344884

SEQ ID NO: 476531 - DNA, 1000 bp, Homo Sapiens; identical to SEQ ID NO: 344885

SEQ ID NO: 476532 - DNA, 1000 bp, Homo Sapiens; identical to SEQ ID NO: 161027

SEQ ID NO: 476533 - DNA, 1000 bp, Homo Sapiens; identical to SEQ ID NO: 344887

SEQ ID NO: 476534 - DNA, 1000 bp, Homo Sapiens; identical to SEQ ID NO: 161028

SEQ ID NO: 476535 - DNA, 1000 bp, Homo Sapiens; identical to SEQ ID NO: 344889

SEQ ID NO: 476536 - DNA, 1000 bp, Homo Sapiens
tcactcaggacagaagttggtggacatgacactggggcttgcactggccatggcagtagcatcatctgtggtgtcaattatggcctgggctctgtcttccatatctttcaaagcatccatgtaccaggatggaaaggcactagggatgatactggatagcttggataaaaactctaagacttctcttgctggcctctgaatgggctcttggaccccacaaaaattcataacgtggaggagcactgttgggcacctcccggtactccaggtactttctctgcacccaatgtatagtgagcagctttctgggatccccatatataaagtgctccctcccagcacacacccctattgcactcaacacttcccagatgacctcctcggggacacagctgccctttatgaagatcatactgagaataagaatcaggagacagttcttgggcatgccctggtcatcaatcaggcttccctcataggtgaggtctaatgtgtcttcaaagaaataggagtggttgtcggggtccatatcagtcagggcaatgccaaaaattagctctatgaactcatgggctttcccgaagatcatgggaaaatagtccttatacttcttgatgacagtcgtcagcatctctgcctttgtgacaggctcttttgtttgatatttgaggagaagaaactgcaccaactcagccaccttttcatccagggcatacctgggcaaggattcactttctggcaaggcatgccaagtagctgtatcctcctcttcactgctggactcctcatccaatcgggtccacaaaagaggggatgagcaggagtctagaggactctggggaggactctgcggaggaccctggggagagatcttgggaggaccctggggaggaatctcaggaggactctggggaagaggtggcatcccagcagcaggcatatcctcatcttctggaacacccagaatgagagtagagggtaagggtgaggacaagggtga

SEQ ID NO: 476537 - DNA, 1000 bp, Homo Sapiens
gtctcgagagctttgttcttgagtgggtctgcctcgggggctttagaggagaccccagagggtggccaggaggatgggggccagggccagggtggccggggtggcaaggccggtgccgttgcagaggtcgtactggcagcaggaggtggtggacgcgtgcttggagtagccatcatacacagtctcgaagcagcggggcacgcaggacttactgaccttcatcctggtgggggtgtagtaggtgcgcgtggtcatgcagtaggcaaccatagccgggcagcgcatggggttgaagcagttgtctccgttgtaggcacacacgtggcagtccaaggcctgggccagaggtaagcccatgaggaccaccaggatcagggtgagcaggggcgtcatggctgcaggcaggagggcagcgtgggagtggggaggtcaacagcagctagccctggatccaactcaggtggcgcacagaggatccaactcagggtggtgcgcagaggacgtggggccggccctgcctcccggagctcctggtctactgggagtgctgcaaccgtgttcagcccggacactccgcaggctatcttcaccgcgtcccgcggcagcccagccttccccgcagccgcctccgcccactcgcccgcgccgcgtcgtttgtcggccggcaccagccttgcggccccagctccgccctcctgcagcccaggcccagcagctccggaactggcgccctttggcgcacccgcctcgctgcccatggcctccgcctgcctcccctgcgctcagctcccgcttctggtccctgtagcaaagctggaaggcaggcctgcaaggcagccccttgctccgtggtccctctcaccatcataatgttcatattaaataattatctttacataactttgaatacttatgttattggttctgtttttggcaaaatgtaataaaatttcatgggtccgaaagttttcattttttccaatgtgagaaagaaaaataa

SEQ ID NO: 476538 - DNA, 894 bp, Homo Sapiens
ttttttttttttttttttttttctacaaatcactttattggaggaatagtataacagaagaatataaagatggaggtgattttaagggcaagaaagcaggagacagctgactttggtctttggatccactagcctgggaggaaggcagctcgtggcttagttctgcttgttttcatttccaagggtatgtgtgtcaaaaaggtactccgccaggccagcatccggggcccccatcttcactaagttgtgcacgtggtcacctagttctttgatagacttcacctgctcattcaggtagtaggtttccaggaaatcgcacaaatgggggtcacctttatctgaggctagagcgtgcaattccagcaacgactggttcacgttcttttccaagagtagagcacactccatggcatgcagcccgctttcccagtcgtcctgttccggcttcttgatgtcctgcaggcggatccggcctcctcgctggttctgcagcctcatcagcttctccgcgtgctcggtctcctcccgggactggtgaaggaaatacctggagaagttgttcaaggccacgtcatcccgggagaagtaataggccatggacaagtacacgtaggacgcatagagctcgaggttgatctggcggttgatggcagcctcggagtcggggtggaagttctggcgcacccgagaggggccggcggcgggcccggtagggtcccgggaggaggcggctgcggccagggggcggcggggggcgatctgcctggggtccaaggggcgccccggggcccaacgcagcgggagcgcgaagcagcagcgcaccgggcgcagagacgccagcgaagggctgatgtgcctggagaggagcctgaagcaggacagcatagcgccgcc

SEQ ID NO: 476539 - DNA, 1000 bp, Homo Sapiens
tttttttttttttttttttttttttttaagaaaaaattatcttttaaaaatcttagttagtgaaacatataaattaagaaagaactggccatataaccaaaggtgttttttgttttactttaaggaaatatcgaccataagggtttaataaacaccattcaccacctagtttaaatatttaaaagcaatttactactacaggcaaaaggtggagtttactagtttaaagctaaagtattaggaaagtaggagacactagctaatgaattttaacccaatgtataagtaaagtttttctaaaattatgacatgtcaacaacaaagtgtagaattttttaacaaaaaaatacatatagacacaagtttttagaaatacatctctatgttaaatgaggtacatctctactctaaatgaactgcaacattaaatagaaaatacatgcaaccagcaaaatattaaagacacacatatttaaagcacagtagtgatgtcattataagtgaactataccacgagaaaatttagcaaatgtaaataaacagtaccaaaatcaccagccgaatgagcctctgaataggagccgtgaaaatcaatagctcccatggtcctaaggaatccttgttcaaggcccagactatgccagctgacatctgccgccatgtgagaagtaattccaaacaagaaagctaccagtttctctgtgtccttctcccagggaaggggatagttctctcggatataatgaacgcttgcattaagaaacggagtccagtgagtgctctcagacacatcatggaattttcctcctttgcagatgctagggtaaaaacaatcaggaaacacgattccagcctgatacgcatcctggtgttctagtaacagctctctgtagttaacacgcccattgtgaagctgaagaaactccagagctctgtgtcctatttctacgtgtgttgaaaggccacacggtgaacctctatggcagagagaacccaacat

SEQ ID NO: 476540 - DNA, 1000 bp, Homo Sapiens
ttttttttttttttttttttttttttttttttttttttttttttttttttgtcacaattcatttttattaatagaaaataaacacttattccagtttcaaagttgttatacttgaagttgctaatttaaaaaaacgaattttaaataatcacttaataatcctgctttgactaagacaatgaaatgtggctttaaaaaaaaagtattcagcaccatttgctcataggtctttcagagtttgttcttaaagtttctggaactttcctgtctgtaaagtaacaggaattactgagctacattggaaagcctctctgggacaggcagtggggagttaagcagtcatcataaaggaatcagtgtacattcagcatggtgacttgactacacaacaatcccttcccctctactgtagctcaagagagacatgcttctaaccactgaggtatgaggagtctcagactgttatttgctgttagaattggtcttcccagctaataacagtacatctctggcacagatgctattggtccttaatgtcctgtgattttaggaaatagtttggatttagttcaatttattcagaaaccaaatgtgtttaattagcttcactactctggcagagtaagggtatgctggtttagtatctttataaaatatatataatgtataggtaaatcatagtcttaaatcatacctaaaatactgtatcatttaaaccaatatctattttaacaaaatgtttataactaaaaacagctgatgaaacactaaatccaaaggtatgacaaagaggactcagctctgtgttgcttaaagaacttttaaaaggcatgtgcccataacgtcattcgaggagagggaaggagccccccttctcctcctccttactatagaattcctgttgggggtgggccagaaattagcacttctaaatatttcagagaagtccaaagtgttaaaaaaaagtcttttatgcaaaagaacgtctttctgcatcagt

SEQ ID NO: 476541 - DNA, 1000 bp, Homo Sapiens; identical to SEQ ID NO: 344890

SEQ ID NO: 476542 - DNA, 1000 bp, Homo Sapiens; identical to SEQ ID NO: 344891

SEQ ID NO: 476543 - DNA, 1000 bp, Homo Sapiens; identical to SEQ ID NO: 344892

SEQ ID NO: 476544 - DNA, 840 bp, Homo Sapiens
ttttttttttttttggagctatgcaagcctttattggggtccgcggggtgtggggtgagtggccaagactggcctctgtctagaaccctggagtctcactggagatccaggttgggggccacctggctgaggaaccatgagacaccaaagatgacgccgagggtcttggggatgtccgggtcgtctgcaaaggcctgggcgccttccaggggcaggtgcaccacctcaatgagctcaccctcctccaccaggcccccacctggaccgctacgctgggcatctgtcacctctgtgtagaacatggtctgtctggagccagtcagtcccactccagaccagtatgtggcgacccggcgcagatcagagggggccaagtggtagccacactcctcccaagcctccttgcaagccacttcctccagcgagagcccaggctggtccacgaggccggcacacagctcaactgtcacccccgctgagccgggcagggctggctgtagctcccgaggcccgtcctggtctacagctgctagggaccctgggaagcggcgctccacctcacccgcatacacagctggccggaactgcttcaccaacaccaggctcctccgagaagagttgaataagagaacggtcacgctgtcatgcgtcttcatgaagtcccaggacttctgggcaccattctggcggtaatgcagcgtgagcggccgcaggtagggtgaggcggcgcagcggcccacggacgccccctcgatgcgctccatggcggcgcccggacaggcgggggccgacacggggcggcgccctgtcccgacaggagccttcgggcgggcgcgtgac

SEQ ID NO: 476545 - DNA, 1000 bp, Homo Sapiens
tttaattttgcaactttaatgtaacactgatacccaaaacatgaaaacacaaggaaaagcacaaaatgaaagcaggaagagcaaagagagcttcatcttgcatgccacctccgactgacaggaagaagccgcctagggtgctgtgtcgagaaggaatctgagaggaggcgctctggcttggccagtaagatcgctgcagttcgtcaacggtgctggatccaggagaagaagctggcgccagctctggcagcatttctggtccggatggtggagctggtgctggggccatctaggacgctggtgctggcccctccattggtgccactgctgacgccagctctccacgtggccctcctgttggcacggttgctattcagaatgtactgatggtatctggcccagaaagcaaaggggatcctggcccaggcatcgccaaaatctccgtcctcatcccaggtcaggagctcgacttgtatgtcatcccagctccaccgtccaatcagcgcttcatccccgatattcatctgggccctcatctgggccctggcatgttcctcggccatatccacatccattgtcttgaaagcatcatccacagcctccaagaaatgagccttccattcccgggggtctcggttctgattctgggcgatgaatctcaggaccctcatcttgctggtctcatggcgggctcgcaggccccagaggaattcatactcaggtgggttgctgttggggatcttcttgtattccaggtacttctgcttcacaaagtcatctgtgatgagcttcctcagatcgccgaggaatgggtgcctcaccccagggcgcagtcccatcttgcgtagtgcctcccagaggacagcctcgctggcacggttgccattcatgaagatgacgcccagaatcaccaagaggagactcagcctgggagtgtccttggtttttccaaggaggcgagctgaggagtcccgtgtgcagacaagaatatacaggtgtt

SEQ ID NO: 476546 - DNA, 1000 bp, Homo Sapiens
tttttttttacgcatttcacttctttattggcagcccggagcctggtctaggctctcccaggcgcttacacgtcccaaccccagaccgcgatgcccaaagacctcccggacacccccggcctgctcgaccttcgaccctcagggcagagaaggctgccagccgtgcctgctgacccactggtcaggtggagccgcagcgcctcgtgtagtcctgaatggaggcctggaagtgctctgtgctgttgaggtctgggcggcagaggatcacgtagcacttaggcagaaaatacccaccgaagccgctgctcaggctgctcagcccagccatcatgttggccgcaggcaggtacttgccgtcgtagacgctggccgtggtgaagaaggcgatccaggacacgaagttgaagagcaggctgaaggtgacacatttggcctcgttgtagttctctggcaagtccttacccaggtagcactcttgttgaggaaggtcccagccccacagggcacacactcaaagcagcagtgatggaaacccgtaaccactcgctggtgcccttcaagacagtcgctggaacacacagacttaggcacctggttgtcctttccgtgccactggattttggtctcatttatgtttagctgaactggagaccatgtggaggaaccgaggaccgtgaaggtccacttgggtccattccagtcccaggcaattatgttatagctactgaggggatctctgttgtcattaaacgccacagtgtccttgtgtagaaggaaatgcaccttgtggatctgctccaaaagcatgggcaccaggaaagggctcagcagggcggctgtggtggcagcacggttggtgctgtcaggcccaatcactgccagcaccgtaggggaatagtggagaaggtctccttggagctctatgtggtgttgccctggcagggagagcactctcagcgtggcatacacattggcagagtcagaacacacatcatacagc

SEQ ID NO: 476547 - DNA, 1000 bp, Homo Sapiens
tttttttttttttttttttgtgaaacaggtgccctattttactaaaaaccacatatacattacattttacaaaacagcaactatctgatctctcggtcccttccttaaccccataaaaagaaggggatatttggggaccgacgggaacaggttcccctccaaatgctgagggctacccaggcatctccagactcctggtccagtgcagggcagggggcagcggagcccgctcactgctcccatcagcccagggttcctggagcccgtccagagccctcagtgcctaaccagggctggagggaccacctgggtgggcctcagctggactcacagcagctccctgcctgggcggggtccggcctcaggaggaggagtgcgggtatccatagtggttgtggtcagcctcgcccagggtcaacgtcagtgacaggctgggcttccgttccagctcctcctccttcagacagtgctgtgggggtcgggctttgaagaagtctgagatgtagcagacagtgagggcagccaccagtgccccctgcaggaggccaacaaggacatcgctccagtggtgtttgtaatcagacacgcgggtgtagcccacgtagagggcaaaggccaccaggaagaactggactgtgggtcgcagcagccgtgcccacttccaacagagtcgtgcctgcacatacagcgccaagaacaccatgcagtacatcccaaaggaagagtgtcccgagtagaaagacaacctggcctcggtgacatcagcagggtttcccctgcacaccttctccagctgcacatagaccgagcagttgacccggctccagtcggggtcgcagacggctaggaagttgggcctcagacgcccaatcatgtacttggccaggtctgtcagagactggctcacggcagccccaaacaggaaggtccccagcaccttgtatacagcagccacgtagttgttgaagtccgagcgagaatagagccggtctgtgtacac

SEQ ID NO: 476548 - DNA, 1000 bp, Homo Sapiens; identical to SEQ ID NO: 344893

SEQ ID NO: 476549 - DNA, 1000 bp, Homo Sapiens; identical to SEQ ID NO: 344894

SEQ ID NO: 476550 - DNA, 1000 bp, Homo Sapiens
tttttttttttttttttttttttaacatttttaaaatttatccttttaattcttgaatgagtaaggacaatattttgctgtttattggtataaaacagccctgtcccaggtatacaagggtatacgtaagtctgtaacatcattagctacagtgaatttactttactagaaagcatagcaaaataggattaactaaagatatatttttaataagaaaatgctttgaaataacatgaaatcaatgaacatttgactgtacaatttactcgtcaaagtatcaacgtatgtcagctcatgtatgaattacactagatcattctaaacacagccatgtgctcaggaatgtgtgaaataactcataagctattctctaagggggtgtactgaaaacttctaaaagtaccccagatatttggtcatagataagagatatactttaaggcagccttccaagtgaatgtaaacttttcggaagtggcctttccagtaacatattactattgtgaatactctgtacttatgtgtagtgctgttggatattttttgcagcacattatcacactaatcatcattttgtaaaaaaaaaaaaaaaaagcataaaaatcttgcaattataaaaatgtctggagtgcttttactcatgagtgtaaagcaggcactttctgttgacttatctgcaaatcctaaatgttttctccttatttatctttagttagaattgtgtttctaatattgtgttctaaatactgtgttcgcatattgagaaataataatttgcctaaaatttggataatttaaatttgagtttagattttcttttaataggtcatattctacagaagcattaaaaataaatagtgctactctttgaacatttttcaatatgatgacatttttctgtctatctttctccaaaacagttttcagaacatatgaactaaactgactatactggagaagtggatacaggccattatgagggtccccttgtcatgaccaa

SEQ ID NO: 476551 - DNA, 1000 bp, Homo Sapiens
tttttttttttttttttttttttttcattttgcaaatttaatgtaactctgataccaaaatatgacagcacacagaaagcaaacaataaagcaggaacagcaaacagatttttccatcacatgacaccctcagctgattggccataactgccttgactgctgtgtggacaaagattccaaggatgtactttggctccatgggaaggactactgcaatttattagcggtatctgtaaacatggggaataaatctcagccctggcttcagcctcagccacagccacagctgcagcttggacttccatctccactgcctcgcggtactgcacagcccagtccttggggtctttcttctgcaccctgcatgcaaacttgaggactttcatcttgctagtctcgtggtaggagcgcaagccccagaagaactcatattcaggtggtctgctgttagggaccctcttgtactccaggtacttctgcttcacaaactcgtctgtgatgagcttcctcacttccccaaagagtgaatgcctcaccccagggcgcagccccaacttgcgcagcacctcccagatgacagcctcactggccttgttgccattcataaaaatgacactcagaatcaccatgaggagacccagcttgggtgtgtccttggtcgttcccagtatgcctgcagaggattcctgagtgctgatgagaatatacaagctactttgcttatcaatttctttcagattgactcgaaacatcttctccagagtgtagcttgctcgttcaatgatttctgggaaatattcatcatattcttggatgacatccctcagcatgtctgagcgtttgatggggatctttgtctggtccttaaccaacaggtatttcaccaacttattagccctttcttgtaaaatggccacatctcgcggtggtgcaggcctccggccccatgggatccgcctgtaattactgccacttctctcatccccattcagatgcttgg

SEQ ID NO: 476552 - DNA, 1000 bp, Homo Sapiens
tgcatgactgctgactggcactctttccaatgactgtttattgagtgtcaggaacacaactgtgattatacaaaatgaagtggacaaacggtcttgcacaaatgacgtacatttcacagttaatcgtgaaggttagaaaggttaacaagttctattagtacttttcataagcagtttgatttctgaaaaatacagtaacataattttagtaactactaaaatttctttaaaactccctatcaatctgaagaacaaactaaaaacctgtttattacatgaatgctacttatgagaatttaaaatatgggttcacttcctattttccacaagtctttgacttgtttatttactaaattaacagaacgtgggatgcagttttttaagttagcaacttccttagggttactgggaagtacagtaattatgaaaaagggaacacttcaattattgtataaaagattgctttgcatactgattacttcttgaaccccaaaaagtgctatttagaggcaagggcccattttgtgcccattaaaagaaatatacaggtgaatgtctgtctcatccctctaatcatatgtaataaaattatatcgctgtcaataacagcaaagataatgatatattaattttaacagcagttagaaccagaaggaaaaggctgttatacagaaaaacatacaaatatgtaggtagaagtgaaaaactgaagaatgtggagtgtttactgtcccgttactcacacagacgtgctggattcaacacccacgctgaatctccatttattccacggaggtggagttcaccatggttcgactgcccaccagatccccaaatgtcaaagtgaaacaaaactcagtgaattctagatgactgttttacttcccctaaagaagttatctgtaaataagaaaaatcaactgatgggggaaaaaaaaaggtctgtcatttgtcaacagatggacgaagacaagcttttgactcaaagagaacctgccgc

SEQ ID NO: 476553 - DNA, 1000 bp, Homo Sapiens; identical to SEQ ID NO: 344897

SEQ ID NO: 476554 - DNA, 1000 bp, Homo Sapiens; identical to SEQ ID NO: 344898

SEQ ID NO: 476555 - DNA, 1000 bp, Homo Sapiens
tttttttttttttttttttttttttttttttttttttttttttttttttgtcagttgaaacatacaactttattgatgatacacaaatgaagtctttggtggataaattcaagtcaaaacaaataatagaacagtaggccattcataatggacaggtttactgtcaattcagaagaaccagtaaaaatatttctatccaagcagcacgattaaagtcacaaatatgttttcagtacaagaggtctatttatttggtattcataaaatggttcagcttaaagctggtgactgtcacagataacatcactctggatgatacattattcaacactggcagctgaaaggatccctttactatatgagcaagtggaaaagcagtaactttcaattttcaacgcttccacactgcaaaatcatgaaatttcttcaagtcttttgacggtacataaccaatcagaatttgttcactagttttataactttcactttcactaagaggtcatggtgatttgctaaggctctaattttcttaacacacactccagatgtagtgcataagtaaaaaagggaacctttattgaattctctatagttaaacacttctgctctgagattgtcatagataatctcaaatagagtaagggcattaataaggatttctgattccacgtaagaattatagagggaactaaatgatgctggcacttgggtactgagaagtttcttcaacatatctggattttcagcaaaattcgaaaggattttcaaaatctcaaccttgatttttccacctccctgagatagcaaacggaaaaagtttgcaatggaattgacaagcaggtgctggtagtcattagtaatagtcatgtttgttagaaattttagtccaactacttgaactgctgagttcaggttagaggccatgatatcatccatcactttattcatgtacacctgaagccggccctgattttcataattctcactcaggttattcatg

SEQ ID NO: 476556 - DNA, 1000 bp, Homo Sapiens; identical to SEQ ID NO: 344899

SEQ ID NO: 476557 - DNA, 781 bp, Homo Sapiens
ttttttttttttttttttaagcattttggttatttttagttaaagaaaaacagctttctccaagggcgacaaagtgaactgaaggtcagaaggaagctgggtgcgggcttcctgcaagctcttgctccaaaacctggaagtgaggagagggcgctccggagctctggggaaggttggtgcacacaggggttccgttggtgggggagaagagccgccagcccacacacggtcactggattggtgtgagtgggttccaagcgactgccatgtgctagtccactgacatgattgacattaacattcttggggggcattaaattaaggaatgacacagggagccaagagagtggcttattcggttggattctgaatcacaatcaggaaatagtctttatctggtgcaaccataatttcatttttcttggagcgaattcgaaggaaggtgagatcgttctgggggtcgatgtcacgcacggtgctccgtgccttcaggatgaagctgtgcatgaggctggcatactgggtggtggtggggttgtccatggtgctcttgatgggaatgccttctgtgttcacgacgatgattccctgcactcccttctggctctgcagtcgcttcagtgtctcctccacctctgcccagggtggagtgcagtggtgcagtcacggctcactgtagccttgacctcctgggctcaggcgatctctccacttcagccatttccgaccgatccggtagccccgcgtagcgaacacttagcgagtcctgtgcctttctgcg

SEQ ID NO: 476558 - DNA, 1000 bp, Homo Sapiens; identical to SEQ ID NO: 344901

SEQ ID NO: 476559 - DNA, 1000 bp, Homo Sapiens
gagacagagtctcactgtgttgtccaggctggagcgcagtggcgcgaccttggctcactacaacctccgcctcccaggttcaataaattttcctgcctcggcctcccgagtagttgggatcacaggcatgcaccaccgcgcccagccaatttttgtatttctagcagagacggtgttttatcatgttggccaggctggtcttgaactcctgacctcagctgatctgcctgcctcagcctcccaaagtgctgggattacaggcgagagctaccatgcttagtctgtcataatatccttaatacaaaagtgtgaggattggccattataagatctattctgttgcaatgctagacttactacaataaattttacaagtatgtaaatgtgtcatggctaggaaaaggattctaatgatcagatcttcctcccttcagtagggtggctggaataaatttagcataagactaagaagattataactttgtttcaattattccctttcagggtgctctgtatcacacatttgaactatatagtacatatgtagcagggagtttgtggcagattggaaagctcccaaaatctctcaatggggttgggagctagaaattttgagggacctgatttcctgaatgtgctgctattgtagggctcctcagatctcagtgatgtcaggaaggagcccaacaggttacctgttggttcagttatgctttacttgtcttttcacttactcacctaataaacgatatgtcaacctgatcctaccagagaagtccacaggctgcctgaaaaattatattacttgctgtttacttcccttgatggagttttaggcattaaaggatagaaagtacttggaaaatccaacaataacctgtatgtattaggatttttgtgattttgggtgcatcaaactctttttatatattattgggtaatcaaaatagaaaataacttttgatagttaaatgaacaaaagagggaaaaataagctaaa

SEQ ID NO: 476560 - DNA, 1000 bp, Homo Sapiens; identical to SEQ ID NO: 344903

SEQ ID NO: 476561 - DNA, 1000 bp, Homo Sapiens
aaaacacattaaaaactttattgtaagtatcaacatctaaatttgcatcaatttgatacatcgttgctcattttgcagaacataacagttgcacattgcaagagtcaacttgcttcgggtcttttcatgctcatggcggtccacccctgccttccctctccctgacctgcatcctgtcctccacagtctgccctgcctcctgtcgccacaggttgaagacccaagccctgaggagaacctgctgccagggggctggctggctgcgagccaggagggccaggcagttagccctgccacagggaggggcaggcaagggatcgtttctcctcttcctgggctgagcccgtgccaggccagccacagagtgccctagtcagcccatgtggctccaggaagcctgctgttgttctactccatcccatttcacccgcagcctagtggctaactccggatactctgagcaaaattaacccaagtttcatggagaactccagaaccttgaaccagtgcatggttatcaccattctttgttactagatgtaggagaaggtactgcagagtcctctggcctggaacagcttgggggaggattcagctccctgtttctccctcactcccaggagattcgaaaacaagtttgagagaaaaaacagtaactaaaaaagtccatgaagaaggatctgacatgtcctttgtgaagtaacattaccctctccccatcacgacgcaggagatgacatgttacagtaagagggttacagcaattccccatctggagtgccattcaactgcctgcagaaatcttccattttaatgcattttaaacacattcaaaacgagtgctgactctccaacctagggaaaatgcccaataaaaaatatagatagaaaatacatgctaatgtaatggcaaacttatctccacactaaaacggcaacagtcttgcggttgagggcaggggtgcggtggaacctccctcttcccacaagaacatcagca

SEQ ID NO: 476562 - DNA, 1000 bp, Homo Sapiens; identical to SEQ ID NO: 344904

SEQ ID NO: 476563 - DNA, 1000 bp, Homo Sapiens; identical to SEQ ID NO: 467311

SEQ ID NO: 476564 - DNA, 1000 bp, Homo Sapiens; identical to SEQ ID NO: 344905

SEQ ID NO: 476565 - DNA, 1000 bp, Homo Sapiens; identical to SEQ ID NO: 161031

SEQ ID NO: 476566 - DNA, 1000 bp, Homo Sapiens
ttttttttttttttgactgaaaaagaaatgttttaataaatacaaaactctccaataatgactctgctcagctcaggggcagcaggagtggagtgtcgggggcccttggtgctgagtgaagataaattaaaaatcccaacaagccagtgacattatgtacaggaggaaaggggtggggcttccaggacagaggccgagggtggcagggcaggacttggagtggctgtgacctcggtctggcccagctgcctctcccccttgtggagctgtggttcccagaggtagtgggggtgggagtagaggcaggacagaggagcaaaggcactgggcttcccacaggagaatgcaagaaggtcctcgatgccaccccttccccagctcaggccccatcctcttggtcacttggccctctggctgctccctaagagccttcggcttctttctccagctctggatcagttctggtctctggggctggccgccggtgggccgtgcagcgggaacagcatcgactctccttccccgagccacaggacagtggcagtgaacagtcatcccgctcacagtgaggcacccctgccccacatctgcaggtgatacagctcatctctccaaaagggggcactgaggggtgccagctctgactctctgggaaccactgcccagcaaaacggcagccccggggcccatcagcctgcatggggtcccccagctgggggtgggcccccgaccccactggacactgtttgcagcagtcggtggggttgacacgcacaggctgggcacaggccagccggggacactgcaccttctcacagtgcacctctccagtgccccccttgcaggtgcagacagcacacttaattaagccaaaggggggcacaacggggtgccaccgcgtacccgctgcccgccagctccggtcaccatcaaaatagcagccctctcctgggtcccggctccttggcagccctggcaagtctctgacatcttgtttctc

SEQ ID NO: 476567 - DNA, 1000 bp, Homo Sapiens
tttttttttttaacgttttcaaaatctatttttatttttcttcagtattacctgctgttcccaagtggctgggtaatctatgggttatattttcatttaccctcaaagctaggctgccagtggaagctaagaataacacaattaaattcaagtttctctagaaaatatgacaaatcaaattttaagaaagtgtaacttgtggttttgctttggttcaagatggctgatctgagaatatcaaagcatttaattcaaactaatagtgtgtcctcatcctaggactagaaggtaatttttcttttaaggagggaaaagaagagcaaaggggaaaaatccctgaatagtgattcccttccatgaattatttcaattctccaaaatagacttttttttttaggaaggaacacctgactctgaatatatttcctcaaacggagtcgcttttgaacccaaagagtccagcaaatcaggttgcaactcctgttccaagctggccagagagctgagggatggggcccctccacactccccttcctcgctgtagacgtgaggtaggtagccggggtcatcttccagcacattggcaacatggagtttctgattcaatgtctctgccatccttccttccaccggagccaggagttgtctgtgcattgtggcatctgggtaagcaggagtagagtgtatgtttttcacacttcttggctcaaagggcttgccataaccccagctccccagagcacagcgtgcttgggctgactgactcgctgcagatggaggcacttcctcgagatccttaactccctgcgtgggtcctgctgcagctgtgcagatgagcagagccggcctctggccttcaacatctgaccatgtctgggctgaagtgcctttgctctccgcattatacatgaccagtgtttggtggccttcatcattggatacagagcatccatgcctcttaggttcaagcacaaaatagcatcgcaacagaaaaagcaga

SEQ ID NO: 476568 - DNA, 1000 bp, Homo Sapiens; identical to SEQ ID NO: 339215

SEQ ID NO: 476569 - DNA, 1000 bp, Homo Sapiens; identical to SEQ ID NO: 308655

SEQ ID NO: 476570 - DNA, 1000 bp, Homo Sapiens; identical to SEQ ID NO: 344908

SEQ ID NO: 476571 - DNA, 1000 bp, Homo Sapiens
aaaaggcaaacatttatttttatttgcaaatgcagtttctgccaatagttagtgctcacaaaaccttttaagctacagtaacttttggtaaactcaatgaatactttaaaaaatacccgatggtaagaaaattacagaaaaatttccattacactgtcgaaaatgtttggaatccaaaatccactattttctgcaatagtttttaatgtttattctggtttaaaaaagattttctttttcttttctttctacttctacatagtcctggttaaattaatacaatctgtctcatgaacatttaggactgccattttctggatttagattgtttttattctcacatatttatattaatgctttaatattttacataaaacattgatttgctgttttatgaagcaaaatcatagatcatatttatggaggcatttccagtttgaaagaaaactgaaaatctaatcagtagaaggtcattttatgccttttttcctttttagcagtgataaataattagcaacctattaattacaaaaattcttaattatgcttagagcaaccagagcgctatcacaaatttaaattcatatttgttacagtatgtgaaatagttaagaaaagcctctgttttcccagtttggtaacaaatggcttttgtctgatgcataattaatagaaactaatgatgactatgtagctcttccagagttttaaaggcaaatctatattggcctacagttaacatgcaaattcatccaacaagcaacacaaaatgtattgtagtagtcattcatttttatcaacattcaagaagatctagacagcagcacgactctcctatgtcggaaacacattataacatgggcacaactgaagtcagatcatacctggtaaaataccctcttgctaattcatcctctagagtcagttcagacttccagcacgatacatgaacaatagcgattaatactgtggtacaaaggtaaatatagacaagagtttg

SEQ ID NO: 476572 - DNA, 1000 bp, Homo Sapiens; identical to SEQ ID NO: 344910

SEQ ID NO: 476573 - DNA, 1000 bp, Homo Sapiens; identical to SEQ ID NO: 161033

SEQ ID NO: 476574 - DNA, 1000 bp, Homo Sapiens
ctatatcttacaatagacctcaaagagggaggcagctgcgtgcattcgatagaaaatagaaaaaggcatggccaggttgaccacaattatccagggttcaaagccaaagacaatctcctccaatccattgtcatactcaggtcgacagccaaaggcgggaggtatccaaagcgaaatattgcagaggaacaagaaggctgcaatattcctcaggacttttctcttggcgttgccctgtaagaaacggggaaggcggactgggcttgggctccctccccagctgctctcctcctgcttctcctcctccttgtcatggctttctctcatgcacacatttccattggctgctggtggcatgtccttgccctggggagccacatctctggccacacctccactcttggggcaggaagaagcaaggggcatggtgttgccattgcagactgtgaccacccgaagggtttggatgtcctcagagagtttttcaggctctcggtgaatggattcaaagatgaagaggttctggatgtacttctccacgatcgccaggatggagtagggcaggttgtaccaggtgtagcgggggtggccctcagcacagaggatggccaagattgagccccaggagataagccaggagcccgaggcagtgcccaccaagaggtccgagtccagtttgcgggccggatttttggactcatccagtgacttctcgtctatcctgtaaatccggattccagccagccccgcagcccccataagcatcagcagggtgatggcatacaggtagaacatgatgagtgccgactcgctcttggtcttggagcgcccaatatgaatcaggtataccaccaccacagcaatggtggcggccagcacggtcaggcccaggactgcgcccaccatgaccccatcagacttgaactgcatcttctggtgctgatggctgtcaactttgcgcccgatgttcttccacaggacgtagagcattgtggaggcc

SEQ ID NO: 476575 - DNA, 943 bp, Homo Sapiens; identical to SEQ ID NO: 344912

SEQ ID NO: 476576 - DNA, 1000 bp, Homo Sapiens
ttttttttttttttttttaaaagggattctttttttatttatatgtaaaaatccaactttagggtggtgtttcggggggtgagataggaaaatgatgactggagtgaaaactatagcacatcaagctactagttgcagtatttactatctatctgatacttcaatacaaataatggcaattgacttgaaatgattttgcatttatttgtacaggccctacaactgccttggcatttggctggcaaaatctacataagcagtcccatcacattcagttgttgctctttgcaaatactctgcttgaaccaaagttggacttcagtggattaatctgacagcaagggaagagcagtggcaaggatccctgggtgcagccaggctccattttattgggctgcaatgacttttaattaaatcctactttttatggcatgaactacatatggcccacacttctgaaatgctaaaggcctccacctcacttcatggaggggtgaaaaataccttataaaatcatcagtttcatttcctgatcgggaaaggatggaatgttgaagaaataagctaattctatttgtctgaaaaaatggccaaatatattcaatgaaaacaatgattgttttgctcaaaatatcaacaggaaaaacaaaaatcactaagtagcaaacgttaatggaaccaactgaccagggagaaaggacatctgggagcagtttgctagtagcttccatgttatacatgcacacctctattacacagggccacctgatccatccaataataatcagacatttaaaaatataatttctgagccctatacttggttaagttgtcatttgaagtgcaaagtcaaggtcaagattatttctagaccagtcacttgggaggatgtgggatttcatccccagatgtgggtttaactcacaatggtccaacgttattcctattattagtaccataatcacatacatacatacacacaaaaatccaagatcagaaa

SEQ ID NO: 476577 - DNA, 1000 bp, Homo Sapiens; identical to SEQ ID NO: 344913

SEQ ID NO: 476578 - DNA, 1000 bp, Homo Sapiens; identical to SEQ ID NO: 161035

SEQ ID NO: 476579 - DNA, 1000 bp, Homo Sapiens
tcagaaagcctgtgtttaatagggacctgtcatggtctgcaaggctctcggcacatgggtgccccatgcccagctacttctcatccaccttttccaaggactggggcttctcctggggcaagtcttccagcattaggctcagcacatgcacgatctcatagtacagctcttgaagcttgtggacagttgtgtcctggtagtccagagtggaaaagtagatatcgatgaagggtaagctagtgccaaaatcatccaagaccattgggtcagtgtggctcaaggtcttcttaaagttctccaccagctcactgaaacttgtgcagtcagcatttttctgtatgtgcatcagcctgctgatctcctcctgctgccgctgcagaatcacctgcttctctcccatgagcatctcctgctgctccaacatcagctctcgctcaaactttctgatggagtcctctgtgtgcatgatcatcacacccacgaacatgttgaggaagatgaaagaggcgagcaagatgaagatgatggtgaatgcccggctcaaagcaaattcccgattgtccaactgcttctgcaggtctgtccagccatcaaccgtggccaagctgaagagggtgaaaaaagccgcagccaggttcccccagttatcatggtcaccattgtctggagatccaaacaggcagaagcccaagatagcgaagatgtacatgaggaggaagagcaggaggagcacagaggccacggtgtagactgtctgccccacggcggtgatcagcgtccggatgccctggctatagccgataagcttgaggatgcgcagggactgcatgccatcagcgatatacaggtaagtgaactgtttgcccatgagctggcggagggcatagggtaaaaacataacgatgataatgatcacatccagcaggttgtagccgttcttccagtagttgatggggtccacatagaccttcatggacaactcagatgtgcagatggacac

SEQ ID NO: 476580 - DNA, 1000 bp, Homo Sapiens
ttttttttttttttttttcctgttacccaggctggagtacagtggcatagtcatagctcactgtggcctccaactcctgggctcaagtcaagcgatccttggtgcatgctactgtgcctggctaatttcaaagcattttttgtagagacaaagtctcactatgtcactcaggctggtctcaaactcctggcctcaagcaatcctcctgccttggcttcccagagtgttgggattacaggtgtgagccactgtgcccaggcaaccctaccttttaaaacggtggacaaaggaccttcatttaacctattcagtttcaccccaccattactctgagctctgaagactcaggggtgtgtttggcttttgccaccgcactaagtacccatttttccaagttattcgatatcttctttttctttcagcagacagttggtttacttctggcaattcccctctaatcttccaatatatcaagggctgggaaagttatagtcaactggctcagagtgagatgtgtgagtttcattgcatcaacttcgtgacatttcagggtactcagtagccttttttcttccttcccacgtgccagataggtaagattcccagagaagtaaggttccagattttctagttcattattttatcttgggggctgcctgactctctcatagcctaagagaatcctgctcaactctttttcccactcccctggtaaatacttagcaaattaatgcttgggttagcagaagggcaatgaagagagactcccctgaactctctcttctcaccagggtccccaccttggtctcccaggatctttgcagggtctcttccctgagggcccctggtgcggactcccggaaatcaattaggtggctctcatttcgtcggatgtcatgtaccagcatcacgcccccaccgcccaggccagaactgtgtggagccacgatacccaaacacaaggctgctgccaccgctgcgtccacagaagatccctgtt

SEQ ID NO: 476581 - DNA, 1000 bp, Homo Sapiens
ttaagcaacattctttctttaatttccctttgcaaatggaagcccctgagctggtgcccacccccacccctaccccataccctggggacccccgatgcaaggcccccacctcaacctggtgggaaaagaggagcaccccctccctatgatggtccattaaaaaattcctagtcatttaagaaatgaggctgggaatgggagaaaggaactggaagacaaggcccaggtcaggccagtctgaagatgttggggttgtgagacccttgagaagggtttgcaagcacatccctaagctcggggccagcatggctgaaggaggagaggtgacacacagacagatagtctgattcctcaaggtcctgcctgcctggctgtactgtagatgctgacactcaccaccaccaccaccaccaccaccaccaccaccaccaccacaggcctcctgatggagaattttccagttactctgggattgggtttgctaagcatcccctctggcccctgatctggggcatccctggggtccccctgagaccaaacctgggagaaggagggactctgggaacatgcaaagtgggggagcagagaccccgccccaccccgctgctctacaggatggtggctccagctgcatctgggctccgagggtccttaacagcgatgatgaagttgttggtccttcggctgccatggacccaggataagacatctactttctccacgtggtgacccctggcttccaggaactcaatctcttcctctgtgaactcactgtccacctgcaggaggttggactgcaggtccgggtgtaggcggccgcgggccaggctgtcactcaggttccggttcaaggtcaggacattcagcagaaccacctgccaaaataggtgcctggcatatatatcaggttctcaagacattcatggagccattctgaggtgttctggagaaaagcaggcccttcctttcaaatcccaccctaaagagggctggttgtcta

SEQ ID NO: 476582 - DNA, 1000 bp, Homo Sapiens; identical to SEQ ID NO: 161036

SEQ ID NO: 476583 - DNA, 1000 bp, Homo Sapiens; identical to SEQ ID NO: 161037

SEQ ID NO: 476584 - DNA, 1000 bp, Homo Sapiens; identical to SEQ ID NO: 344917

SEQ ID NO: 476585 - DNA, 1000 bp, Homo Sapiens; identical to SEQ ID NO: 344918

SEQ ID NO: 476586 - DNA, 1000 bp, Homo Sapiens; identical to SEQ ID NO: 344918

SEQ ID NO: 476587 - DNA, 1000 bp, Homo Sapiens; identical to SEQ ID NO: 344920

SEQ ID NO: 476588 - DNA, 812 bp, Homo Sapiens
ttttttttggttttccccatactttttatttgttaatttcatcacccccctcttcttctgatgtggtccccaccacctctgacatgcacgcattggctagggcctctcacactgaggctccacgcgaagggaagatgcaaagtccagtccctccaggagctagtgatggaagtcttgggaaaggagagtcccaagttcaagaagacagctagggtagaagggagggaggtcctcaaggggtagaggacaggagtccaaggaggtggctcaggtgcggggtggcgcctcaggagagcccagaaatcttccaggcagcactgtctggaacagggctgtgcactgacggtaccggcattttcatccccaacctcagtggcccccatgcccacctggggtgggatctcaggcagaggttttgtcccctctgaggctcccccacaacacgcctctgttgttccagctttgctgtgtgaccctggtccccggtgaggtaacaccaccactgagctttatccctgcagcctgggggtcctattcacctctgggctgtctcagggtgccatctgtctctttccagctgcttccctcgccagcgctatcaatccccccattcaatttctgctgttgaaatattcagtgtttctgtatccctagttggacctgagtgaagagatgtctgaagggcatctcatgtcaagaaccagactctgatcttcctcacaagcctcagtctgccccattcaattaacgatcccctcagccacccacagttcaggccacaaagctaggggtcatcgtggttttgtctcctc

SEQ ID NO: 476589 - DNA, 1000 bp, Homo Sapiens
ttttttttttttttttttttttttttttttttttttttcaataagcaagataaataagtttaatgcaatatttttaaaattaaggcccccccccccaaaaaaaaaatccatggtgaacaaaacatcacagttttaaagacaggattcgtattactgatgtttccttttgcctcgggttcccattaggcttgcctgcccctgtgggagggacccagtggggcacccagagttgctctgcccaggcgaggcctcactgtggctgtgacgcacccttgatgtcagaacgaggtgatgtgtgaaggttaaatgacagaggagtgtggaaccacagccatgctgtaggtgctccaggtgctctgcgtgtacaaagttcccacctcctgaacttcccacccagctcccctcccagagccagttaggaagctggaaggtggcgcttctcaacctacacctatcattggaatcacctgggtggctcctgcctccccactgcccagaccccaccctggaggagttaaatcagcatttgtgggtgggccccaggcctcagtactttttaaagtccccaggtgattacagtgtgcagtcaaggctgagaaccacttctctggagaggccacagttgtacaggccttggaggctttgtaacctctcggtatctggcggggttaatgtacagaaagactaaacagcgtcagtcaaagcctgctgggagatcagaaaaggagcctggcagctccccacccaccgcgaatctgtgcagcctccaccaaaaccactagggcacatttctttttccctccacatagagagacgaaagctatcaggcctagacaggccatgtggactccatggaagggcctgtaagccttgagaaaattcagtcccgccagcagagaaagtcagggaaaagcgcagcccccgggcccggccactgccattccaagatgatctcccactccaaagagaaaaaggtctaaaaggagtaaagagaggtctt

SEQ ID NO: 476590 - DNA, 1000 bp, Homo Sapiens; identical to SEQ ID NO: 344921

SEQ ID NO: 476591 - DNA, 1000 bp, Homo Sapiens; identical to SEQ ID NO: 344923

SEQ ID NO: 476592 - DNA, 1000 bp, Homo Sapiens; identical to SEQ ID NO: 344924

SEQ ID NO: 476593 - DNA, 1000 bp, Homo Sapiens; identical to SEQ ID NO: 344925

SEQ ID NO: 476594 - DNA, 1000 bp, Homo Sapiens; identical to SEQ ID NO: 344926

SEQ ID NO: 476595 - DNA, 1000 bp, Homo Sapiens; identical to SEQ ID NO: 344928

SEQ ID NO: 476596 - DNA, 1000 bp, Homo Sapiens; identical to SEQ ID NO: 161038

SEQ ID NO: 476597 - DNA, 1000 bp, Homo Sapiens
ttttttttttttgactgtaactgacaaatttattgaagtcttggaaagagctgatcacccgagaataaataaaagacacagaacattcacagaaccaataggtagctcgagattcaggtttgcgggagtgactttgacttacacacaggccagcctttgtgtctggggcacgcacagctgcgggcatctcccagaaacttcttcccaaaggatctgatggaggaggcagggcaggctcagaggagccccacccttctccagcggggagacttcccaatctggggctggcagagccggctccggcagggagggcaggctgtttggcaacagacatctgtgggtgcagcctggacaccaagggcctggggtggggtgaggaggacacaggtgtgtccccgcctctgcagcctcttgcctcgacaggcaaggccaatctccgacctaaagagggagcctcggggtgacggctccaagacacatggagcctgggaagtgaaagcacaattatgatgatttctcagttttagagatgaaagcgtttttccagccctcgggctatgctgggctgggctgggcctcagcaaggtgacatttcatgtctagaaatagcagcaagtgctcagttaattggtcaataaaggggagaaatttgcttacaaaaaaggctggcttgctgggaggccacctggcgggccagccctgtgtcagaggaggggccaggtgggtccctcagcccccagagagggagctgtgcggtcggcagtgggaggctccgaaggcaccagccctcccttgacgccctggccccacttcctcggaaaccccagcagccccgagccgcccacccaggggcagctccctcgtgtgaggtgcagggtggagccgggcctgggtcagaactgagcgtggtctacctcatccagccaggaggcggggctggcagggaagtcggggtaacccccgctgctccccgtggataggtcagaactgggtccgttcc

SEQ ID NO: 476598 - DNA, 1000 bp, Homo Sapiens; identical to SEQ ID NO: 246605

SEQ ID NO: 476599 - DNA, 1000 bp, Homo Sapiens; identical to SEQ ID NO: 344931

SEQ ID NO: 476600 - DNA, 1000 bp, Homo Sapiens; identical to SEQ ID NO: 344933

SEQ ID NO: 476601 - DNA, 1000 bp, Homo Sapiens
tttttttaagctgaaaaactaaaaagctcctctttttatcacagttcttccacataaggctgatcaacatatcatccaatgatataaaattctagaaactttacaaaattcctttttaaaatttattttttgttatcaaagagaatgtccagaaacattgagtactaaagaatttgttcatggcattgttttacaaaattttctaatggagagtgaatattttattttctgatgtattcttcacttattaatgatgaggtcaatgaactgatgcaattatttaaaaaaaaaaaaacagacaaccttataaaggaaaaaacaaaaacaaaaacaaaaaaaaaccaaacgtccattctcattctgaatctgttgactggagtgaattcagtggtcacaataccaccatcaaataagaatcaacttcctcagagtaaggagctgttccgatcttctcaatagttcacacaggtctctcagatataggcaccatgttttaagtctcacacaaaatgtctgtgtcacttaaattacacaatatggcagtgtttgtcttatggggacatactgaaaggggcaaagtagaaaacaacctgtttgcatgttatatgtgagtacattattgtactgtgcatgggtatgagggcattgcagcccttgttaaagaggaattccaccaattgaagcctatgtcagttcccagctgctcttggtgctgagagtatctactcatataaccttattttgttagatcagagccctcttcatctacagtttggctgaaatggtttgaactgagtttggtcgaactgagtttggtcgtttatctcttccatctgagctttatttctcagcctcaggatatgtggggtacttgaccgtttctatcttctctcgaactttgtaggagggatataggcccgtccttcccaatttcctgttgacacctttagaatagccatcccaatgatttccagccacaccaatgatatctccaggttcc

SEQ ID NO: 476602 - DNA, 1000 bp, Homo Sapiens
tttttttttttttttttaagctgaaaaactaaaaagctcctctttttatcacagttcttccacataaggctgatcaacatatcatccaatgatataaaattctagaaactttacaaaattcctttttaaaatttattttttgttatcaaagagaatgtccagaaacattgagtactaaagaatttgttcatggcattgttttacaaaattttctaatggagagtgaatattttattttctgatgtattcttcacttattaatgatgaggtcaatgaactgatgcaattatttaaaaaaaaaaaaacagacaaccttataaaggaaaaaacaaaaacaaaaacaaaaaaaaaccaaacgtccattctcattctgaatctgttgactggagtgaattcagtggtcacaataccaccatcaaataagaatcaacttcctcagagtaaggagctgttccgatcttctcaatagttcacacaggtctctcagatataggcaccatgttttaagtctcacacaaaatgtctgtgtcacttaaattacacaatatggcagtgtttgtcttatggggacatactgaaaggggcaaagtagaaaacaacctgtttgcatgttatatgtgagtacattattgtactgtgcatgggtatgagggcattgcagcccttgttaaagaggaattccaccaattgaagcctatgtcagttcccagctgctcttggtgctgagagtatctactcatataaccttattttgttagatcagagccctcttcatctacagtttggctgaaatggtttgaactgagtttggtcgaactgagtttggtcgtttatctcttccatctgagctttatttctcagcctcaggatatgtggggtacttgaccgtttctatcttctctcgaactttgtaggagggatataggcccgtccttcccaatttcctgttgacacctttagaatagccatcccaatgatttccagccacaccaatgatatc

SEQ ID NO: 476603 - DNA, 1000 bp, Homo Sapiens; identical to SEQ ID NO: 476602

SEQ ID NO: 476604 - DNA, 1000 bp, Homo Sapiens
tcaggacagcacgtagacctccagcaggctggacacagcgtgcatgcggtagaagatgccgaaagggaggcagatgttgacgatgaccgcccagagggagtagccgtagaaatccacctccactgtgttgctgaaatgagggcgggccccgaaggcaggcatgatccacagaatgacattgcagagtaggagaaacagagaaatgtcttttaggcactggcgtctccactggcttctgggggttgagacgatggccactgcttcccgctggtctgaagggctggggctaaccagcccggggttgggtgggcaggcggacaacgtgtggagggcatccaggttggtgaaggtgaggtcttggcagggctccttggggtgggtactgtgaggctcagccccgggcggtcctcggtgaaggctctcgatgataaacatgttctggaaggtgtgctgggcgatcatgagcagtgcatgggtgaggttgagccctgccagcaggtcctggggtgtgcccgccaccacagccacgatggagtagtaagagatggcgtactgacccagggcggcacccatcagcagggccacgtccagagtgcgcgtggggttcttatggtggtccatggcccggcggtcaaaacggtagatgatggagccgctcaggctgaccaaggtggtgagtcccaagcagacaatgttgaagctgtagtagatgaccagggcctgcctggtgcggctcccgtccccgctcacttgaacctcgtagatgatgaagacagccagccccaccacgaagagcagcaggcccagaaccgggccagcaaaaaaggtctcccggaagaggctgacaggggttggggtgtggctgtggccaggggtggaggccaggaatctacccacattcttccacatgacatacagcatggtggaggcgaagaggctgtactcgatgttgaagggatataggtagaagtacccctgctggaagatctggcagacggcc

SEQ ID NO: 476605 - DNA, 1000 bp, Homo Sapiens; identical to SEQ ID NO: 344935

SEQ ID NO: 476606 - DNA, 1000 bp, Homo Sapiens; identical to SEQ ID NO: 344936

SEQ ID NO: 476607 - DNA, 1000 bp, Homo Sapiens; identical to SEQ ID NO: 344937

SEQ ID NO: 476608 - DNA, 1000 bp, Homo Sapiens; identical to SEQ ID NO: 344938

SEQ ID NO: 476609 - DNA, 1000 bp, Homo Sapiens; identical to SEQ ID NO: 344939

SEQ ID NO: 476610 - DNA, 1000 bp, Homo Sapiens
ttttttttttttttttcctgaggcctgaaaatgtattggtcatgtgtagggaatattttaaagacccaaaaatgttgtttggagtcatgctgccaccgcaacagttttatgagagcccttctgctacacagtattccataaggaggcctgcctgcctttcgccaaagtacaggcaccctgctccagatgccccacaaccaggctgctgcctcagttttcatcagcaccattttcacatttcattccaataaataaggatgcacttaatccttgtcaggggcagcacctggtacccagaatgctggaccttccctgccctcgtgctcattgccccacctcagcagggcctctgaccctgggtacttggcaggcttcagggactttctgctgttggccagcccaaatgtcctgcaatttctctttctagctgagaccaataaatcaactgtggactggtcagaagccatcatcatcactgctatcaaaacccaggtcatagagcaaattctttcctgcctccttgcatagaggggtctctgaacatccgagattgaggtcactgaaccagctcatctggtggtccccctgggaactgctggaaagtagccagttgtcttgggaagagcacctgctgagctgcaagagtcttccctgcactgcccttactgtcttattgggcatgactgttcctcccagaatagggcagactggttttctggggctcctgggacactgcagatgcagaggctgagcacggggttcctgctgccccaggaaggggctttgagggacagaaattgcaggctgaggactctgatatttggaattgaatttacaggtctggattgggatttgtttttgcttgctggctatgagcctgcctctgtgggccctgtgggccttcctgggctgctgcttcttgtctttcccccgcatttctacagtcccatctttctgtttaatcaccaaatgttcacgtgggtcacacaaaaacatactt

SEQ ID NO: 476611 - DNA, 1000 bp, Homo Sapiens; identical to SEQ ID NO: 344941

SEQ ID NO: 476612 - DNA, 1000 bp, Homo Sapiens; identical to SEQ ID NO: 344942

SEQ ID NO: 476613 - DNA, 1000 bp, Homo Sapiens; identical to SEQ ID NO: 161039

SEQ ID NO: 476614 - DNA, 1000 bp, Homo Sapiens
ttttttttttttttttttgggagtaacagctgcttttattaacatcagaagggcaacagtacaggaagttgggtagatgtggggacaacagagagactgtggcagaggcaggactgcagatctatggaaattgcctggaagagtcagctgtaagggatgagaatcctgagggtaaaagagaaaagggaaagactcctctttgatcttatgaagctgaaataacaagatcttaaacatgagtgagaatctgttgccccaacctaaggtgactttaaatccaaggtaaaaaacacggcatgggtattagtttgaatagggaaaatgagaactctctttgagctcaaaaaaaaaaaaaaaaaaaaaaaaatgaaagcgttaaaaccctgattaagtctgcacaatgatccagagtgtaaggatgggagaaagaataaataccctagtgacccacatattaaacagaccacagacaagagaacaagacttgaagctaatggaaggtcatcttgcccatgccgccatggggggcaacagtgccacaatgccacatgggcactaacacacactgcatccccccagtccctgcccaggttggagggtgtgcagatcacagcagcagagctgcctagactcaggaagggcaggaacacccactgctgatgcagtgggaggtagggatggggagcctggccctggctttgtgggagtgcagagagaaggaaggcagaggggaaatcaagccgctggggcagtgcttgtaatattggggtgactgtgggagggcagtagcagacacaagagtaatggctttcccaggtcaaggtccatgtcctaccatctggcaggaaagccaggggtttgtcatgcatgataaaagccacacagctggactctgggcaaggcccactttagccaattagaagatacactgtctgtggccaggcaggcaagctcctcccagctggggaaggggtgagaatccctgggccttgcccagtcc

SEQ ID NO: 476615 - DNA, 892 bp, Homo Sapiens
gagacggagtcttgctctgttgcctaggctggagtgcagagaaagaccctgtctcaaagaaaaaaaatatcagcaaaaaataaatctgggtcagaggatttgattaactgaggaaagaagagagaatactggggcctttgagaacaggtaactgtaaatattcatattttgccataagaagctattcacaaaattgtttttacattaaatctttcattttaaaaaatgctaatatttattttaaatgggaattatcagatagataactatgatttcataccattgagtcttagctggtatttctcgattatcttcagaagttcagtgcatgtctcttgaacagagtgaaaaacctcaagtttagcatccagttcagcatcagacgccaccaagtgctcatcctctttttttcctgttgctttgataaagacctgtttagttttccagtatttcttttgcattcttctgactactgactgattatcttctggtctgggttgcccaaaggaatccatggagtgactgataacggatgggtgggatgagacttcagctttattggaaatgttttatttccttatctaaaaaaatacattcggagatgtttactcggccagtaaatgtataattaactcctactaaaggatgaggcacctgtggctattccataaatactgatgtgaagatgattaaagtaatatcgtcttacagtacgtcgcctgaaggctgttcgggtgatccgccgccgcctctattaggagcgacctccaccgccgagggaaatcacccaaacgagccccaggctgccgcgctccttcactacagcgagcgtggccgggaggcgcccttccgccgcaggggacccagccacgccagaaaccgctccttgcgg

SEQ ID NO: 476616 - DNA, 1000 bp, Homo Sapiens
tggggatggcggaaggcagtcatagcaccatttattgtccaaagtacacacacctgagggcccctccccacacagggaaacaggagaaacaaatgacaacaaaacagattctttggaaccgagaggggaaggggaacggggaggggagtttcttccttccctcagctttcgcctggaagcctagaactggcttccagccctagcccctcagtgggcagactggggtcagcggcttcacagagaagtagaggtgggcaggagaggcccaaagcccagctccggaggcccccgaggccctcttcttcccccaggctgaggggcagggagaactgtgcccaccatgcccggactcccggcggcattctagacaggccaccgcccactctgggcaccaacctccttaagggagggagaccagcctggatggcggggaaccctccagaagcccacaaaaccgcaaatggcccaggggagcaagcatgattcctggagtggggcatccaggagcaaagggaggcattgggttctgtttgctttacaaaaaatagtaaaaaaatgtttaaagaaaatttaaattgagaagtataaaaacagttaaaatggctccaacccacaagggaaaacgaaccactcaataaatacacagccagtgagggaatgcggcaggggagggccccaggtcctagtgctggcggtagcagtaaacaccgtacaagcggctctgcgggtcggggaagccaaagcttcggaccccaggctctgggggcccacagttaggatgcgggtgaaccacagggtagcggacgctaccatctgccagccagccagcgtcgcagcggtccaggccatggaacttccaggcggcaaagagctgtcccaccttggcgatcgtggcatcatcttcctggcaggcctcccttgcctctgtcagcgtcagcttctcagggtgctccaggtagtacacccgccccttgagggcagtagcgaagcagaatacatc

SEQ ID NO: 476617 - DNA, 1000 bp, Homo Sapiens; identical to SEQ ID NO: 344944

SEQ ID NO: 476618 - DNA, 1000 bp, Homo Sapiens; identical to SEQ ID NO: 344945

SEQ ID NO: 476619 - DNA, 1000 bp, Homo Sapiens; identical to SEQ ID NO: 344945

SEQ ID NO: 476620 - DNA, 1000 bp, Homo Sapiens; identical to SEQ ID NO: 344947

SEQ ID NO: 476621 - DNA, 1000 bp, Homo Sapiens; identical to SEQ ID NO: 344948

SEQ ID NO: 476622 - DNA, 1000 bp, Homo Sapiens; identical to SEQ ID NO: 344949

SEQ ID NO: 476623 - DNA, 1000 bp, Homo Sapiens; identical to SEQ ID NO: 344950

SEQ ID NO: 476624 - DNA, 998 bp, Homo Sapiens
ttttttttttttttttttttttttttttttatttaaacaattttatttatttatttatttttgagacagtcttgctctgttgcccaggctggagtgcagtggcatgatctcggctcactgcaacctctgcctcccaggttgaagcaattctcccacctcagcctcccacgtagctgggattacaggtatccaccaccacgcccagctaatttttgtatttttagtagagacgaggtttcagcatgttggccaggctggttttgaactcctgacctcaggtgatctgcctgcctcagcctttgaaagtgctgggattacaggcatgagccaccatgcccggcctaaacaattatttaataacattttcaggagcaaagaatatacacttaataaaaacaaccataaaatgccggtcttctttgatgactcccagggaattcactgtatttgaaatcatacattcatcaaatatttagttggcctgttcccggattatccatacacaaggaaatcaatgatccttcatcttcattcaaatgtgccataaaatcctctgggtccacaagtccccacgccatacttctttagagatgctaaagctgctgccttaaccctagggttatccaacaatccaagaaaattaaatgaggcgaagtttatacattcttttccattcaccacagttttgtggcttggagggcctgaaacgatgttgtagttgagagcaggatggtcttttgggacaggaggaacaagaggttctggttgccactcttcaatcagttcttctttttccttgactgtaagatcagatcgttcttgtaatttgtaagtcttagagaaaagaagtctgattatccagaggatcagaatcccttccaaaataagatggtaagcaggagcctcgtaaagcgcctgtaccatctccaccagaacccactgctccgtggcggtcgccatagttagccgcttccttccggaaggcgggtcacaagcgc

SEQ ID NO: 476625 - DNA, 1000 bp, Homo Sapiens; identical to SEQ ID NO: 161040

SEQ ID NO: 476626 - DNA, 1000 bp, Homo Sapiens
aagcttttcattaagcagggaaagaactaggcacattagaaaataaaatagttaacttattgtattgtgtgaaaatgttttatttatatcaatagctggctgaagttaatgtataaaatataaaaagttttacctttttgtagcggcatatagtaactatctaacattcaggtgcattaaaatgtaggtaactcattttagagagagaagcaaagctctgctttttagggttgatgatgagtacgctgcccagcccctggcctgtggtaatgaccttagggtacatgcatctactgctactgctgtgtgtatatttcagtgtcttcaagagcttcagtgttgcactggaagtttgaaggactgttttagaggtgagtgtggaaggcttaatgtgtttgcttcatctccttggtccttcctctttaggcaattttctgcatctgacctaaaacacaatagagagttccggctctgctgtggatggagagacagagctggttctttccagcttctcactaggaaggaatgggatgtatctgcccaggtgcatgagcaagtgcctgtggaagaagtggcgcaggtacttccggaacctctctccaacaaaggcgtagatcaccgggttcatgcagcagtgggagtaggcgatcacctctgtcaccagcatgaccaggtccagatgcttgctccgctcacagtcatttccaaataagatggattgataggaagagagaaggatagccacattgtagggtgtccagaaaatgaaaaacaccgccatgatgacaaaaatgagccggatggccttgtacttttttttactggggcacctcagcagcgttttgatgattcctgtgtagcagatggccataacgagcagagggagaacgagacagaagatggtcattctcagagtgtggaaatgcctccagctatatactgtatcctctgggtaaagagcactgcaaagagtctcttcaaacaactcttcagtctcata

SEQ ID NO: 476627 - DNA, 1000 bp, Homo Sapiens
tctttttcatgaaaacatttattagatgccagctgtacatggcctaaactgtgcatgagctgttaaaggcttgactgcctggccaaaactgggaaaactgctgtccccttttcacgttcacagaacagctatttctcatagttgggctagtcctatggcctgcaaaggaggtaaatttttttttttttttgagacggagtctcgccctgtcgcccaggttggagtgcaatggtgtgaccttggctcactgcaacctctacctcccgagtttaagcgattctcctgcctcagcctcctgagtagctgggattacaagcgcaccccaccacgcccggctaattgtttgtatctttagtagggacagggtttcaccatgttgaccaggctgggttggccaggctggtctcgaactcctgatcttgtgatctgcccgcctcagcctcccaaagtgctgggattacaggcgtgagccaccgcacccagctaggaggtaaaaattttaaagcaagacttagctgaactggaatggaaccagagatgagagtactaagccaagcctcccaggcagtgatctaacagcttgttcttggtgtcccagctctttttctctgaagacagatggggaacgtgaaggctatcttctggctggatgaagcatctaggtgatagaaaagaaatccagagacagggtgaggaagggaggcaggagttgctttttattgacttggaagtgggctcttcagtgaagcccctttgggtttaagagcattttcctgcttcctttgttcttcctgcaacttctgctgcctgagctgccatgcttgtaatccagcgtccatttcctgtgacagcagtacaactcgtcttgcaaacgtctccctttcagcttttcttcgaagctggcctttcattgggggagcagggcggccatccgcatatgaccagtctgggagctcggtaaggggcccgtagccggaggggttggcagccagtccctgct

SEQ ID NO: 476628 - DNA, 1000 bp, Homo Sapiens; identical to SEQ ID NO: 161041

SEQ ID NO: 476629 - DNA, 589 bp, Homo Sapiens; identical to SEQ ID NO: 344952

SEQ ID NO: 476630 - DNA, 981 bp, Homo Sapiens; identical to SEQ ID NO: 344953

SEQ ID NO: 476631 - DNA, 1000 bp, Homo Sapiens; identical to SEQ ID NO: 344955

SEQ ID NO: 476632 - DNA, 1000 bp, Homo Sapiens; identical to SEQ ID NO: 246606

SEQ ID NO: 476633 - DNA, 1000 bp, Homo Sapiens; identical to SEQ ID NO: 161042

SEQ ID NO: 476634 - DNA, 1000 bp, Homo Sapiens; identical to SEQ ID NO: 344957

SEQ ID NO: 476635 - DNA, 1000 bp, Homo Sapiens; identical to SEQ ID NO: 344957

SEQ ID NO: 476636 - DNA, 1000 bp, Homo Sapiens; identical to SEQ ID NO: 161043

SEQ ID NO: 476637 - DNA, 835 bp, Homo Sapiens
tttttttttttttttttcaggaataaaaagctttattgttacagagaaaatagcttcataactgaattacaacacctagttctccaaagagctatgtctgagagggaaagccaggccagaaaatatcacaagctagacttcaaccctacaatggagtgaacatgagcaggataaagaggggaacttaaggcatttccgaagtccttccatgggaaatgagagaaaagaagcctcaggctgacacacatcttcagcacctgggatctgccagtccttctcctccgtgctcctcatggcccaggtcagcagcagcctccagagctgtggcagcagccagagcccccagagctgtggcagcagctggagcccccagactgctggccactgccactgccacagcagctggaactctgaggtcggcgtcggagggactggcggggcctgtggtggctcaggcagcagccaccaccctcagagctgcagcagcccccagagctggaaccacagcaggaagagactggaggtgggcatggggctgaacactggggagggcattttgggggacacttgggaggacacttaggagtacacttgggagggcatttaggggtacatttgggaggaggctggcactgctgctggctctgctggcaggacatctctgtagaagctgaataaagcttccaccctccccttccagaagaaccttcccctccaaaatccttctttatccttgtctttcttcaagaatggcctcaacctccacccaggggctctttctgcccaaaacaccagcaccaagagttcatcctggtcctgagaagcactctacctg

SEQ ID NO: 476638 - DNA, 1000 bp, Homo Sapiens; identical to SEQ ID NO: 344960

SEQ ID NO: 476639 - DNA, 1000 bp, Homo Sapiens; identical to SEQ ID NO: 161044

SEQ ID NO: 476640 - DNA, 1000 bp, Homo Sapiens; identical to SEQ ID NO: 344962

SEQ ID NO: 476641 - DNA, 1000 bp, Homo Sapiens; identical to SEQ ID NO: 246607

SEQ ID NO: 476642 - DNA, 1000 bp, Homo Sapiens; identical to SEQ ID NO: 344964

SEQ ID NO: 476643 - DNA, 1000 bp, Homo Sapiens; identical to SEQ ID NO: 344965

SEQ ID NO: 476644 - DNA, 1000 bp, Homo Sapiens; identical to SEQ ID NO: 344966

SEQ ID NO: 476645 - DNA, 792 bp, Homo Sapiens
tttttttttttttttttttttttttttttttttttttaaaattgaatcacttatttttttttaaagccctgcatagaaattcccaaggtatcaaaaacaaatgagagaagccttattcattacattagccaagaatgggtgtggacgtgaacattctggaagggtgacgctgatgacttgagaatgtctaaggcacactttgtgttctttgcaacatcccatgagcaagtacgcaggggactgtgtcctcgggattcaggggagctcttcctttccctggcatggccctgggtgcctggtgaccgatatgcagcacccctgggcagaactccgtctggattcagtgcacgccctgcttgggccagcacagctctcgtgcaaaagcacctttgcagcttctgatcgcatcgtcgagctctaggcacttgttcaggcctggcactgcagatctccagccgatgaagccctgggtggtctgtgggactgggggggatggaaagaccttgatgtacttctccactggggtcaccggccggatgcggaaacgctcaggaagctcgattttgggctttggggtggggagatcttcttcacacttgatcaactcctcaaaaggggttgttaaaaacccccagttctggggccagttctgccgtgcttccgattcagccttcagacggtatttccagatctcatcctgacccacaaggttcatgcgttcagccgccgcggtgctgagaggtttctgcgccatgaggcctgggggctctgtgcgccccgcaagctctggcc

SEQ ID NO: 476646 - DNA, 1000 bp, Homo Sapiens
ttttttttttttttttttttttttttcacaataaagtctgcctttattgatgtgtatcatgtttactatcccgggtaagtggtgagttcaggaaaatggcccacaacctgtcacagcctgtacttcaagagacactcagcaagatgatgacgacgacaatgatgatgatgatgatgatgactcagcaagatgatgacgacgacaatgatgatgatgataatgatgatgtgtgtgtgtgtgtgtttccgggtatccacatactctgctcttcctcactcattcacctcagacccactcagtcctctttagggcatctctttcacctgattctctctaccaaaaatttttctaactctctcctccctctgtccaaaacctccccatccttcagggcctggctcaaaggccacctccatctcctctaagaaagttttctgactactccaccttctccaggactctctgccctttgttttctaacaccctctgtaactggttaacctttaacttgatatggctctgaccccttctccagcagcttgtgcatttcacctctgtccccaggtctgagtgtgacccacctgtcagctctacaggcccagcacagggctggaaacacagcctagattcaagaagatactagttagggtgtgtgtgtgtgtgtgtgtgtgtgtgtatacacaagaatcttgagcccagagagtgtgtctgacctgggtttctagacacctcccttccccagtctgggacctgagcaagtccagagtctcggtggacagaggaggggcctgcccttgccagtgcacccccgatgccagtcctttggctaggactcaaagcggcttcggagctgcttgaacttggacttgttgtacttagtgatgaggtccagtttgctgtgacccagggtcagccgtttctcatccctgaccaggtcactgttaccaccattgagatggccacccttgggacccccaggctcagttccctgcctggcccc

SEQ ID NO: 476647 - DNA, 1000 bp, Homo Sapiens; identical to SEQ ID NO: 344967

SEQ ID NO: 476648 - DNA, 1000 bp, Homo Sapiens
ttagccatcaaactctgagctggagatagtgacgatgtgacaggaactttccctgggcctctctgggccacaattcctggccgagagaaagaggaggaatgaggtgagcaccttcttcactcctagggccatgtggtagagctgcagtcgcacctccttctgccaataggcatagatgagtgggttgagcagggagttgcccacgccgagcagccacaggtaccgttccagcactaggtagaggtgacactcctggcaggccacctgcacaatgccagtgataaggaagggggtccaggatagagcaaagctcccaatgagaacagacacagtacggagagctttgaagtcgctgggagtccgtggggatcgataacctccagccatggctcctgcatgttccatctttcgaatctgctggctgtgcatggaggcaatcttgagcatgtcgcagtagaagaagacaaagaggagcatggctgggaagaagccaacgcaggagagggtcagcacgaagtgagggtgaaatacagcaaagaagctgcactgccctttgtaggcagtctgctggaacatggggattccgagtgggaggaagccaatgaggtaagacactaaccacagcccggcaatgcaggccccggccacgaacccactcatgatcttcaagtagcggaagggctgcttgatggcaaggtacctgtcaaaggtgatcagcatgaccgtgaggacagaggcagctgcggaggaagtgacaaatgccatccgcaggctgcacagggtcttctgtgtgggccgagaagggctggagagctggtctgtgagtaggccagagatggccacaccaatcaaggtgtcagccacagccagattcaaggtgaagcagagactgacaccatcattcttgtggatcaacagcagcacagccacagccactagtgtgttagtagcaatgatgagggaggccaggacagcaaggatcactccaaatgagaaagat

SEQ ID NO: 476649 - DNA, 754 bp, Homo Sapiens; identical to SEQ ID NO: 344968

SEQ ID NO: 476650 - DNA, 1000 bp, Homo Sapiens; identical to SEQ ID NO: 344969

SEQ ID NO: 476651 - DNA, 1000 bp, Homo Sapiens
cgttttgggcttttttctttttggtctggatgttggtggaatttccccattcgtaagacttttctgtgagagggaagtaagagaagaagaaataagcattttgggttcctacattggccttccttccttccgctggtacatgtagttggggaaagggtcggttttcttctttagttctgttgaggccccagagaagcaaaggatccccaaaggacaacagctgtcaggcctccatgtccaaggctgagcccaaatgcgtggggttggacttcccagccccatcctgccccttctctccgcactcttctgagacctggcagatctgagaataaacttcagcaatgacagtggccttgcagtccagccctcccccaggaggtaaatctgggatgtcctctgaggccagagtcctgaaaactgtgttcaggctggggggcttctgagcagaggcacacagttcagcgattctgcagcccagggctgcgtccagtgctagctccctcctgatcgcctcctcagaaggcctaggggccccagggaagcagaccaggatgcaggtcatgttgtccaggctgccctgaagccggtggagaaaaaggagcccggtgggggagagtccaaggcagagcttcccaacaatccccaggttcaagtcccccacttcattctacttatgcccatttctttcgcgtcccacccacctgccaatcctctcctactgggaccaaacccggtcctaggcgctcccaattgagagaacaatgccttttccctaaagctccgcccgctctgatgtttacctgctcttccaccttccagcactaatcaatacttccggcccggctcctacgacccagaatcgcccctttccaaaagaccacgccctttctcttaagtcccttccactaactctcccgtgcctcaaagcatccctcaggctccgcccctgtattttggccctgcccacttcaggccacgcccttcgcttgagtcctatccc

SEQ ID NO: 476652 - DNA, 1000 bp, Homo Sapiens; identical to SEQ ID NO: 161047

SEQ ID NO: 476653 - DNA, 1000 bp, Homo Sapiens; identical to SEQ ID NO: 344970

SEQ ID NO: 476654 - DNA, 1000 bp, Homo Sapiens; identical to SEQ ID NO: 344972

SEQ ID NO: 476655 - DNA, 1000 bp, Homo Sapiens
cccttcacctcctttatagttgtaaaacaccagaggaaggaggggcttgggtttcgctggttctgcttaaaaacatggctttctgttccatggggggtgggggggatgcgtggaaggcccagcccgcgagggtgactttggtgaagtccctggtctcttgctgcatagacgaggctgggatgcaaggagacaccgtcactctctgcgaggttactggctgtccggacccgagccggacggtgcgctacctcgtaccaccaccaggaggcgattgttcctctggcttttcctttgggggtgctagaagggagtgcgggggtcgggaggcaagagagtgtggacagcacagaaatagtgtggggtcgcggtgggtgaagcaagatcgcaaaggcctggggccataggtggagaccctcttctgcctctgtggggagttcttgcggccaggagaatttcaggatcctgggttccctccacagtagactggaggaggggcggtcacgcagcccgaggcaacaagttacagcggcgggagatgttccttctctcacctgccgggggggccccttcctcccagttgggaggaccaggaaatactgctgccttccaaggtttgcgcgccaccccgcgatgggtcagactccagaactcaaccgtgcacagtggagtgggggaggcagccgaggtgggttaactgaatagatagggacggctctgagcccccttccccaagcccccaaatacgagattccagaaattcccagagggacataacaaagccaaagggaaaagggagtagtaaagctgtctttgccgaatctcccttccccgccccctccgccgttggcccgggtacccccctgcaggcggccagactcagcacgacttcagcacctgttgcaggtggaggcgcacatctgcagccgtttcccagggcaccacgctggcgcggaacgagctgggctcggccttctgggcctcctgaatgaggcggtgcatg

SEQ ID NO: 476656 - DNA, 1000 bp, Homo Sapiens; identical to SEQ ID NO: 344973

SEQ ID NO: 476657 - DNA, 1000 bp, Homo Sapiens; identical to SEQ ID NO: 344976

SEQ ID NO: 476658 - DNA, 1000 bp, Homo Sapiens; identical to SEQ ID NO: 161048

SEQ ID NO: 476659 - DNA, 1000 bp, Homo Sapiens; identical to SEQ ID NO: 344979

SEQ ID NO: 476660 - DNA, 1000 bp, Homo Sapiens; identical to SEQ ID NO: 344980

SEQ ID NO: 476661 - DNA, 1000 bp, Homo Sapiens; identical to SEQ ID NO: 344981

SEQ ID NO: 476662 - DNA, 1000 bp, Homo Sapiens; identical to SEQ ID NO: 344983

SEQ ID NO: 476663 - DNA, 1000 bp, Homo Sapiens; identical to SEQ ID NO: 344984

SEQ ID NO: 476664 - DNA, 1000 bp, Homo Sapiens; identical to SEQ ID NO: 344985

SEQ ID NO: 476665 - DNA, 1000 bp, Homo Sapiens; identical to SEQ ID NO: 344986

SEQ ID NO: 476666 - DNA, 1000 bp, Homo Sapiens
gtagagataaggcttcgccatgctgcccaggccggtcttgaactcctgaactcaagcaatcctcctgccttggcctctcaaaagtgctgggattacagacataagctgccacaccagcccaaaagatttgaagacacttaactaaagaatatatacaaatgtaaaataagcacatatgttcagcatccttaaggaaaagcaaattaaagtcatgatgtgatacaactgtctatgtatttgaatgactaaaattttaaaacactgagaataccagtgcttgctttcaaggacgcacagaaaatggaagtctttgctgcttggaatgcaaaatggtacagccattctggaaaacaatttgacaatttctcatataagtaaatatatacttaccatatgatccagcaatcccactcctgagtatttaccctgcttctgtagccatctttcacgccttcgttgtttccttcttagattcttcaatttgctcctttctctcttattaagcctctgattaatgctgcccaatgaaaaattggctgagtgcaggaagtccagaggggagaggtgctcttcctggtctgaggcctccggcatgctcctgccagctgagggcaggtccatcaggaaagtcagattgttagtattagtatggtcagaatacactgaagcagcttctagaccacactgaaattctcctcctctttgtgtctgggtctcatggggggccactgaaaatctttgcagcagcatactaggatcaaaactggatggattctgaaaggaatagctatttttactagattgtaaaggcaagcctgaaaggtcaataggctgtgtttcatttagtctggaataggcagtagtcttactatgtatttcatataaagtgggtaataaagtcagtttctcactgatgttcagatccaaactatgtgattttctatgaaaagctcttgtagcgcatctgccagtcacaagctggggaacaaaaagctggtat

SEQ ID NO: 476667 - DNA, 1000 bp, Homo Sapiens; identical to SEQ ID NO: 161049

SEQ ID NO: 476668 - DNA, 1000 bp, Homo Sapiens; identical to SEQ ID NO: 344988

SEQ ID NO: 476669 - DNA, 1000 bp, Homo Sapiens; identical to SEQ ID NO: 344989

SEQ ID NO: 476670 - DNA, 1000 bp, Homo Sapiens
ttttttttttttttttttttttttgttgtttaaagactcccagtttgtgtactttattagagcagtcctagaaaacacatagagattcaagtctggcaaataatgatcgaacaatgatttgttgggtaaaatggtgattaaaacctaggttagaaaatgagcaaagtgggagggagagcaccaggacaaatagctaatgcatgcagggcttaatacctaggtgatgggttgatagatacagcaaaccaccacagcacatgtttacctatgtaacaaacatgcatgttttgcatatgtatcccagaacttaaaataaaataaaatttttttaaaagacaaaatgagcagtgtctacagctttctggagtatgacagcatcaccagcttaaagctgttgctagtactaaattgaataaacatttccctctaatttccccttaatgtcctcagaaacacagatgagggatacatcttcatatgactcctcagagcactaaaatgatattaaaacactcttcccacaagaaacgcacagacgagggattcttcagataataggaataagaaatgtgaaataaattagaataaaccatgcagctattttaaatatttactcctggaaaaatagtaagttacacagaatcagttttgggaataacttttccattttcacctttttatgattattgtaataattggaggaattaataaagtaaaaccatctgaataagttcatcccaagctgattctgatggatggtgtggcggatttttaaactctcctctgtcacgggctgctgaacagaaggaaccctgtgaaagttgtgtcatcgtcctcatcagcaaacaagccattgaacctctctcctcctgtcacctgcagccacacctcatccccgagcttcagctgcaggacaatgccgccagaggcctggtcctcagagctcatgtaagcatctttggtgtgcagtatttttactccatttttgaccaaagacacc

SEQ ID NO: 476671 - DNA, 971 bp, Homo Sapiens
ccacttaaatacaaactttattctctctccaagaagatgcagacgtcacaggtggccctgagctcccacccgaggcttaggcccaaggggcctcttccaggctgagggcctgctggggctgggccaggggctgaggctgaaagcagcagcctgcctagtgggtgacgccaggggccggtgtaacatggcaccgaggttggggccacagcaatgtgtgggacggtggggtgggctggggcccttggctccaagcattagttctccaagctctggtccgttctcctacctccttcaaggggcaccagggctacaaggtggtagttgagtattggggcccgactcctggggcactggagtggtctctaggcccgaggccccaaggagagggctgggtttctgggagagtgctggtccttcctctctgggcttggccatcttgacagcttcatcgtaggagggtggaggctccggggtgtacaggctgtaggcaggaggagccatggagtccaggtccagctccccaaagggcaggggcaaccgcatgcccagtgggtactgcacggagctgtaggaggtcacagtgctgtgtacagggctgtcactgtccatagggatgactgccacgtcgcagggctgccgtgctggtggcagatgtggctgggcctgtgcctgcttccggaggcagcagaaccggacacaaccagctgtgacaccacacagcagaagcaggaggaccgccagcaggatgagccccacgtgccacaggctgctccagcgggcctggggcgggcactggtccgaggggtcgcagctgccgtccgcgaagcccagcgccacctgcggcagcggcaggagcggcaggagcggcaggagcggcagcagcagccgcagtccgcgggcggccagcggcccccgggccatgcttgagccagcccttggcacgtgtgatatctggcgcgccgaattcaagc

SEQ ID NO: 476672 - DNA, 717 bp, Homo Sapiens; identical to SEQ ID NO: 161051

SEQ ID NO: 476673 - DNA, 1000 bp, Homo Sapiens
ttttttttttttttttaaaatttcaaatttaattacaacatacataaataaataggacagacagcaacaggactatgatgagcagcagcctggattcaagttctgcgatttgtgctttatcttctttgttccttgaggacccctcctgcccacttctctctgagagtaggaagggtacaaagagtccactggggcctccttccagcaccccttttctgggggtaggagattctggaatgaggggcaccaactcctcagtagcacctctgatttatcaattttcctcctgccaccagtgaaaaacacaaaggctttggcctctagaagcacccacggccacccagccacgctaatggaaagggctctgccccatgagccagatcttttcatgtcaattttctgtccaaacccttctcaaccatcaaaggtcagaaaattgcacacatgagacaaatacctgggcccttaacttaccaacacaccaccacagagaggccaccctcccttactccaagccagatccccaactctgggatctctggatgaatgttctctttctggcctgactctaatcccacctttcagtccttccaggcccacccccaagagctaagtccctatttcagggcctgggagccccttagggatggggtgggagaagcagttatttccgatgcttggcatccttctccgaagccttggtttcaccatgcccactgcccacactgcttagaaacatcttgtccagccccttgagtgactccagcaaatagttctggaaggcagtgagggcagcacagatggcaggcccaccgaagccatgggtgatgaggctaaagtgtgtcaagcagctctgtactccgggctccaggatgagtgctgggcggctgttgcccagcggtgagcggtcctgagccatcaagtctgcaaactccttgcagatctgcttggcagccagcagcatgctcttgcggctgtgcagctcccccgggtcagcgtg

SEQ ID NO: 476674 - DNA, 1000 bp, Homo Sapiens; identical to SEQ ID NO: 344992

SEQ ID NO: 476675 - DNA, 1000 bp, Homo Sapiens; identical to SEQ ID NO: 344993

SEQ ID NO: 476676 - DNA, 1000 bp, Homo Sapiens
aatacgagaaggggcatctggatgcaggtgtacagtttaaaataccttagatttacatagcaccttttccttctaaagagccactgcctctgccccctcagtcacagccacacctgagtgaagccttcagaacacaaagatcacagctcctgtggcagaggtgggacactgaggcagaggcctagaagggatttcatgcagactcagtggtgtccagggctccctgcacttccttcgagccctccctggggaggtctggccttggccctttgggagggtaagaccggggcacagccctcactgggcattcactttgtatttcaggatgtaggagtagaaattgtggttggcattctccagcaccatgacatagatcttgagggcaaacttgcctgcatggggcagctggactttcagctcggtctgcttctcccggtgcagctggaagatgtagcgccgctgtgtctcctcagtgatggggccatcatccccgtggagggaagccaggacattaatgccctcctccacgctgaagctgatggagcagcgcccgtcgctggtgtggatgatagggtcagggtgggagggcttcatgatgcccatctgctccgagaaccagctggggcccacgggctggtgaagctcagcaggcagctggacacccatgtccacataattgcacttgagcgtgtactccagcactgagctgtagatgtcggagttgcccttggcgaagatctgcagcttgtgagtacccatggttggagggtacacctccaacttcatcccattcttccttaggctcagcagcccatgctcttgcttgccattgagcatgaacatgaacagcgtcggggcgcagctctcaatggtgaccgtggccttcccattcactgttctgatcatggaagtctctgggtgggcactcagcatccctttgttgtagaattcactcttgtgatacatgttgttctcaaactgcctcagagattgaggaggt

SEQ ID NO: 476677 - DNA, 1000 bp, Homo Sapiens; identical to SEQ ID NO: 344994

SEQ ID NO: 476678 - DNA, 1000 bp, Homo Sapiens
ggggtggggttacgggagtttatttcagatcacctgacattaatactgtcgatgccttcatcgtcttaatagttgtgtcttggtctcagacatcgcccgctgtgacggctcagggcacgcccctcagacgtggctgttcagtgagcagatggtgagagggtctgtgtttgtcccctcatttgggaggcagggggaaaagataggcctgagggcctcttggaaagaagcctgcgggaagctgtagatgagggattcatccgtcccgttgtagaatgctatatgtccagattcatagtccaggaagacaccaaccttacacacaggctctctgacgtgctgacctttcaaaggtgacgagacccagaggctgtaatcatctccgatttttaaacctattagtgagaacaggtccccaggtggcttggggagattcccctttctgctcacagagtccttgcagatgcccacttcccactcggtcttgtttcccacctccacctcccagtagtgtctcccactggtgaagatctgagtacccagcacagtcgcagactggtcaaatctttccgggttgtcgggtagctgctgtctgcttcccccatatttcacactcttcagatcctccgacaacacgagataggcattagctgtggctgggtccagcgttatctccgtgctgaattttcttagcatctccttcattcccgtgatgcggcacagactcagctctgtggtggtggcctctggacactgaagcaagagtggctcgctcctttccagggctcctctcacttcctcaagagattcgaaagccgagctttgacttgaggactcaatctgtgcgatcattttgcttaggcttctgatttgctgggtcagtttgatctcattgttcctcagcttcctcatgttctctttctcttcctgttctagtagctggagttgcagctgctcctcttccttcaggaactggtgcattttcatgtattctgacacaaca

SEQ ID NO: 476679 - DNA, 1000 bp, Homo Sapiens; identical to SEQ ID NO: 161052

SEQ ID NO: 476680 - DNA, 1000 bp, Homo Sapiens; identical to SEQ ID NO: 344995

SEQ ID NO: 476681 - DNA, 1000 bp, Homo Sapiens; identical to SEQ ID NO: 344996

SEQ ID NO: 476682 - DNA, 1000 bp, Homo Sapiens; identical to SEQ ID NO: 161053

SEQ ID NO: 476683 - DNA, 1000 bp, Homo Sapiens; identical to SEQ ID NO: 344997

SEQ ID NO: 476684 - DNA, 1000 bp, Homo Sapiens; identical to SEQ ID NO: 344998

SEQ ID NO: 476685 - DNA, 1000 bp, Homo Sapiens
tttttttttttttttgttttttttttttttttttttttttttttttttttttttttttttttgttttctcaaggtctttatttgaaaggaatgtatacaatataaggcattcaactgatatctacctaccttatctatatattacttccttatgaacagttctgtcaccaggccaaatgtggccaaattagcttgcacaaaatccaaacccttgtgcctgacatgaacattctaattttgtgtttcactaagctttataaatatatttcttctatttaatttactacatctcttttcagtaccaataaatatgttcgtctgctgtatttctgttcgtatttctgagtttgtaagtaataaagtattctaattagaacatgaaaaacatgatattaacatctctgagaagaacttactctattatttcagaatatgctacaagatatttacaatttctgaaagaactaaccacagtatagccaactggctgacaatggtaaccttctgttttattatttcccaggtattgttccttactttcaaaactagctaaaaggaaaatgttagcatggtttatgaacagtagactttttcaatcttctcttcaagggaaagactgtgagtacataaattttttaaaaagatatatgggttttgcagtattctaatggaaaaaaactaaaagctgagtttttttcaaagcatactaaatgtcttttcatacaaatgttctatgccttgcaaaagaacatcactattagtaatttacatttgtacaaggctaatgataaacacagatcattatattttcttattttaggttcacttcctaacactagctactagtaaaaggtctctcaatgcaaattacagccagccaattaaaatttaattttaatttagggattataggtacacaaagttagtgactttttttagtagtagcttcctataaataaaatttctatatgagttggccaatatatataaaccttcaatg

SEQ ID NO: 476686 - DNA, 1000 bp, Homo Sapiens; identical to SEQ ID NO: 344999

SEQ ID NO: 476687 - DNA, 1000 bp, Homo Sapiens
tcagaggtggtggggcaccaggagcaggaggcaaagcagagggctggggagcccggccgagagcgcagggcctcgggagtccgggggcgcctggcaggcagcgccggggcacatctgctcccctcgctggtcctcacccccgtagcccccccagtagtcgtcctcagtaggcgcgtccccgccctggcgcccccgcgagtcttcggcaggcagatctcggtagagggtggagggatcggctgggggcgccccggcctcggccaccccgtacaggtggttggaggagctgttgccgcgggcgcggctgcccggccgcgtgggtgccgcgggcggacacgcctggaagtcggcctcgcggagcgcgcgcaggtctcggccctggcgctccgggggggtggcgcaggtcacgtcggagctggacacgcgcgcgcgctggaaccaggcccagagcggccgcgcgcggcagtcgcacgcccaggggttagcgttgagccgcaggaactcgagcgagggcaggtcggcgagcgcctcgccgggcagcgaggccaggctgttgttgaacaggtagaggatggtgaggcggctgaggccgcggaaggccgcgcggtgcacgccctgcagccggttcccgtgcagcagcagccggtccaggctgcccaggccgcgaaacacgtgctctgtgagcagccgcaggcggttcccgtggaggaagaggtggctcaggttggccaggtccgcgaacaagtcatcctgtaggtggagcaggctgttctcctggaggtagaggtactgcaggctgaccaggcctcggaagatgttgccgggcaggctgctgagctggcagcggtacaaatgcagcgactgcagccgctccaggccctggaaggtgtcgggctccagcgagcgcaggtgccggttgtcaccgaggtccagctcctccagggcttgcaagtggcggaaagtgcccgggtagatggtggagaggttgttggagaagagc

SEQ ID NO: 476688 - DNA, 1000 bp, Homo Sapiens
ttttttttttttttttgtagttaaacaaatttagttaagttgcaggatacaaaattaacatacgaaaatcagtagtattcctctatgccaacagtgaacaatatttcatctctttttgtgactggtctgctgctggttgaccctcgttcctccttttttgggcaggaaggtgacatccaggattcaggagagccttctgacttgggtgtgcatgaaagtcacctgaggcccttgacgtgcaggaatccttgccagccttggattgcaagccccaggctatggtatagcaatgtgcattttgtagcaagctccctgggggtggcaggtcccagtgtttttttgtgagttccttcatagaggtttgaaggttcctgaggaccgcgttgtcctccagggcccagctctgagagagtcgctcctgaaactcccagacagtgctccaggaaagcttcatgaggtgcttcctgtgtattttgaatgatgcatgcaccatggctgtcagtacccgcgcgccctccaagatgaacacatcccacagtctcagggtgagcccgaaggatttcccatcaaggaaacaccggaggagcctcgtcagcatggaaccctcaatgcacagcccttccttgcccaggtgtctcatgatctttgggaaggacttgtgcagcacctgctcctggtgcgataggagcttctcgagccaggcagtatttgggctgtagaataccacagggagtgcctctcaccagcgagcaactgggtaagcgcccagaaaacatcttcctctggcagacacaggaggaggatggcagtgatgcggctcaggtccctgtggtagcccacctcagggttatatgcagaataggccacgaggatgtcacataattcctgctgcttgactccgaatctttgtatgaacatcatgtgtttctgcagggtgtggctgacatctagctggatgcagtggatgattctggaggacctcttgcccttctccttcatg

SEQ ID NO: 476689 - DNA, 1000 bp, Homo Sapiens
ttttttttttccaggagcacagtggcccgccctggccatgggatgagtttttaatgtgaggcaaaatcagtccacaatacaaaatctaaaaatcacacccacttttcccacctggctcccggggaggggggaagctgggggtttcttttgcctgcagggtgtggggaggagcagaggagggccaagaaagggagaaggaaacagaggccacagaggcctggctggaggtatcctgctgccccctgccctgtcctggagctgcccttggcctcctgtgccctctaccggtgcacgcctgtgtgggcccagcccccatctgtctggtctggccctgagaggctcgggcaccagctgcatcatttctctttcttctccagccccttcgatgctgatgcctctgttccctctttggattctgtcactgccgctggatccttaggatttgactcctcataacttgggccccggggcagtagggggaagcgggcaggtgggcacccgctgggcattacatggcgctgggattctgcgggcgccggcggcgagggccagctagcttctgctgcatggagtcggccaggctggctggggagcccgagactgtggggaagtgggtgagcctcggggtatgaggcaggatttccgccgaggactcgtagctgaacatctctgtcacttctcccttggccagcgccaccaggacaggaaaaccgatgcaggcggggaccaggtataggagggcaggctgagcatgcttgaagatgtgcatgatgaagatggtaaggcccaggccgaagatgtaggctgcaaagctggtgtagaagtaggtgtgggtattcttcttcaagctgatgtcaaagcgcagcagcaaggcaatgaagatccctggaatgacgacatctccaagtcccagcatggcaaagttgtttgcttcgaggcctttctccagcagatcctggggaaacaccaattttattggtgcctcgaaggacttggccac

SEQ ID NO: 476690 - DNA, 1000 bp, Homo Sapiens; identical to SEQ ID NO: 345000

SEQ ID NO: 476691 - DNA, 1000 bp, Homo Sapiens
acaattgttgtcaaagctgtttggatttttaaatgtaaatactgaggactaagaaatcttgttaagaagcaggaaatatctcagttgatacttcaaagcagatattccacagaaaaggacacaaaacctattacaagctctatccaatgtagttacatggtctattgatgagggcagttcatttattttatgtagtaaaactatggtaagttaaaagcaataacacttggggcataaattagaagtattattttcaaagtgacatcttcattgaaaacacagttgaagcactgaaaataagtgatctagatgaagtggctctcctacaatctgcctgagaaccctggattcccccactgtagaatgtgtcacactatatgtaattgtttatttatgtgtctacattttagctaaaagatagcaaggaccaagacagccctgtgtagagctgaatcctcaatgcctagcacagtgacttggcatgcagcagctttttgttaagtacttatttcatgaaggaatgagtaaatattgagtctgatggcctcttgaacttgacggttcaagacactgacacctctctttgggaactatatcattttttgaggagtatgatatgtggagaatgatggagtacgtgtctggaaataagaataatcataatgatgttctattgataacacatatcaataagtccagatgcaccttttgaggctaaaaagaaaaaaaacaacagtaaacactatcattaaaggaaacttcatagaaactgttccaataactgcaatgagaactaattgaacctgaatttacaaatagtacacaggcttccatgctaaaaaaaaaaaaaaacaataccagagcaagagtaatattcaaaaataaagtgatacacttcaaacaaataggagaagagtcatctgttttcatattcttttggattaactcataattcaagtcttaatgttgaagtcatgcttagtatacaccctttaattca

SEQ ID NO: 476692 - DNA, 1000 bp, Homo Sapiens; identical to SEQ ID NO: 159278

SEQ ID NO: 476693 - DNA, 1000 bp, Homo Sapiens
ttacaaagtttaaaagtactttttattgcagacattttcatatacaacgttagtgaaatcgagaccccccccatggtgaagacatatattcctatcttataaaaacattcaagtaaccctgggcgttttcatgttattctcttttttagtacctggggattggctttggctagattttctattttaacccatgcttcttcccgttctttcatttttagcttctcttttagtttctctgctttgaactgttgtgtacagtcatcaaatagcttttggttcatctccatgaagagcttcagggcgttgtatatcaagccatgtattgtcttgttccaatgggtctttgagttgcggtacaaggaaggaaacatgatgggcagaatcttcgctgcgttgtcactgattaaactcatgatgtattcattattccagtaatagagagctcgctctgccacctggaagtgtgggctggagacacatttggccaactgccggaagaggggttccatgatcttcacaaattctgatggttcaatgacatctaaaatctcttctaattcgtttaagaacattacttcttttggactgtgagtctttggccagtatttgagaagtgccatcaccactggttccgtgagggtgctgtccttttctaaaaactgcactacacagtatgccagctggggatggtagacactcagagatttcactttgtgcaaaggtagtaacaccttcaataagaaaatcttgtgctcttcttttagtggtaaggcaaatccattaattatacttcccaatatttccagtaactctgctatgccattatgatgctctgtttcataaataaacctataaaatatattatttatctgttttctgatgtaagctctcaagcctaggaatttcccatagattctgtgaagggtggttttaagaaaatctctctcccgaggatcttcactgtcaaagagctctaaaagctgcaatacaaacttctgat

SEQ ID NO: 476694 - DNA, 1000 bp, Homo Sapiens; identical to SEQ ID NO: 345002

SEQ ID NO: 476695 - DNA, 1000 bp, Homo Sapiens; identical to SEQ ID NO: 345003

SEQ ID NO: 476696 - DNA, 1000 bp, Homo Sapiens; identical to SEQ ID NO: 345004

SEQ ID NO: 476697 - DNA, 1000 bp, Homo Sapiens; identical to SEQ ID NO: 345006

SEQ ID NO: 476698 - DNA, 1000 bp, Homo Sapiens; identical to SEQ ID NO: 345007

SEQ ID NO: 476699 - DNA, 1000 bp, Homo Sapiens; identical to SEQ ID NO: 161055

SEQ ID NO: 476700 - DNA, 1000 bp, Homo Sapiens; identical to SEQ ID NO: 345008

SEQ ID NO: 476701 - DNA, 1000 bp, Homo Sapiens
tttttttttttttttttttttttttttttttttttttttttttttttttttttttttttttttttttttttttttttttttagttcaatatttattttattaagaatacagagaaattgacagatgatagataaaagcagtactaaattatcccatgaagagaaaacttcctgaagtttaaatataaaataaaataaaaggcagaattcttgatgctttttctgcattttatatctgtaccttatgtaacagtgaaggtttttctgttgtaattacttcttatttttcttcacttcacaacttttttcttggcataattgcttggcttttcgttcatgatgcagaatttccttgggaaacaggtttttctcatcaaatacagctttcaaagttttaaaaagtgacggggcctccagaatttggggacgctcttcctctggttctttcctaaagtatttctcagggtctagaaggaaagcaggtttattcacttcaggcagctcttccagggctccaatgtttaatgacctaaatgtactgaatgatttttttataacttcaccataataaggtttttgtgtttctttcatgcaggtacttctttccttatattttatatctaaatttatatcttctgatggtctgacattgtatgttgagtcatctttgtttttcttattaagtagagaatgttctgttgggtctaaacaagattcctccttagaaaataaagaaatttccttttgaatctcactttccactaaattagtatctcttttaggaaggaaaaggcagttttcaatatgccagtgctttgcctgaccaaagatccaaacaggagcattgcagacaccagtcacacaaatactgcagtctgcagaggaggagataatcagtaactgaccacctggctcacacatctctaaggaacttattcggtcctcatgaggttggaatgatcttatcagagttggggccttggtgattttgttcttactgg

SEQ ID NO: 476702 - DNA, 1000 bp, Homo Sapiens; identical to SEQ ID NO: 345010

SEQ ID NO: 476703 - DNA, 1000 bp, Homo Sapiens; identical to SEQ ID NO: 345011

SEQ ID NO: 476704 - DNA, 1000 bp, Homo Sapiens; identical to SEQ ID NO: 345012

SEQ ID NO: 476705 - DNA, 1000 bp, Homo Sapiens; identical to SEQ ID NO: 345013

SEQ ID NO: 476706 - DNA, 1000 bp, Homo Sapiens; identical to SEQ ID NO: 161056

SEQ ID NO: 476707 - DNA, 1000 bp, Homo Sapiens; identical to SEQ ID NO: 345015

SEQ ID NO: 476708 - DNA, 1000 bp, Homo Sapiens; identical to SEQ ID NO: 345017

SEQ ID NO: 476709 - DNA, 1000 bp, Homo Sapiens; identical to SEQ ID NO: 345018

SEQ ID NO: 476710 - DNA, 1000 bp, Homo Sapiens
ttttttttttttttttttttttttttttttttttttttttttagggtggacacaacttgctttacttgaaccatctgggtgctgaccaggccctggtgaggagacaccccagcccctagtcagccacagggtgcctgggaacaagggggccaaagtcaagggcctgagactcagtgtcagatcctaggctgggcttagagcctcagaagtggaatttggaattctgagagaacaatctagaattctaggaatagaccatagaatctcagaaatggaatttgaaagtctaccaacactcccggggtgggggtggcgggtactgagtgggaatgattagaataaaattgaggactctagcagcggacttagaatggtatcagcgggttctcatcctacaacctgactttggaagttggagataaggggtgtctaggggttgggtcagactccagttttggagtctgactcacagttgggcggagccaaggccccctgaggctgagccagaacctctgagagtgaacctggagactcagagggcagctggcagggctcacagtgtggggtcccaccctgcagaggctgggtcaggccctcaagggctgggttgctggcttcaagaggctgggccaggatgtcaaggggcggagttccgggttccacagctgggacagtgttgcccagagctgattcctgggacttgcagaaacgtgcgaaggtctctgaaggcctggccccggtctgtggagcaaatccagctgcctgagctagctccctgacccgggtgttgaatccctgcagctgctcctgccgcacgtccaccaggtaccgggctaattccacaatcaagttccctccgggtgccacacaggccccaagctcagggatgagaagatggaccataccacaggccacatagaggagctggaatcggccgttgtagcagctcttgtggtggagagtctgagcagaattgagcggcaggaagtggacggtgaaa

SEQ ID NO: 476711 - DNA, 1000 bp, Homo Sapiens
ttttttttttttttttttgcaaccatagtgtgaacgttcagcattgcatactgaaaaactttgaatctcatgtaagaaggaactgggctagagacaggagccaagatttattaccatttctaagttttatgagttctattgttttcctacctttattaccagcgttagctgtaatgaggattctagaaaaaagagctggaaaaaagaagcatcccctaactcccacaatgtagcacttcagttctggcctctttaggattggggcagtgtctcatctctttattgtgtattcgtagacagtaagagggagtctcacttactacttggaaaagttttaaagacctaatacttttgtgtgtgtgtgggaactaggccacaaaagtgctttatgaaagagtttccttacgatcatgtccggattcaaatttcaagtagtttgcatgatcttcatgtaatatctgggacacaccttcataattgacaagccttttttttatataataataagaatggctaaatgagtgagggatatcattcatccgcccccatgaccttatctttttcaagtgtgaaattcagtggcagaaggagatggatctatcccagggcgactctagattcttcccgcaaagatatgcgtgctgctttccgtcactagcgccccgagagccgggtcgggttcgcttactaccaagacttctctacttaacgcgctgcgctcgggcacttagcaacttcgggaacacgggctgtgggtctgggcacaccacctcgagtttagggattctcctcacttctagcccaaactttggataaactaacataaaggttcaggctttcctaggaggcgtcgtccttgttctcccagtgctcgatctgtttctggttctgcacggtagttaaaaatgcaagtggatttcctaacggccgagtacaggtacaggtggaggtcggcggaatcctctgctctgaagctgaaagtggagggtggcgcgaggcg

SEQ ID NO: 476712 - DNA, 948 bp, Homo Sapiens
tttttttttttttttttttttttttttttcgaaatcatcttctttatttattgggttactttatttattcagggtgggttccctccaccccaaaaataccagctccaggaaaaccatggtatctccccagcactttgcagggcctggcatgtggaagatgtaccagtaatatttgctgtatgaatgaatgagtctcttcatgtgcaggtgacttatcctgcctctgccactcgacggatgtttcagatgccccttagcggatctaatgatgtttccttggctcaagcacaaaagactcctgcttagctggggaagcagggccaggccctgggaattgcagcctctgggcatcagagcccggcccttccagctaatcggcctgcccacagacacaagaggagagggctttcagtgagtccttgactgttccccaagttgaagacctcacaggcgcagccttcacgggtttccccttagcctcgggaacctcctgggggcagagcgggctgactgggaaggaagctgaggccacagaccctctgcagagcggcagggtggccctggcctgggcaaggcatcccccacccatgggggtcacccgagtcagatggggccagttttccccacagaacacgatgtaagtcttcattggtggggtgacaagccctcgattgggactgggggcttggggtggtgatgcggttgctgccagggagagctgcttcccgtgggtgcagtcaataacaaaagtcaggtgagccgtggggacggtcttctgatggccagccagcttcccaccggagctggtctccaggcctgtctcacggatggtgcctttgaggttggctctccagtccctgggatcttctgacggggccatgcggctacttcggcgcctgcctagctctggcaggagaggagctgtcctaggccactcttccaggatgt

SEQ ID NO: 476713 - DNA, 1000 bp, Homo Sapiens
ttttttttttttttttctttttttttttttttttttttttttttttttttttttttttttttttttttttacactggacttttggctttattgtagtcattactgttacaatattgatagcactgtggactgcatttttataaggtcatctgaagaatcctgagcccttgtttcctgtagaaagagtggtttcctttaaaattaaccacaaaagccctaaatagtgttacaaaaatgagtatctacttcttatgaagtagtttagtgctttcagctgtatcagaaatagttaaaattggtatatcaattttaccttcaacattcaaataagaaaaaaaactggagatagaggtaaacaaatacttttctaccttaagcaagaagatatttggtacagagacaaaaaccaaataagcaaagaagaaaacataccgttaactgaaaacataaaaaattatatcttagtgtgaccttcttccagcaaaataataataatataatattaataataagtcaatagctataccctaaagtgggtgcaggcattttgatttataatatcatattatgcatataatgcatatgatattgtcctcataaaagcaaatgttatacagagaaaatctgaccttgtttgtaacaatttctcagaaagagatattgttgtggaaagaattctaaaggattttttgtttatttttgtttagccttaaggtttcaaatgtatatttttatttaaaaataacaataacgcagtctgttctgtgcagtgtccttccggctccaggggccctgcagctgctctgcttggggctgattttccagtccctacaagccgacctctcctgtggctttctagtacgagcccctgaataaataggatgaacatacaaaatctgaccgttatgagagactgtgccaggtggtgaggacagatgcagattttactcagggtcttccttgggaaggcctggcctctcctcagccagcagccacctga

SEQ ID NO: 476714 - DNA, 1000 bp, Homo Sapiens; identical to SEQ ID NO: 345020

SEQ ID NO: 476715 - DNA, 1000 bp, Homo Sapiens; identical to SEQ ID NO: 345021

SEQ ID NO: 476716 - DNA, 1000 bp, Homo Sapiens
tttttttttttttttttggagttgagaacaaactttatccaatgactctgaagttacctgctttgcccaagtatttctgcagagtcatcaaatatattccagactagaaaaaaagcacctcaaagtcaaatgaggtgagtgccaacagaagccaaggagaaaagtaacaggagatcaacagggaaaagacagagagcaacacttgctagcagaaaacaaacccacaaacaaaagctaaactggagcctttccaatcagttccatctttcgggctctgcagacaaataaataggagccgggctgacctccgataaccgggcagatccgcagacaccccctttcttcacactgcgtgtgggacgggccgcagagctctctgacacttctggacttaagagtcccaggacagcatggcatgggctgtgtccttggcaagtccttggtctttgtccatgtactatggacatctccagtggactgaacgttgctcagttttgtagaaaaaatatgaataaaaacagagctcccaagctcgtgattgttttctagcttgatcttgtctagaaatctaagtcatcttggccaaagccgtctgccctgcccactgcctcagtgggggcgagacttccgagtgcctggtcctcttgtaggtcataaccttcactggccccctgctctggagtccttgagcccaaaggggcctcttcttgctcagaagtagaactttctgggtacatcctggtggccttcctctctgcatgaggggtccccgtggacttggcatcagggctccttgtgtctccaagtacatggtcattttctgagtctttctgccagcagttgccccaagaggatgctctggaggaggaagggcctgtttgggagcctggcctttggtggggagtgtctccacctggggaagggggtggagtgggcctgtcctcagggactgggctgctgctttcagaagcctcctcagattggccatctcctagactga

SEQ ID NO: 476717 - DNA, 1000 bp, Homo Sapiens; identical to SEQ ID NO: 345022

SEQ ID NO: 476718 - DNA, 1000 bp, Homo Sapiens
ttttttttttttttttttttttttttttttttttttttttccaaaaacaccattttaataaggaaacaacagaaataaaagattgttctctggctggagcccagaccccatataatacattacatgtacaaagtggctttcagccagctcctgggcgtctccctggggctctcctaccacctgttccatgccaaattcctgggtccttggacctctgctcctctccagaatatgcccaccccctccccttatcccataacacagtggtcaagaggagagcctgacaagtggctggaattggaggagggactattagggtgaagatgtttgcaacagctaaataaacatcggaggaaagtctccctttcctcagggtatagggtggtcagtggaaaatggcgtgtcctgctttggtgtggagcatgagtgcccagggaagcccaacctgaggtgggggtagggtccccctgaaccccttaggatctcctagaattactgcctccactgggacagggcaggaggcagaactgtccagaactttagagaactagagacctcccaagaggctgatgttggcatgccaggactacccagaggtcaccgttgagaggagttttggccattggtgatggcgctgtgaggagtaccctggtgcagttcccaccatggtcaagttaatcctgctgcaggttgccatgccagggcgggatggtggtcatgtggagaaaggtactcctgctctgctagtgtgttccaggctggtccagggcatgaggaggctcaggatgctggctgttgatgcttgtgctccagctatgttcttcccacaggtagatgccccctgacatgggcccaatgaagggccccaagtgggcaatgacaccaagaaaataggccatggtgggcatcgcaggcggggaagggcacaacttcttgagggcttggtggcatctcctcctaggtggtatatacaggaggtggagggacagcaggaagcaag

SEQ ID NO: 476719 - DNA, 1000 bp, Homo Sapiens
ttaaacagtcttcttagatattttcttgcctttcttaaaaaccagcttatttttaatgtagccacgcttccttttggtagtcttctttgacaaatacttctgttttgggaaaatgttggtgactcgaggtttgtgatctaatgtctccctgttatcaggtgcttttactttatatatcctaacaagccagtgttctgatgtaaaggcttcttccaaatgtttgaatttaatgtccttatttccaatctcagcattacgtgttcggtcaaaacctgggggtgtacgaaaatccagctgcatttctccaaatctgtagtatgacattttatacataaggcaattcaacaaagtaggggatcctgctttgtctacacggaattctccctgtggggtaaaatagtcactttcccgaatgtctttgggatgttctccttcagctatcctaaccatccagagaaatttgttgatatcatcaccagaatagccaataacccctccaaaaataaccaaaacataatctacatctagagtcctcatgattttataggctgctgtttcattagaagacatagcttttcccaccagtgctatgtggctgttattccaggtgttattatccaccaacgtagttctattagccattccagctatctgatagccataatcccaccaagacattactcgtgcatgttcatctgtattttgccttagccaaaagtaagcttctctaaaatcatctaagatattcctggtgccatcatgattgtatgaggccaggactacacttggactagagtaggcattgcttgtgacccaggtacagtggacagcaaacatcatcaatagcatcagcatcaacatggtgacaatgctttttatattagggcctaatccctcttcagttttttcctgttcagttgcatgtttcctcactttacctgccttatcatacaaatttccttggtttcttttgtcatcctcatcactgctgtcctccaca

SEQ ID NO: 476720 - DNA, 1000 bp, Homo Sapiens; identical to SEQ ID NO: 345024

SEQ ID NO: 476721 - DNA, 1000 bp, Homo Sapiens
accaaaaaggcaaactggactttattataaagttggctacaaagtcaccgcagcaccacgaggtggccatctgggcaggcccaggcagtctggcggccgggtgagtcccgcaccaggtacacgcactcgtgcaagcacacgtgtgacggcaggtctgccttcctccatcggaaaggaacgtagcgtctcttcgcaccccccaccccaggcgaggggcgcaaaagtcacaggaagggccgccagggcggcagagtccatcggaattgaaatcccgttactggtgtgtagagaattctacgtgggtgtcaagagcccctcagggcacgggctggcccgggtgggccctgcctttcccccaccaaggctaggggtggcttggcccctaggagtggagaactggcccaggccaatggggcaaggcggcggggaagtgagactcccccattctccgcttgaaatcccattcaaggaaactcactacgagtgaatacagattgaaatggaaactgggatcgctcgaagtctcttgattttaaaaagaagctcccctcccttgccctcccacctccccccccccaaaatcctgcagggcctggggaatcatatatatccccctctggccctcagaatccccccaacagtcccgggggggtggagagcggctccacgtcttgatgacaatatgccatacttgacgacgttaagtcacagacttattcaaaacgttggttcccctccacttccatcttcatggaagctgtcttgaacttggctctggagttgatgcaactcatcagtaaacccatcataggggaatgctgagacacctgtctcaaaggcggtttcatatgtggccaggtcctccaggaagctgtggtcttctggggacaggttgttgcaaggcgatggggcccctcctgggccctctgcctcaggatcccctgagccccattcctcactgggatctggggtagagagatccatgaagatgtcttccacg

SEQ ID NO: 476722 - DNA, 1000 bp, Homo Sapiens; identical to SEQ ID NO: 161060

SEQ ID NO: 476723 - DNA, 1000 bp, Homo Sapiens; identical to SEQ ID NO: 345026

SEQ ID NO: 476724 - DNA, 1000 bp, Homo Sapiens; identical to SEQ ID NO: 345027

SEQ ID NO: 476725 - DNA, 1000 bp, Homo Sapiens; identical to SEQ ID NO: 345027

SEQ ID NO: 476726 - DNA, 1000 bp, Homo Sapiens; identical to SEQ ID NO: 345028

SEQ ID NO: 476727 - DNA, 1000 bp, Homo Sapiens; identical to SEQ ID NO: 345029

SEQ ID NO: 476728 - DNA, 1000 bp, Homo Sapiens; identical to SEQ ID NO: 345030

SEQ ID NO: 476729 - DNA, 1000 bp, Homo Sapiens; identical to SEQ ID NO: 345031

SEQ ID NO: 476730 - DNA, 1000 bp, Homo Sapiens; identical to SEQ ID NO: 345031

SEQ ID NO: 476731 - DNA, 1000 bp, Homo Sapiens; identical to SEQ ID NO: 161061

SEQ ID NO: 476732 - DNA, 1000 bp, Homo Sapiens; identical to SEQ ID NO: 345035

SEQ ID NO: 476733 - DNA, 1000 bp, Homo Sapiens; identical to SEQ ID NO: 345036

SEQ ID NO: 476734 - DNA, 1000 bp, Homo Sapiens; identical to SEQ ID NO: 345040

SEQ ID NO: 476735 - DNA, 1000 bp, Homo Sapiens; identical to SEQ ID NO: 345043

SEQ ID NO: 476736 - DNA, 1000 bp, Homo Sapiens
ggaaagcagtcaggagttcctgggtggccacggctctgcaatagcacttatgtcatggaagtgatatcccacctcctacatatactctttgcctaggtttttggaacaaggttatagtcagacactgtatctttagattgatgtcgaccacaaagttcagccagagcttgaggctagatgcacagccttgctattgggaagaaggccttttctagctgtacaacacagtctcactgggcattcatccagaaatagagaagaaagtctgccagacttgagttatgttgtcttttattagcagggaatgtcatcacagattggatagtacatccaggtgcaatgtcaccatcagcaaggtcagcttgacactcaagtggaagattagggaagaatgactaggataaaaaaaaaaggagggcaccaagggaaagggatgatggggtgagctggcgagtgtgggtgggaaatgaaatgtttattgaggatctgctttgtgctgggcactttaatccacattttatcgtttacttttcaaacagatgcaccttacccccaccccaatgctctgtccctgcagatatcagaagacagtgtgattttcatgctctgaagttcagttttacatccaagcatccctctctgttttttaacaatccaaagacaggccaaaaaaagcaccacagtttattaagtacttactaagcacccatccactgccccacactgtggcaaggattgtgaggggtaaagaagcatggggcacaatattctgctgccttcatgtaacttacagtctcacaaataaatagaacttcagttgaaatactgacattaattaaatagagttgtaataaatacaagaatcttctctgtagactcttcacagcatccagaggcaccttccctgactgtcactggcgctgcttaaagaatgacttctttgacaataatcctgggccaagaatgggacccatggccaagggcgtgaagtgtccagtga

SEQ ID NO: 476737 - DNA, 1000 bp, Homo Sapiens; identical to SEQ ID NO: 345044

SEQ ID NO: 476738 - DNA, 1000 bp, Homo Sapiens; identical to SEQ ID NO: 345045

SEQ ID NO: 476739 - DNA, 1000 bp, Homo Sapiens; identical to SEQ ID NO: 345046

SEQ ID NO: 476740 - DNA, 1000 bp, Homo Sapiens
ttttttttttttttttttttttttttttttttttttttttttttttttttttttttttttttttttttttttttttttttttttttttttttttttttttttttttttttttttcatgtttctcatttctgtttttattaattctttagaaagagtgtttcaagtatgtgtaaaaaccataaaagtaaaattatacaaaactcccacagaattaaagaaataactttcttttttgcaactgaagtttaatcaggaactgtacaattacatctgctatattttggtttgttccaaagagttacggttcctcatttactggagaaagtatagatgccagaagggtagctcggctgctaacagcaagaaattacccagcccacatttccagtctaggtgtggtagtgctttgaagggaggaagcaagaaatcactctgctccccttctactgattctgaatacttggcttctaaatgtgtatggcatgtgcaggagtggtggatctggggattggaggaacaggaaaaggagggaaatgaagatggaggaagaggttctgtgtgaggaaaaacacacatgaaaggcagatggcaggaagttgggaagcaggcattgaaaatgacacatactataagtggagtgaaggggaaaggaggtgggaacaggtgatttatcaggtctgttagatctttgattactgtaagtttataaaatggatagctgtcactaaaatacatgtcaacaaatgttggaaagtaaagttggtggtgtaagggaaggcgaaaactcactgtccttttaattttgtttccttgttccaaacctggattataaaatatatcaaataaaatgcagacaaaacgctggacgggggcaaccactgcttttaaggtatgtgagctgagggcagtaaatatactcaaattaaaatttcaaaactgtgtgatctgcattcttgtccacctacagactatcctaaacatcctgccattaattagctga

SEQ ID NO: 476741 - DNA, 1000 bp, Homo Sapiens; identical to SEQ ID NO: 345047

SEQ ID NO: 476742 - DNA, 1000 bp, Homo Sapiens; identical to SEQ ID NO: 345048

SEQ ID NO: 476743 - DNA, 1000 bp, Homo Sapiens; identical to SEQ ID NO: 161065

SEQ ID NO: 476744 - DNA, 1000 bp, Homo Sapiens; identical to SEQ ID NO: 161067

SEQ ID NO: 476745 - DNA, 1000 bp, Homo Sapiens; identical to SEQ ID NO: 161067

SEQ ID NO: 476746 - DNA, 1000 bp, Homo Sapiens; identical to SEQ ID NO: 345051

SEQ ID NO: 476747 - DNA, 1000 bp, Homo Sapiens
aagttttcataactgtttattcattataaatagtaaatatttactgcactttttacatgaaagacatttttacaacacattgttgttggttgaggctgcaacacaaagatagtacttctcttgttccatcaccctctaagaccaatgcatgaactaaattcggtactatgtctagtctcactaactcgctacgtcatagttcttaactctaaaaggaatgtatttgtgcctacctcattcgtggttccaagaatagaaagaaataaataacactgccttccaccttcttgttcctctcaacatctcaaaaagcaaatttattgacattctaaaatgtcaccacacaaacgtatgtaaacctcagttcctataatcttttaatattggatatcattgtataatttaaaagtacatgagagccatgtgaacacttctgttcttgccctgcctttcatagaaaagagaagaatgtaaacgtaatcagtttaaaagcataattatctgatctggtctctaatcaaaggagcaacccgggtgttggttgtccagcaaatggcaaacatcactgcactctatcactatgaattatgggctgtgaaaataaaagcacctgcaaaaatatacttctgattttgcttatatcgccttgggcattgccaaagcatccatgaggtacacagtattgcacactgataagcagatatgtgaatgcatgtcactttctctccaccgtgcccttcctccaacccaggtgggctaccaaataaatgtgaactggaaaaacgtcacacacctctccccacacaggaaagggaaacaagtccttcttcctggtagcccatatcctgttagcaagacatgtccgggccatttattgacaactagattacaaatgaggatacagtaacaaataatttatttaggaggtcctttacagctagtctagcttcctaaaaatggttgcatttatctttatttcaatttccagtgtgtaagagtc

SEQ ID NO: 476748 - DNA, 1000 bp, Homo Sapiens; identical to SEQ ID NO: 158071

SEQ ID NO: 476749 - DNA, 1000 bp, Homo Sapiens; identical to SEQ ID NO: 345056

SEQ ID NO: 476750 - DNA, 1000 bp, Homo Sapiens; identical to SEQ ID NO: 161069

SEQ ID NO: 476751 - DNA, 1000 bp, Homo Sapiens; identical to SEQ ID NO: 246608

SEQ ID NO: 476752 - DNA, 1000 bp, Homo Sapiens
ttttttttttttttttgatatcttcctgttggtttgagttttcaaacctgaaattctttaaaatacatttctgggattttatttaaatattgatgcaacacacctaaaaagcagtgacttcttggtaaaatgtaatactgaaatggaaaattgtcttttcaaaaaaataagaagtgtggttggaaattaaataccttttaaaaaattaaaaataaacacactctcacagcttgggggtttgaatgaaccctgtaccaaggagttgagacaactctttctttgggtcacatactggaacccttagcattcaaaagctgctcagcaaagataatttcagcatttcagtggcatctttctctgctgtcgtatttcattcagaagccattttagcatgtcccccatatatggcttttcatgacaaatcactgtgatgccacacaaaactactttaagtgttttttcagtataaaagagttttgcatttagagctcaatatcaaaattaagcatgttctgtaaaagcttaatttaacccatttaatatacttgtttttaaacgagtctatcctgattttccatcctagataaaattttagctcaattgcagtactttccaatcaccttgggcagggagggaaaatttttaggtatagaacccaacacaaagatgctaaatgtattcttggtgacttaattttcaatccatattgtatatggattctaccaagggaaaatattctcatttgaatagggagaaatgatctttttcaggtaattcttttcttggcatttacgagtgctgactgtcatgctgaacatggatatccaacaggaatcaaggggaaaagcttaatttatattgttttgaaaatagatgtttctatgatcataaaaatctttttatatattccttaaatattttggatggtgatttaatacataaacatatttgtacaggtttttttaaaaacactttgtaattttgcttactcaacaaaaat

SEQ ID NO: 476753 - DNA, 1000 bp, Homo Sapiens; identical to SEQ ID NO: 345061

SEQ ID NO: 476754 - DNA, 986 bp, Homo Sapiens; identical to SEQ ID NO: 345062

SEQ ID NO: 476755 - DNA, 1000 bp, Homo Sapiens; identical to SEQ ID NO: 161070

SEQ ID NO: 476756 - DNA, 1000 bp, Homo Sapiens; identical to SEQ ID NO: 345063

SEQ ID NO: 476757 - DNA, 990 bp, Homo Sapiens
tttttttttttttttttttttttttttttttttttttttttttttttttttttttttttttttgccaggcaggcctgagcaatctttattctgcagagggacaatgaccacagatccatacaccacgtggagaccgaggggcggggagccaggggccagtctttcaggggtgggcaggtccaggcggtgggcagagcctcgggtgggtgaggggcagatgggcagacaggcaggggcctaaaaaaaagatgaaccacacagcaggggtgctgggagctgctccccaccctcccccatcccaccagccagcacccagagggacaaccctaacacgaccggcccaggatccacccaggggcagagtaggtgggttggtgccctctgactaggggggcacatgcctgcccagcccaccacggtagaggcagctcagttcaggaaccaggagctctctgggcagggcctgaccggggccccccgactcccaggccgagcccccctactgctggctcagaagccgaaggtttcctgggaggcgtagaccatatagaggaagccgtcctcgtctttctcctgctcgtagatgtccgcgatgggcgtggacacactcaccatgctgtgctggttcaccagcaggaagaaggcctgcgtggggttcagctgcaggcggcgccggatgatcttgaccaactcgctcatgttgacatggtccgggaccaaaaacttggtcttgtccaggacgggcagctgcttctcacccttgtagcgctcgatgatcaccgggattttgctggggtgctggtcgcggatctgctgtacctccttacagcggtcggctgggtccacagctgcttttccacatggagaactgaagaatctcatcttcatctgcaaaactgagacagtgtcagaactacctctgaggtggagggtcagtcagcaactcggaagccatggagtcccctcctcaaaatcctttctccttgcacc

SEQ ID NO: 476758 - DNA, 1000 bp, Homo Sapiens
tacagcagtctgcaattaagtttattaagaatgcaaggatggctcaagaaaatttagtaatttattatgccaacaaattagaagagaaaaatcattatgtgactgtatgcttaaaaggtatttgataaaattcagtagtcattttcagtagtagctataaatggataggaaataggcttaaaaaggaaataactggccaggcacagtggctcccacctgtgatcccagcactttcggaggctgaggtgggtggatcacctgaggtcaggagtttgtgaccagcctggccaacatggtaaaaccccatctccactaaaaacacaaaaaattagctgggcatgatggtgggcacctgcaatcccagctacttgggaggccgaggcaggagaatcacttgaacccgggaagcagaggttgcagtgagccgagattgcgcctgggcaataagagcaaaactccgttattcaacgtctggggtccatacatttcagtccacaatgtgagcagcacttttccaccaatgggcactcctcatcctgcaggcacttgggtttatcaatcttggtacatagcaagggcttgcgtgggcagaaaccttttttgactgtccaggccctggcacaaacaaagccacacctggattcacaacatttgtctgtctggggacaatcgatgtcactgtgacatgaaggtggacactccttacgttcagtgaaagggaagagtgggcattgtccatccttaacaattaacatgcaggccgttctgcaggcatcctcacttaagaagttgttggcattcccttcgcagcccctgtatttgaagggtgtgcagcggtaatttttaaagtcaaaatgccagcgctgtgcctcatgattacagtttccatgcctcacaggtagcatgcagggttcttgaaagggatccatgcacttcttctgacaggcaaaaaagcagcacttctggtattccttgcagtcaaaatctgtgttacatgagt

SEQ ID NO: 476759 - DNA, 1000 bp, Homo Sapiens
tacacacgacaaggtggctcagagtcaaaggaagcctgtgcttcagggcaggtaagacctcaagtggacctgggcagtgacgccggctgctccacagccccaaacgctgaggaacgtgggcctcccaactccaccgcggacccgcccactgggccactcgggaaaccctttcccaaaatgaacttttaccaaagaggacaaaattcaactgaatcacatggaaatctgacaggacaagggaaagaaaacttgactgagagacaggcacgaggacgggagggaggaggatccaggcaggtcctcacgtgtccaggcgctggatctcagggcgactgtccacatccctggactccgtgcgggctcggatgtagtcattggtgctctgctggcggacgctgactctccatttctgcactgccaggaatgtgttcactgcatatgccgcagtcgccaagaagccaaatatcacggcagcaatttctgctccggctctatggtttaaagcagccagtacgattgaagcaataaagaaaaggaaagcgctgagtccagtgttgaccaaatctgtcagattccagttgatctgggggatcctcatgtgcaggttgagactgaacataatcagcaagacgccagtcaccacaaacgcactgcagctcacaaactcaaaaaagtagaggccttcacacggggagcatgccatgatggtctctatgcagatgaatgcaatcagggccaagatcacttgggcgaccttgaggcggccgagcgcgccgcgcaggtagtcggggtcgcagcgcaggccggccagcccgcggcgctggctcaccggctcggtggtgggctggtacgggctgctggcgcccgagatcatggaggtgctcgaggcctcgccctcgaagccgtccagctcctcgccgctccgcatgctgccgcccggcccgggccgcctcgcgcggctggctcccggcgccaggagcgggcggactcagcggggccg

SEQ ID NO: 476760 - DNA, 1000 bp, Homo Sapiens; identical to SEQ ID NO: 345064

SEQ ID NO: 476761 - DNA, 1000 bp, Homo Sapiens
gaattctcacaactcaagtaacattctacccagtctcactcccacccacacaacactcggcatggaggcagctttgaaacccaaaacaccatttatttaattttgcacaaaatctttcaacttgacataacaaaagcaacattaggcactcccatgttaccaaaaagcccctcaccaagtgaaaacaagagagatgtccatctttccctagtatacctgatgtgtccctcaaagctagttgcctcaggggtctcatgtcaaatgaacaatcaccctggcctggggaaaggtctacatttcttggccaagaccttcaggccacagagcagccacagtggcaggtggccttctggtgccgggtcttctccctacaggaccttgccatgggctccttcgccatggcctcctggaccctctggatctcatggaccagcagggaaaaggcctcctccacgccttgccgtgttttggccgaggtctccacgaagtgggccccccagctgtgtgcgagggctgcagcagcggcatgagcatctccagcagtggtcacaaggtcacacttgttgcccacgaggacaaggggctgggcggggtgagggccccaggtggcccatatctgctgcagctggatcagagacgaggggtcatcgagagcgaagacgcccagcacaccatcacagacagccaggcactggtcacgcagggccctatggatggcctgccctgctgtgtccagcacattcagaatgcagtccccactgtccagggtcaactccttccagtaggaatcctggatggtggggtcgtggtcctccacgaagcactggtggttcagctggatggtcagcgcactcttgcccacgccactggcgcccaccaccacagccttgtactcaggcagctgcctgccaacatccctgcggcgtgcctgagcccggtgggtttccccctggaaggaagggctccatgtggccaggcccaggtcgaaggtgccaggctt

SEQ ID NO: 476762 - DNA, 1000 bp, Homo Sapiens; identical to SEQ ID NO: 345067

SEQ ID NO: 476763 - DNA, 1000 bp, Homo Sapiens; identical to SEQ ID NO: 345070

SEQ ID NO: 476764 - DNA, 1000 bp, Homo Sapiens
ttttttttttttttttttttttttttttttttttttttttttttttgccttgaatgaaaaccatgaatttaatgtgacattgggggagcctcatccttccctttttaccacccacccatccagcctgttgtgagttgggtgagggctgcccccagtctccgtcctgcggctctgggtgccatcctgttcctttgagctcagtcagcctcctgggctcgtctctctgtgaatctccttcttgcgtattcatatagtgcttgcttgcgctcctgcaggctctcctgccgggcccaggaagacttggcaaatgttagggctgttggctgaggggtcaccgggccagagctgggaaactgaggtgatcacaatgtcagagggcttgcggagtcatcatcattaaacacgcatcgaatgccttggaggcagaggctgtgggtagggactgagttcccttggtgatgtcttcaggcatgaaagctacggccccctcaagcagattagtgatagtcaagtctacacagccagtcttggccaggtctctctggatgacacccaatggcacatggggcaaaacttccttgactctctgagccagagttgccagttgcacatcaggagaaggaccaggggagggagggaaagaagactgggctgactgggggcgcaatctggggtgtctttgtcgcttcatgtgctctgctttgtcagctggagtgagccgtgtccctgtctggcccaattccttggccaccagctgttgtacacggagtgcaaactcctcattcgcttcccctagttggcgatgaacaggacgaagccaccttacttgatacaccgtgaaagggacgaaaagtgaccacagcagttctgagacccaggaggcatctgacaccgtcacagagaccaggggtctctgaacttgcagggtaagaggttgtaccacatcttggatagaaaatggccaggaactgaagcgcaggagcccctcccggccattggt

SEQ ID NO: 476765 - DNA, 1000 bp, Homo Sapiens; identical to SEQ ID NO: 161071

SEQ ID NO: 476766 - DNA, 1000 bp, Homo Sapiens; identical to SEQ ID NO: 345072

SEQ ID NO: 476767 - DNA, 1000 bp, Homo Sapiens; identical to SEQ ID NO: 345074

SEQ ID NO: 476768 - DNA, 1000 bp, Homo Sapiens
tagaatttgaatattttaatttgggaatgacttagaggtccagattcctcccctccaccccccctcccccaataagttcccctcctctggccagagcttcatgagaagccacatcctggagcaccaggctccacagataagtccccagtgacgtctcaggccagactgctgtgtagggctggggtggggtttggcgggctgggggctagtgaatcccaaggagacgtgtctgggctccactgtcctctctggctggctgggcctaggagccaggtagccccagagtcactgctggtccccctggctggccccgggtgccatctcagtccggtagatcttgaaggcatcataggcaaagatggaaaccaggatgatgccaaaaacaaaagcagcaatggcagctccgtcccgggaggtcacagctgcaaaggagaccaccaggaagatgatgatggcactgacacagcgcaggaagtccagacagggccagttaattcggtcgaagcgctggtagtactgggtggcatagaggaagaggaaggcaagtgtgatgaagaactccagtagcgccgcggccatgtaggcagagatggaggccgtgaagcagatgaagatgatgagggtcagggcctgcaggaccgagcatgtggaacatgccaagaaggggacacaggcaggggccagggctttgccttcccctccttggaagctcccctaggctggcacctactacctgtccttggaggggaggaaggactctggcacatctccctatcccctggtgtcaggagccaccgttgcagggcatttgccggtcaagggcagtctccggcctcccactctgctcacccagcaaccccagcagtctggccaagccatatggctcccaggagcactatcccacagtaattcataggtacagtgtgaatgccagcccctggagttgtgcccacagagacccgactccacagggaccaagaggagccccctgcctcataat

SEQ ID NO: 476769 - DNA, 1000 bp, Homo Sapiens; identical to SEQ ID NO: 158229

SEQ ID NO: 476770 - DNA, 1000 bp, Homo Sapiens; identical to SEQ ID NO: 161072

SEQ ID NO: 476771 - DNA, 1000 bp, Homo Sapiens; identical to SEQ ID NO: 345075

SEQ ID NO: 476772 - DNA, 1000 bp, Homo Sapiens
ttttttttttttttttaatctctttgttcaatttattgaatgatgtcagcatattaccatgtattctccggggtctaaatctcccatcattccttttagatgtgtgttttcagttctgacagctttatatttcatatctgagaccttttgttttgctaacattttttcttttatttctaattccatttttaactgtttttccagaagggcagctttctttgtgacagttgctatagtgatctccttctgatgaagctcttctgttaggtcagagatttcattcctcattatttctgctcagagttatggtactcttccacctgttggagttggcttcttatcttgttcaattctttttcatgatttggttgatcttgcatcactgaaaacagctcttttattttcctttctggttctttaatagaaggcaaataagatgattcaagtcttgttttatttccttgagcattttggcactctcctatttttaataattctctgtgtaattgcaatcgttccatttctataattctcaagagatcatcacgtgactgtaactcactttttacctctgagagacctgcttccatggcctggcactgtctttggtacattttcagttcttgcaagagcttctgattttcatcttgtaatttattcctgcttagtgctatctcatttacagctgatttcagtttttcaataatgaactcatctctttcattgatttcacaattgggatctgggtcacatatcaaacgaggaatttcagagctgctgtcttctaagcactgttttttaccatttagttgagtttggtaactttgtgcctgtttctgaaactgattacacttctcagataataatttttgttgagcatctaaagaaatcagatgagtctgatataatatctcttgcttgtcccattctcttgactttgctctaaattcctctaatttctggttcaaattgctcagttcaaagggtatttcttctttaa

SEQ ID NO: 476773 - DNA, 1000 bp, Homo Sapiens; identical to SEQ ID NO: 345076

SEQ ID NO: 476774 - DNA, 692 bp, Homo Sapiens
ttttttttttttttttttttttttttttttttttttttttttttttttttttttttttttttttttttttttttttggccgcaaaccacaagtgtttattgcagaaatctggccaacattccaattgcagggccccagcacagggctgggcaggtgagatagggaggggtggaggaagtaatctggcccagggcctcagagctgtgagatgatattgggtgccaggctgcaggtgaggcctgtgccatctggttccacattcagggccttcactatgccatcctgtaccaccatggagaacctcttgagacgtcgattcccaaagatggacaccagcgaatcatctagtaataagtctgtctccttcccaaaggccccagtgggatcagccaggagccgaaccttgattggggccatggctgcagcggctctgctgaaactgcggaccccgccagacgcccactctccttcactgcaccgtcttgctgccgctgccgcagactgaccgccggccccaccgacgagtatatagcccgctgagcgtctcagggcgcacacgccagctagtcccatacccgccccacggccacttccactccgcctcctggctggtgccaccgcagcaggcggggcaccgctagcggcacagcggcgacaccctgcggaaggcgggcctgggccgcctccactgc

SEQ ID NO: 476775 - DNA, 1000 bp, Homo Sapiens
gttttatttgcttaattttattacatgaaactttttgtacaacacatttgagaaccctgggtttagaacaacttagaccctaagttttcggtctcagtttccttttcctttgatagatctttattcactgtatgaacagagtcaccaaaaaaaaaaaaaaaatcagtattttgttttgatttggtgggctttagctaaatagctcgaagtgtttcagtggtaattgtcctaagtcttttgaattattccttttgaaagagagcagatattaggggggaaaaatcagtgtctaccctgaaagcttgtggcaccaaatgacagtgtgatttactggaaggtagtctaaaggggtgggatgggaagggacaggagaagaaaaaaaaaagagagatagggagagaaggggatgaaagagagagagaggttgggaggagacagagagagattgatttaacttcttaatgctctctgttagtctacccactttgttcccattgctatcaccaagttcagacaaggagagttaagctcaactcaaaaagagcagccgtctgcctggtttccctctgcctctaattgtgcctcccttggttccattcttcacatggccactagaacgatgatctccattgcaaagggctagtgaggtctattccctgcctcaattcgtcattgttcaccacatctgtgctaccgccacttggctgagaagcatccaaggaccaaaggatccaagcatacttgatgagtatcattgacaaattcaaggatcctagaggtgaggggtgggggtggtgacctttgattgccctggagtctgtagactcagctccctgtgggaaacccggctcccagtagacaccttgactctccacatttctctctgaagggacctggtgtcctgcgaatagttggacagggtgagaacttggcctccaaggaagaaagttggagaggaaatgccccttgcttttgtttcttcctggctcatctcaaggtc

SEQ ID NO: 476776 - DNA, 1000 bp, Homo Sapiens; identical to SEQ ID NO: 345079

SEQ ID NO: 476777 - DNA, 1000 bp, Homo Sapiens; identical to SEQ ID NO: 161073

SEQ ID NO: 476778 - DNA, 808 bp, Homo Sapiens
tttttttttttttttttttttttttttttttgatttatactctattttatcctaaaaagtatttacatcagtaagtaaaaatggttgtggggcactttgggaggccgaggagggcggatcacgaggtcaggagatcgagaccattctggctaacacagtgaaaccctgtctctactaaaaatacaaaaaattagccgggtgtggtggagggcgcctgtagtcccagctactcaggaggctgaggcaggagaatggcgtgaacccaggaggcggagcttgcagtgagtcaagatcgtgccactgcactccagcctggatgacagagtgagactcagtcttaattgctatgttgttggattcagtagcaccactagtaaaaatgatctcacgaggatcagctccaatcagagatgctacttgctgacgagcacgttccatggctgcctcactctcccagccataagcatgtgtccgggagtgtgggttcccatagtagttgattaggtaagggagcatggcatcaagcacccgggggtccagaggagttgtagcttgcacatccatatagagaggtcgcagcactggccccacctccggggcagcggctgtatctgcgggaaccgcagactgaggagcacggtctccaacgcgcaggcgcagcccccgagtgggcgccgcgggcttcggccctggagccgctgtcaccgccactgccgcccgcctccaagcggctcggagcagcatggtcccgctggcagagcccaccttccgaagccgctgcagtcctgggccccaggctcccggaagt

SEQ ID NO: 476779 - DNA, 1000 bp, Homo Sapiens; identical to SEQ ID NO: 345081

SEQ ID NO: 476780 - DNA, 1000 bp, Homo Sapiens; identical to SEQ ID NO: 345082

SEQ ID NO: 476781 - DNA, 1000 bp, Homo Sapiens; identical to SEQ ID NO: 345083

SEQ ID NO: 476782 - DNA, 1000 bp, Homo Sapiens; identical to SEQ ID NO: 345084

SEQ ID NO: 476783 - DNA, 1000 bp, Homo Sapiens
ttttttttttttttttcctttttttttcttttttttttttgagacagagtctcactctgtcccccaggctggagtgcagtggcacaatctcagttcactgcaacctccacctcccgggttcaagtgattttcctgcctcagcctcccgagtagctgggactacaggcgcccgccaccacacctggctaatttttgtgtccttagcagagatggggtctcaccacattggccaggctggtctcgaactcccgaccttgtgatctgcccgcctcagcctcccaaagtgcgggactacaggtgtgagccacagcgcccgggcctatatcaatatatcttaaaatttctaagccactatctttaataaacatgtgaattattaatctcatctgctactaataatgactataagaaagaaatctggagttatttaaattaatatgaatgaaaaatggagcagggaattcaggttaaagaaaaaagctcagtgataaaatattcaataacactaaaatatagaatatatattaaatttaaataacgtcagccaactttcctcaaaatatgtcatatagacactaaaataactgtaagtcagcacatttatatagtgattatatactgcgatgacattcagcattctcttaaaagggcaaatttcaaatttgaaacgactttcatttttctctaggtataatttctagatacataacaatgcttgcattgagaatcttgcaaaaattaaaaaccctgtatcatcatcaaatgagagaatttatcagtgaatgggagaaaacatactattcactgagaaaatagaatggcaaagatacacagataaaagagaaacaagaagaatattaaacagtattttacagttcctagtgttagatggtagaatgccaggaccttttgtcatactgcccatcttgtcaaggacaggacatgtggaagaagagaagccatttaagtttcattaattaaaacgatgagaatgtagcca

SEQ ID NO: 476784 - DNA, 1000 bp, Homo Sapiens; identical to SEQ ID NO: 345085

SEQ ID NO: 476785 - DNA, 971 bp, Homo Sapiens
ttttttttttttttttttttttttttttttttttttttttttttttatttcccacctcatttattcctaattaagacctgagaatctttttgataaggacaattcttttccctttttggtctccattccccgtgctctgagagccaggacaagcgggccctttgtcccagttggtcttcttacggttcagtctctggagtttctggggcttcctttatcctcttcctcttgagttttggtttttgagaaagctcccttaaagaatctttcttgacatggtcctgggatcttggctgcccaggcagggggctcccttgacctggggtctgcatgttggacagccgctccttcatgccgctgatgttgctgtgcagcccccatgcatggcagagcttgggcagactgtcttcccggtcggccagcaaggacctctccggcgcatccgaggcgcagaatgtcaccaggaacttggccggctggctgctcttggtgtacttgtaaagtcggcgaagctgctttgcttccagctccgagaagagggagatgaaccgccagagcatctttctccagtgtttgatttcccaggcttggcagtaatgctgcagaaaggtgttgatgtggtcccctaggaccacaaggctctgcttcatgtacttcagcttcttcttctggggaaggtccctgggcaggtgcaactttcgcaggaacttcttcagcggtcttaggtattctttacaagttttgaaggtgtcctgatccaggcccttggcatggcgcatgagcgagtctctagcagggctggcgctggagcttgtctccaggcatgacacatttgtcacctgctctagtggcttgtccccttcacccccttgcccatctgaggcctccatctcagcaggtgtgccggtaggctccagggtggcactccccacgtcccctctggcttctgacccactgcttctgtgacctag

SEQ ID NO: 476786 - DNA, 1000 bp, Homo Sapiens; identical to SEQ ID NO: 345086

SEQ ID NO: 476787 - DNA, 1000 bp, Homo Sapiens
ttttttttttttttttccgctttcaaacccactttattcttttcagaccagaaacattcctcattgcacccccctccctgccctagatctttactgaccaggggcctcaggaggggctgaggagacagtggtatactctgcctccagggacgtggtgctgcagtggcagtggggactggcgcggcccagcagctccagcctccgggagcgtagctggacttgaatggcccagatggggggccggtggcccggtagggaggggtcctcgtccctgaagctgtaggtggtggagtcaaagctgtcttctgtggcggccaccgactgtttgcacacggggcaggagcgccggggggcttgggagaaccaggggtcaatgcatttgcagtggtaggtgtgggagcagggcaggatcttgagttggtcgccctcctcgtactcatccaggcagatggcacacaggtcgttgtgccacgtgaaggtgcggacctgggccttctggcaggtagacgtcttcaccggccgtctgtggctgcagcaggcctgggcccagagccacaggtggttcaggacaaagaaggctgatacgaccagggccagggtacagcccagcacccaggacacggtcagcacggggtgacagcccaggtcgtggcacggtgggtcgtcgggcaggagcagcgcgtgggccgacttgttgcagcccaggatgacccgcaggtcctgcgaggcggcctcgctcacgaacactgaggggatggcgatctggcccctcaagtcctcgtagacgtgggtcatgctcacgaggtcgtcggagtggacgttgtgcacgatggccgcctcgaagccggcgcgctgggcgttcagcaccttgaggtcgaaggtgcagtcgtagtggcggatcagcgcgatggagcccagagagcggttgcccagtcgcggggcctcgatgggatggcacgcgttggctggcttgacctccatcaggtagccccgtatgccc

SEQ ID NO: 476788 - DNA, 1000 bp, Homo Sapiens; identical to SEQ ID NO: 345087

SEQ ID NO: 476789 - DNA, 1000 bp, Homo Sapiens; identical to SEQ ID NO: 345088

SEQ ID NO: 476790 - DNA, 1000 bp, Homo Sapiens; identical to SEQ ID NO: 345089

SEQ ID NO: 476791 - DNA, 1000 bp, Homo Sapiens; identical to SEQ ID NO: 345090

SEQ ID NO: 476792 - DNA, 1000 bp, Homo Sapiens; identical to SEQ ID NO: 345091

SEQ ID NO: 476793 - DNA, 1000 bp, Homo Sapiens; identical to SEQ ID NO: 161076

SEQ ID NO: 476794 - DNA, 1000 bp, Homo Sapiens
gaagtacaaagcaatttattacaaaggaaaaatattattttgaaagttaagtgcaaaataaactgtacaccctgagaggattcagggtgggctgctcctaaggatgagacagcattgatcactgctggagaaactccctttatgggagtcttacatgattatttacaggaggtgggtgggaagaggtgttactagcaagcatgttctgggcggtcttctgggtgcacgtgtgcagtagctgtacatgcttgttcatacgtctcatgactcattagcatcttaaatctccacccagggctgtgttttttttcactattgtgatgagcaaagggtcagtctgagaacaggtggaaatgcacgtgttctgtacagggtaaactccctattggagatagctttgcttgaatgagctggactacaatgtgaatgctagagtttattgtgttgattgtgtggtcatcaccagtcgctatgtcccgaggacatggttacttttttcattacctatacttcctcaattccaacacctgcctgagcttacacaggcaaataaatgacccatttcagcaccaccttacagcttattcagtgcagcctttgacatccctcagaggagaagttttccaagcatgattttattttgtaaagcctccgttttttcagcctgcagagctgagacattgataattttattctcaaatatttagagactttcttataagattttcacatcttggtaacaaatttcacttacaaaatttgccagaataggcaaaaggaaagagacagcaggagggatcactaagatttttctttcctgtggagtattttactgttcctgcttctcttttcactttcctgggcttgggggaagggcagctccctcggaccatgaaagaaaaatggtaatacggaaacatctgtctttatcgcctcccccaacccttccactctgctctggctgtgcccattctccctcccaccccctggcccataagcc

SEQ ID NO: 476795 - DNA, 1000 bp, Homo Sapiens; identical to SEQ ID NO: 161077

SEQ ID NO: 476796 - DNA, 1000 bp, Homo Sapiens
ttttttttttttttttttactgaaaccacagagaaaaaatttattatcaattcgtcagaaatccactctcaaggttaaaagaagagatggggttttcccaaggcactctggtgtgaagtgaaaaaaatgacagaccagggaagatttagtctccttgatgaggttcaccatggaagacgtaaaagctgtatcccgaagaagggaatacaaggcaagagcaaaaccagaaaacgcaatcatcaggcaaaagcgaggccttgagtgaccactatgaggcagaagatgggcgtgaagagacaatcctgagacaggggctggtgtaagagagggcccaaaagaggccagtatggggcaggggccgcgcccctcagggcctacgccgggcaggaggtgggcctggcgaggcctactttgggacgctttgggccactttgggccacatcgaggaaggcagcttggggccgggaggcgccgtcaggctgggtgggagctgggcccggagaggccaccgcgaggcatgagctgggcccagaggggccagcgtgaggcaggagccgggctggtggaggctgccgggaggccggcacgagcgtggcaggggaaggccgccgggaggcgggagctgggcctggaaaggctgctgcgaggtgaggcaaggtgaggggaggcgaggcgaggcaagacgcggccctggagagctggactggaggaggcttcgggcctacgaaggccgccgggagctgggcaggagccgagtcgaaggaggctgtttggagacgggagctgggcccacgggcgcagacgcgagcaaagagctgggcccggagaggaggccgggaggcagccactggaccgggggaggccgacttgaggaagttctgggcctggagaggccaccacaagggaaaagctgggcctcaagaggccgcagcgaggcacgagccgggcctagagaagccttcgggacgcaggagctgggcttgtggcgcctgccggcagg

SEQ ID NO: 476797 - DNA, 1000 bp, Homo Sapiens; identical to SEQ ID NO: 345094

SEQ ID NO: 476798 - DNA, 1000 bp, Homo Sapiens
gagacggagtcttcctctgttgcccaggctggaatgcagtgacatgatcttggctcactgcaacctccacctcccaggttcaaacgattctcctgcctcagcctcccgagtagctgggactacaggggactacaggtgtgtgccaccatgcccagctaatttttttggtatttttagtggagacgaggtttcaccgtgttggccaggatggtctcgatctcctgacctcgtgatccgcctgcctcagcctcccaaagtgttgggattacaggcatgagctgccgcacccggccaaattcttttaattctttagacacaggttagagggggaacaatgcttaaaattccatggaactaagattttttttttatttttatttttttgagacagagtcttgctttgttgcccaggctggagtgcagtggcacaatctcagctcactgcaacctctgcctcctgggttcaagcaattctcctgcctcagtctcccaagtagctggattacaggcacccaccaacacactcagctaatttttttatctttagtagagacggggtttcaccatgttggccacgctggtctccaactcctgacctcagctgatccgcccgccttggcctcccaaagtgctgggattacaggtgtgagccaccgtgcctggcggaactaagattaaagcgaagaccacgatcaattacttaacaagaacaccacattttgatgctctctgtagggtcatttttttttgtcaggaaaatatctgatctgattcttcccagcttgcttcccctacaacttaataagcccttcactaacctctgtatgtattaactgcaattgcctagcccggcatttacattctcaaaagatttaacgcaattacagtcaaaaaacacttgtcatatgtaacactttttcacatggaaataaattggtggtttaaggtttacaattcctttgaataaaatttcagttattagttacaaaatgctaagaca

SEQ ID NO: 476799 - DNA, 941 bp, Homo Sapiens
tttttctagacgttcctttaataacttaaaagacaaagcatacacaaccagcatattataggcatgtaaatacatgtgttcttaaatggatcttcacttggaagaaagtttctcgtccttctcagaaggagattagacacaacatatggtaaagccaaaagcaggagcttgtagatttgcatgaaatgaaggcgttcttcagacttcttcataacccacgtgacatcagcacttccttttcccactggtattttctacacttccgagactccgtttctgtctgagcacggcaacacaatcattcctgtcagggtgttcacttgcttttattgtctgcatacatttaattgttgtaagaaacttggcacagtctggaaatccacatgaccaagcgagatcttcagctgtttgcccgttcttattacataaatcaatttgggcatcactggctacaagcaggcttaggcactccaggcttccaacttttgctgccttgtgtagtggagcttctcctaaaacatcctgctggttgaggtcagcgcccgtttgcagctgccagagaagaaagcaagcaaggccgcttcctgcggctaagtggacaggcgactgcttgcagggatccgggggtgcgttgaccgaggcccctgtctccagcaaatgcttcagaccatccacctcggggttgcaatccagcaacagcatttcccgcctaaggcagatgacaagagtccttggaagtgcagagaggtgagacactcgccgcaccccgacaggtaagaatgcgcaggctggccctagcacgggagaatttaaagaccgctgggacttccgggccggcccttggcagccgcgccccagctccggttacgcccgagcagcctaatcctcaacgacccggaccctgtccagccccgccacggccgcacgtacacaaacactgc

SEQ ID NO: 476800 - DNA, 1000 bp, Homo Sapiens; identical to SEQ ID NO: 345095

SEQ ID NO: 476801 - DNA, 1000 bp, Homo Sapiens; identical to SEQ ID NO: 345096

SEQ ID NO: 476802 - DNA, 1000 bp, Homo Sapiens; identical to SEQ ID NO: 159722

SEQ ID NO: 476803 - DNA, 1000 bp, Homo Sapiens; identical to SEQ ID NO: 345098

SEQ ID NO: 476804 - DNA, 1000 bp, Homo Sapiens
ggttttatgtgttttaattaaatgtcatttccttgaattcattttaaggcttcttgcaagaatccttttcccagtacaattataatgacgaattggggctgagctcactaaaatattcaaatatatgtcctatatatgatagatttttcctatcaagttaaacaattccagggaagccactatttcttaggtacttgttcaaggtcacgatcatgcagcagtaaacaatgttcctgcatggagcttagattctagtggacacagattttgtcatgtccctcattatacttttgctaaattctgaccttacttatcattttgaaggcttcactcctgcatattgcttattggatgtgaaggttctgattgaaacatattgtatcattctttatagggtttctctgttgtgtgttctcttgacaactgtgacattttgggctctgcttgaaactggtcatattcatacaaaaataggttttcttcaatggaattcagataactataaaaactcagctcatgaattcttaaaacatgacattttataaatattctgtgctgtgtggattttctgaggaaaatgggaagtctaagtcttgaagagcacccctatcacactcatcatgattaatagattcatcaccatcatggactctctgatgaatctgaagacaacgaactcttactaaagcccttaccacacacaaaacatttgtatggtttctctccagtatggactctctgatgggcttgaagatgtgaagtctgactgaagctcttaccacacatgccacatttatagggtttctctcccgtgtggatcctctgatgaacatgaagatatgagttccagatgaagcctttcctacattcttcacatttgtatggtttctctcctgtgtggactctctgatgggcttgaagatgtgaactccaactgaagcctttcccacacacatcacatttgtagggattctctccagtatggacttgctgatggtct

SEQ ID NO: 476805 - DNA, 916 bp, Homo Sapiens
ccgtacccggctggatttacagactttatctttattttttcaattataaaattattcacccacttagaacagaaagcaatatggaaaaaggaggaaaggaaggtcttctgtacttggatggggccaggttggggcaaggaactggcactgtggagcttagtgcttgcttacaggaccagcaggctatgaggcaactgacatgccccagggaaagtcatcttgagttgcttcttgataatgagtgggatacgggtccaagctgcaaacttcttaagtcattctctaaaacatccacacttcaggactgctttatcctctcaagccgtcgctttatggctcgactgtttttatctagctcctctaacatcttataggggttgaaggaaagcggtttctcgtggtccacaaagttttcccagcagtcagcaaactctgggaagcccatgacctccaccgggacctgggatccacacagaagccgcagccccttctgctggggcttgcaccagtggtagtacaggcgggaggcgaagatgcccaggttcagatggtcgtgagccttgatgaagtcaaccagctcccaggcacaggaggagcaggggctccacgtgaggtaacaggtgacttggtagcactgcgtttcgtccagtcccatggacttgatctcgttaataaagcaaatttctgcatggcactttttcttgttttcaaagtagcctctcgtgggcgtggagccattctgcggcgtcagctggtaacacaagagggccttcctcgggtagtaaggccttctgaggcggcgcttgttgttaaactgtaagcggaatgtttcggctgttaacagagccatcgtgtttctgatctgtgcttctggccacagcttccttagcagacttgcccctgcttgtctgaggca

SEQ ID NO: 476806 - DNA, 1000 bp, Homo Sapiens; identical to SEQ ID NO: 345099

SEQ ID NO: 476807 - DNA, 1000 bp, Homo Sapiens; identical to SEQ ID NO: 161078

SEQ ID NO: 476808 - DNA, 1000 bp, Homo Sapiens
tttttttttttttttttaagtttctgagagaaattttaatcatttatcctatggacccttaagacccaagcactaacatgaacatttctaaagtaaaaattctcaaattgagaaatattatttgacatcctgttgagcccagacaatgatgtcaacatgctgatcattcagtggtccctgttggagtcagaaacagacttaactcctcacacatatggatgcatattctgttggtgcttcttttacatttcttgccagtcttgagttcagtccaatgacagaatggttcagggaagcataaacaatgcctggtttgttttcttccaggcatggattagaataaacttcagacccttcctgcatcctgaaacaaaggtcagggtcattatcataaattccagtttctgatagcagtacttgggaattttgcctggtgcttgcttctgtttgctcactcttaaggtgagcatcaaccaggttaatttcccttcctgctgtgtcagagagttcattttgctttccttggtgccttctcaggcagcagaacaggcagaaacaggtagtgatgagtagaggcaatccccccaaaggaagtaaactatacaggagccagggtctgcttgccatttcgtccttggagggtcgttctgaggcactttttacatctgtcacataaagagttgttgagtggctttcaatgagattagactgaaaatttgcagaacagcggtatgacccattgtcattaggaagcactggttcgaaatgtagaatgaaaaatgaaatgttcttctcttccttccaacttgtttgtctatcttcaagttttacacatgttgttccattgagcttgcaccaagtcacatgaggcctgttagcacagtatttcacagggcattctagttcaaagggatctcctgctaagatggagtgttcagattgtctctttatataaagctgtacatcacatgattctttcccatggatgttccagatgtcc

SEQ ID NO: 476809 - DNA, 1000 bp, Homo Sapiens; identical to SEQ ID NO: 345101

SEQ ID NO: 476810 - DNA, 1000 bp, Homo Sapiens; identical to SEQ ID NO: 345102

SEQ ID NO: 476811 - DNA, 1000 bp, Homo Sapiens; identical to SEQ ID NO: 161079

SEQ ID NO: 476812 - DNA, 1000 bp, Homo Sapiens
tttttttttttttttttttttttagttcaacaaatatttattgaggatataatgagtaatcaaaggttgtcccagtactcaaggcgatgattgtcaggtagcagaaacaattacaggtcgatggaaaatgctgggatcgaagtgcacataaagagctatggaagccctgtagggactggggagtgaggagggatgtcaagaaggctgctatccagaagaagcaatgtttcgactgaggcttgaaagtttcaatgtaatgtgggaggaagagcaaatggaacagtgtgtgaaaagacatggaggcatgagaacacatggtgtttttagagaccaaggtggacctcaggatgagcgtaaggcagtaagaaatgagatgggaaggagtcaaatcatgactggcttgcttgtttgatcattttcctatgagtgaccgtgccgacggattcaaatttaaggagtacaagatcgtattttaaaaatgcccttagcagtatttataattgaacaaggatagacaacagctgggtaagaaagactagaggcagaattctcagccagggatcatggaatgtgaatatccttttgctgacacaaggaacaaatgttggctccaaacattagttactttataccagtattagctgttcattcagttttttaacttctttagagcaattttatttatcatctattttttcccaattacccattacatatagaaatattatcatgcctgtcaccgatgaaacatattaagaaaagtgaaaaatacatattctttaaagtgcctcccttttaaggattttgtatcaacaaagcactgattgtggaattcatgtatagtcttcagaagtcacagtatataagctccgactatcaatagcagcttaacaggctctataaaacaaagcattaccaagtataggtaaaattatacatatttgaaacttatatcattattttcctaccaatgagtgattcatcataattttcattatgc

SEQ ID NO: 476813 - DNA, 1000 bp, Homo Sapiens; identical to SEQ ID NO: 161080

SEQ ID NO: 476814 - DNA, 1000 bp, Homo Sapiens; identical to SEQ ID NO: 345105

SEQ ID NO: 476815 - DNA, 1000 bp, Homo Sapiens
tggtctagaggtccatttcatttcaatgagtgtgacagccgctcttcttggggcctatgggggaaaggcattggtccgtggtgggagtgaagctgctcccacaagatgcattcccaactggatcaggaagaccttcagatttaggggaggtctttgtggaagtctttagtggagtcttcccctgcccgctagatgtccggtcggttttagcccgcgttggctactggatggtccgctgtgcgggcttcttgggctcctgcttctcttccctgggcttggagcttcgcctcttgtccttccctgacctcggcgtggtgtcttccttcacggcctgtcctcgcccctcgtctgccgctgtcgctcccgcttcctccttggctctggcacacggcggctccttggctctcggccttgccctcctggtcctcctcgccctggcattggccttggctttcgccctcgcgttccgtctccacacttctctggccttcctggccgccttgcgaaggggctggcggcgcctccgggagctccggggcgcggctggggtcctccagggagcgcgcgtgccctcctcttgcctcgcgcgtcccggctttctcctgggcttgggaaccttccagaccctgaagtagccggcggcgtcgctgccgctgacccggaggagcgtggccttggcctgccccctgggcgcttcgtggcggccgctcttcctgcgcacttcgtagccggcgtttcggagctccttcttgagagctgccagagtcagccctttgtgagtggagatggcctggagcaccaactgggacactctgagcacggagcttgagcagcccctcgatggtcccccgacagttttttccgctggcagctgagtggctgagtgtcctcgggattcgccactgggcccaggcgcctcagccatggccccactcccgcctctgcggggccaccggctttgggcctcaccagtcaaggcctgttccatagctgaggtaga

SEQ ID NO: 476816 - DNA, 1000 bp, Homo Sapiens; identical to SEQ ID NO: 345106

SEQ ID NO: 476817 - DNA, 1000 bp, Homo Sapiens; identical to SEQ ID NO: 158916

SEQ ID NO: 476818 - DNA, 1000 bp, Homo Sapiens; identical to SEQ ID NO: 345108

SEQ ID NO: 476819 - DNA, 1000 bp, Homo Sapiens; identical to SEQ ID NO: 345109

SEQ ID NO: 476820 - DNA, 1000 bp, Homo Sapiens
cacttcccactcacaggaagaattcactcagacaaggatgaggagggctttgcacaggcatttactccaggggatggcgggccaccccagccccaaagggttaatgcgtcctggggcgtacagagctggtgaccttggggaaggccacacaatggactgctggaaaccagttctctcctcccactgttgcctggggctacagacaaaatgaaggcgaaaaatgcaggggtgggggctgggtgctggcaggggacccaggggcagccaggctgttgctgggagactcagtgcgacatgggcctggcggagggccccaggcctcctgcagtggcaccaggtgtccccatgagcggccggcactcaggctcaccttgaggggtacctgaagctgcagctccaatgcctgcacctgttccaaggactccatggtcctcctgacgagagctgcacactccgggatctgcggatcttccacttcaaacagcagctcatcatggatctgggccaccagcctggccgtcaaggtgtgggaagcagccactgcagtgaagacatggatcatggccagcttgcagaggtcagcagcggagccttgcaccacgaagttcactgcctgtcgctctgcttgtgcccggagttgctggtcatgagcgtgaatccttggcaggggtctccttctgcccatgatggacaccacacagcctgtctggtgacactgggcaatagctgctcgggcgaagtccttgattttcttgtacttctgcaaaaaactctccaaaaactgggcagcttcctgaataggaactccaaggcaagcagccagccgctccttccctgctccatagaccaccgcgtacaccaccttcttggtttgctctctgtctgcgtgtgtcacctgttccacgggcacatccttccactgtgaagtcagagtagaaaatacatcatctctttcagattcctggaataacttcagaagttccggatctccagataaatg

SEQ ID NO: 476821 - DNA, 1000 bp, Homo Sapiens; identical to SEQ ID NO: 345111

SEQ ID NO: 476822 - DNA, 1000 bp, Homo Sapiens; identical to SEQ ID NO: 345112

SEQ ID NO: 476823 - DNA, 1000 bp, Homo Sapiens; identical to SEQ ID NO: 161082

SEQ ID NO: 476824 - DNA, 1000 bp, Homo Sapiens; identical to SEQ ID NO: 345115

SEQ ID NO: 476825 - DNA, 1000 bp, Homo Sapiens; identical to SEQ ID NO: 161083

SEQ ID NO: 476826 - DNA, 1000 bp, Homo Sapiens
tgctatttgtccagtaattcatgaaccattggcatattactggttccttatttattaccactgacaaatgatttcataatactgaccagagggattacacagctcacaaaaactttccatataagaagcacgatgttaaaacacagcagaggccatcaaacacagtattaatgagaattttgttagcttctaatgataatcattattgtatcagaatgcaattcacactaattattagtaaaagtttacaaacattaaaaagtgcataataacatttggatctgagagggctgaaaaaagacatgaaaacacaacaccagggctttacttttgtgattggtgtccacatgattgcaaggagattactttctccacctgattcagcttagtgaagataagttgtcctccaaatttaaatagtatcatacagcattgtgagaaatttgattccatagaacaaaatatttccagtccttagtatgatcttggcttttcttttctacctttccaattgtccaaaattctcataaattaaaatatatatatatatatatattatgtgggagaagttctccacttgagaataaaacaaatttgacagattgaattccagtctgtgcagacaccaaacagactgaattcaggtgatattcacattaatggatattttcaaatgtctctataataaagcaatggagtcttgatgaatctgttagacttaatcaactcatcaacatacaatgagcaaggggaaagactgtgttttaaaaaagggtgttctatcctgtgtacaccaccacagtatggaaaactaaaatgaaaagacagcccttttaaaaatgagtggtataaaaattcacagtaatgtacatcattttgtttttcataagcaatcagagaagggggcagtgctgagcatatatattgtacaatacaaaacagtgtaaataacacagcagtaacacacagatacgtaatgctaaaaacagtgctttctgga

SEQ ID NO: 476827 - DNA, 834 bp, Homo Sapiens
ttttttttttttttttttttttttttagagctgtcaaagacctttattcagtcctggagtggagctggcctgacagggtgaagccaggggctgcttagggcgggccagaccctcagcccctgagcaggtcaggccggccaggcggggctggtaggtaccaggtgccagcagctgcagggcaaactcagtgatgacagctgtgaggccccagacccggtgtggtccatgcaggaagacgggtagtgtgtagcggaagtggccaccccggcagaagtgggtatagccctgattctgcgtctgcagcaggtgggccagcggcagtgcaaacacctcatctacctgcaggcaggaggcagagagggtagacagaggactggaacagcccaaccccctcatatcccccagctcacctcctccgagttgggcctgaggctctggggatccagtgggcctacaccagcaagcactggcaccacggtggccttttgcggatcatacacaggccgcagcaggccccacacgtgctcctcgggcactgccaggcccagctcctcccgggtttcccgcagggccgtgtgcaccacatcttggtcagccgggtcgcacttgccgcctgggaaactgacgtcgcccttgtgcctcccggtcaggcggctggaccgcagcgtgtacagcagcgccggcaccccacgcactgagcagagcggcacgagcaccgcggccgacgcgggccgcgcgcggagccgggccgtggcccctgccagcagccggcggcagcgcagctcgccctcggccgacaggcagtcgggcagcatgtcaagtcctgcgcggccg

SEQ ID NO: 476828 - DNA, 1000 bp, Homo Sapiens; identical to SEQ ID NO: 345117

SEQ ID NO: 476829 - DNA, 1000 bp, Homo Sapiens; identical to SEQ ID NO: 345118

SEQ ID NO: 476830 - DNA, 1000 bp, Homo Sapiens; identical to SEQ ID NO: 345119

SEQ ID NO: 476831 - DNA, 1000 bp, Homo Sapiens; identical to SEQ ID NO: 345120

SEQ ID NO: 476832 - DNA, 1000 bp, Homo Sapiens
aaaagttaaccaaagtattttattgatacattcttggacaatatcacagaattgaaagagaatggaaagagggaatttttcagcaagggttgtttttttccactaaattggcacataagcagcaagattaacgaaagtacttattacaaacagtaaaaaacatacatgctttttttcctaaagtccttatcacactgatcagtcaaagggggcatgaacaaaacctcaagacatgaaaaatccatattctttccttcaaacagcttaataattattaaaattattgcaaaatattcatataccctaattaaaaataacaaaagagaacacaaatacaaatattgaacataataaacatgtactgtaaaatacattactggcatgcattccaaagatcaagacctctattcagttcagccaataccttccttttatgtaacctatcatataccaaagataggtggggcatactttctcagcacagtttttggtctttaaacatcttttttgtcttaaaaaaaaaaacatgatgtgcagtggtactataatcgtaattatacagtcatgtacagatgtacttgttttagtctgccaagattgctttaaaattttaattgttttaaaatttttccaaatattccaccgtctgagagaatagggctctatgaaaacaaggcattcgaaaacaaacagtgaaccgaggtacgacatcagatggcaaagtgcaaaggtcctcacaaactgtacagaaaatttcaaaaccttgcaacctagaagtacatacgtaataagacaggtcagccccaaaacggtcctgtggctctcagtggtccattctaaagagccagggcgggacttgagtttcaacactccctttggtagggaaggtccacaattgcagccgagttggcagtgctgatgtcagtgacttattaagcccagataaagtaaggatatttcataaagcagctgtttaggtcgcttggatcctctaacactg

SEQ ID NO: 476833 - DNA, 1000 bp, Homo Sapiens
ttttttttttttttttcgtttttgatgtaacatttgttattttattggaaaaagctggtattaacatatttatagttttattcaacaattgggtaatttgtgagacaccaaagaaaaaaagaatgcacctatgagttacagagtccaaactgatcagggctgacaacttgaccaccatgtatcccacaccaccacccccaccaccaccaccaccaacagcttcgtcctcagagaagagctaaattaaaaacaaaaccaaaaaaaccccaacaacttcacaatgactatgtgaacgcccgtacattcgagagtaccaggaaatgtaagcagagccaggatgcaagtctgtgactattacactggtccttccaccgtttctggttttgtccctcccctcgacaccttttcttaacacacatttgatcttcacaatttgctttggacatcattattttccagggatccagagacatacttttcttcaaagaagatcttttcctttcttttttcttctttttggtttggtacccaaagtttaaaacagaagtaaggaactaggaactgtattaagacctccttttgaaggacatgtaagatttgtactttgaagatggtaaatgttaaatctatgatgtgacagtaacctctagctgcaaatacaagtttcttctcttaacatttgactcacaaagggagatggatcgtagcaaatatccaagtaatgggtaaggccctcagagctgggttttggctttaacacgctatctatacaattgaccacattctcgaacctctttacaagggggaaaaaagtaatccaatcctttgattgttaaatttaattagaatagatatgtacatataatactgtccaggtcaactggattttatagtgatatataaacaaacattcttcattcacgttgattaaaaaaaaatcaatgatccatttccctgtgtaaatgttatatggccagaagtgagtacacatgcactttgt

SEQ ID NO: 476834 - DNA, 1000 bp, Homo Sapiens; identical to SEQ ID NO: 345121

SEQ ID NO: 476835 - DNA, 573 bp, Homo Sapiens; identical to SEQ ID NO: 345122

SEQ ID NO: 476836 - DNA, 1000 bp, Homo Sapiens; identical to SEQ ID NO: 161087

SEQ ID NO: 476837 - DNA, 1000 bp, Homo Sapiens; identical to SEQ ID NO: 337073

SEQ ID NO: 476838 - DNA, 1000 bp, Homo Sapiens; identical to SEQ ID NO: 345124

SEQ ID NO: 476839 - DNA, 1000 bp, Homo Sapiens; identical to SEQ ID NO: 345125

SEQ ID NO: 476840 - DNA, 1000 bp, Homo Sapiens
agactaaggactaagaactggatacttcagtaaaaccatgattacaaattctgtggctgaggcaaatgttttctaaggtttagaaatcactgttttcccttttccccctttttttgttaaaataaatctcagtgctgtttacaaagtgcagaatcattcacttgaagaagcgacatttacatgaagttacaatggcaccattccgtttaccagctgcaccttcatttcttgaaggctgttcatgatcttcttctggtgaccgacaagagtcactccaagccgtctcaaatcctccaaggtcacctgagccacagcgtccattgaactgtatccattttccatgaaaatctctgtataccggcccatcttgattgcctctagccattcacctactgatctgtaggccccagatcctagtgggctatgttctgccaataaattagatactctgcaggatgcattaaccagcgtcttcagactacttgggttacgtatcagcttgtccaacatgttgactatttcatcaaacttgggcctgctatttcgctctttctgccagcaatccagcattaactgatagagagcagcaggacaatccatggggcttggcagacgatagccttcctctaccgctttaatcacatcttgattggtcatctcccagtagggtctctctccataagacacaacttcccacattactattccataactccagacatcactggcagaagtaaactttcggaaagctattgcttctggggcagtccatctgattggaatttttcctccccttgtggtgtaggctgcctcgggatcatcttccagtacccgggaaagtccaaagtcagacactttgcacacaaggttactgttgattaagatgtttctggcagcaagatctctatgcacatagcccatgtcagaaaggtacttcattcctgcagagatacctctcagcatgccaacaagctgaatcacagtgaactgcccatcgttt

SEQ ID NO: 476841 - DNA, 1000 bp, Homo Sapiens; identical to SEQ ID NO: 161088

SEQ ID NO: 476842 - DNA, 1000 bp, Homo Sapiens; identical to SEQ ID NO: 345127

SEQ ID NO: 476843 - DNA, 1000 bp, Homo Sapiens; identical to SEQ ID NO: 345129

SEQ ID NO: 476844 - DNA, 1000 bp, Homo Sapiens; identical to SEQ ID NO: 345130

SEQ ID NO: 476845 - DNA, 878 bp, Homo Sapiens
ttttttttttttttttcttttttttttttttttttcaacttcagcattcaattttattatagtaccatctccctcaacaaacaagatcagcagccagtgtgggatggtgctcaatggggctccacttcccactagagtgtaagctgcttccacgcatgctactgcgtgctccgagccatcgcagcggagtctcttctcacccagctttgatggtggggcgactcccgtgtctgcagctgtggtccaaagggtgtctgtgctggatacagaagttgccgtgacattgggcacataccatctgcagcatctctttcttcttgcagccctcttttgagcaacggtatgtaaaaatcttctctttcttcttcccagggtgagagtcacagtctctgtcaatgtgatcaccaaccaccacgtctggtatctggcccttttttactgggattggggtattacagagtgggcatactgggacgagcacatccttctggaatgcaaacggacacttatgtgcagcgtatggaaaatgatctttacagaaatcttgtttacatgcatcacattttactggaagaaaatctagctgcttgcaagtcttttctgaacaatgcttccccaaatcaggaaactccattatgagaacagtgctcaaaacgcagatggcggagttaagtgtcacctggctctcgtcggggacccaggcagctgaggcgagcagcagatggaagagacgtaaactcaggtgtcctcctccgtagtcggctccgggtagctaagcagaaagaacctcgacactggcaccgagacgccgtcggaggcacacccacacccacaccggaacgcaacatctcgctgcccgcggcctaaggccatttatc

SEQ ID NO: 476846 - DNA, 1000 bp, Homo Sapiens; identical to SEQ ID NO: 345132

SEQ ID NO: 476847 - DNA, 1000 bp, Homo Sapiens
acagcagaaacgtctaggagctcttacagccactttcatccacaggaagcagcagccataaccatttacaaataagtggaatcaataataccaaaagccaaattatttaaatgtttgagtcatctcttcacttcaccactggcctcagtaatttctggacccattggagcagcagagttgaagattagggagaagttggaaatttccttaacctgttggcagcagtcaccacatagaaatgtttcttccattttctttgagctatgtatttctgcagcagtagttgggatttgagacgagttttggatcttgaagctttggcaggcaaattattcagccactcgtgtttcaggcactgtgtggcactcattctgcagctcttctctttgaccagcaaccgggaaacaaagtccttggcctcctccgagagcccttcaaaggtgtcagcatcaaaatcccagctacagtttacaatgaaattcatggtctctgcatctgtttcccctagaaatggggacaagccactgagtagcatgtaggtgatgactcccacactccacatgtctgtggggaatgagacaaactcataattgacgacttctggggccaggaactcaggagtgccgaagttcaccttcagcttctctcgaggcttgtaccttctggccagcccaaagtcaatgatcttaatttgatgtcctgtctgattgacgcacaatatgttctccggcttgaggtccaggtgcaggatgtagtgctggtgcaggtaatgcacaccctcacagatctgcctggtgaacaggaccacatccagctcagtcaggtggtacttctcatctgtgatccggtcgaagagctcacccccgtccacgtactccatgacaagggtgcagctgtgcttgctctcgaaggcgtcatagagctggatcaggttcacgtggctgagctggttcatgatgttgatctcgttcttcacgtcctcccggtccttggcgctctt

SEQ ID NO: 476848 - DNA, 1000 bp, Homo Sapiens
tttttttttttttttttttaaggtcattattattatttagaattgacatctagaacccagaacccatggcagatttacttagattcttgctactcaaagtttggttcactgaccaaaagcacatcagcctccaggagcttgtttaaaatgcagaatctcagactcggtcctggctacactgtctgaacctgtatttaacaaggccctcggtgaaccgagtccacattaaagtctgtgaagcgcgctggaggccacacccagaaactaggcagagattgggctactttaaaaaggaggctaacaagacttagggtgcctgccgtggggtccccacggcctggaaagactccagaactttgtcagcgcggcatttcacctgcgaacactgccgcttcaagcctggccaggaccctacacgtcggtgtgttgtgacagcctcgtgcccagtgccaaggtaggggcgcggtggctaaggccacccccgcagagcccgggggatgcagccaggtccagcggcggcttgctggagtaccacgtgcttaggaggcggtccacctgctcccggctggagattgcgcgcaggtgggccttcccacttccactatccaggccttctgggggctcaggcactgcggggggctcaggcactgcggggagctcgagtctcctgcctgcattgccccggcgcagcccccgcgcctgcagctcactccgcatgctggcaaagaagtgcagcacgcagcggtgcgcgaagtcccgcgcatgctcacagcaggtctcgtcgaagagcttctgctccaggtccacgtagttgctccagtatctgcgctgcaggaagactgtctggtcgaagcagggcctcaggcagcgggccaggaaggccgcgatgatcagcagcagggtgacgctccagccgatggcctgtgacaggcaccgcaggtagcgagacactgccttccgagcagggctatccctgaccagctcatcctccttgcaggga

SEQ ID NO: 476849 - DNA, 1000 bp, Homo Sapiens; identical to SEQ ID NO: 345133

SEQ ID NO: 476850 - DNA, 1000 bp, Homo Sapiens; identical to SEQ ID NO: 345134

SEQ ID NO: 476851 - DNA, 1000 bp, Homo Sapiens; identical to SEQ ID NO: 345135

SEQ ID NO: 476852 - DNA, 1000 bp, Homo Sapiens; identical to SEQ ID NO: 345137

SEQ ID NO: 476853 - DNA, 1000 bp, Homo Sapiens; identical to SEQ ID NO: 161091

SEQ ID NO: 476854 - DNA, 866 bp, Homo Sapiens
ttttttttttttttttgtagatggggatacatttattctctgggagtttcttgctctggcaaaactgttccagactctgagtccgaggacgcagacagtgagggcagcaaggaagaccctgagacctcctggggttcaacctcctgggcctcggccagctgggtcgtgtgctcaaaggcagcctgcagcaggtgggaggccaggcaggtggtccaagtgatgagataggccaggtgccaggaggtgagggcagtcatagtctccacccaccaatacagacgtctcagctgtaccaggagcttccttaccacgcagttcacttgcaaggccttactgagctgcctgcccagtcggaagcagtgggacttctgacacaccctccaggtcactaccaccaagagcaaggccaccaacatcaggccgtgcagacatgacaaaaacagatctgtccagatggccacagacaggcccagctgctcccaggcactgagcaaggccaggcccaggcccttggtgctgccccacatgccagcccacatcagcctgggtccctgtagcaccagccatacggggacctgtatcagagccagcccagcccggagagcctggcccagggggcagtctgcagctcccaggggtaggtgggcctgccagttacaggacccccgggcctcctgggccagccctgacacccagtggttgaagaggttgatcttgaggagcaggaaattatagaggtgatctcggttctgaaccaacagcactgagagcctcgtaacctgcaacaggttccccaaaaggctggatctgactggaggaagggcctccatgtctggcctcccccacctactccggctgggagaagc

SEQ ID NO: 476855 - DNA, 1000 bp, Homo Sapiens; identical to SEQ ID NO: 345139

SEQ ID NO: 476856 - DNA, 1000 bp, Homo Sapiens; identical to SEQ ID NO: 345141

SEQ ID NO: 476857 - DNA, 1000 bp, Homo Sapiens; identical to SEQ ID NO: 345142

SEQ ID NO: 476858 - DNA, 1000 bp, Homo Sapiens; identical to SEQ ID NO: 161092

SEQ ID NO: 476859 - DNA, 1000 bp, Homo Sapiens
tttttttttttttttgtagagacggggattttccatgttgaccaggctggtctcaaactcctgggctcaagcaatccacctgccctggcttcccacagtgctgggattacaggtgtaagacaccacacctggcctacaatcaagtgtgacaaccatttaaaggctttgtctcattcttcagatttctaagatttctcaccagtataatttcttttatggttagaaaagtttgaggtgttgtcaaaagcattgccagatctttctggtttgcagagtttctttccagtatgaattatgttatgtctgttaagaattgagggcttgttaaaggctttgccatgtttttcaccctcgtagggtttctgtacagtatgaatttttaatgcctagtaagagttgaagactggttaaaggctttgccatattcttcacatttgtagaatttctctccagtataaattattttcttaaaaaggttcgaggactggttgaaagcactggcacattcttcacaattgtagggtttcgttccagtatgaattttcttttcttttttttttttttttgagacagagtcttgccttgtggcccaggctggagtagaatggcacgatcttggctcactgcaacctctgcctcccaggttcaaatgattctcctgcctctgcctcccaagtagctgggattacaggcgcctgccaccacacccagcaaatttttgtatttttagtagagatggggttttaccatgttggccaggctggtcttgaactcctgacctcgcgatctgctcacctagtcctctcaaagtgttgggattacaggcatgagccaccatgccctgctgaattttcctatgtttagtaagagttgaggattggttaaaggctttaccacattcttcacatttgtaagatttctctccagtatgaattatgttatgtttagtaaggtttgaggatcggttgaaagctttgccacattcttcacatttgtaggg

SEQ ID NO: 476860 - DNA, 1000 bp, Homo Sapiens
ttttttttttttttttttttttattcaaaatgaaaatagatttattaattcctgtgaaaaacatattataaccggattacccactttatttataggaaaatatttcattaagaagctggccgggcatggtggctcacgcctgtaatcccagcactttgggaggccgaggaaggcggactacctgaggtcaagagttcgagaccatcctggccaatatggcgaaacctcgtctctactaaaaatataaaaattagctgggcgtggtggcggatgcctgtaatcccagctactcaggaggctgaagcaggagaatcgcttgaacccaggaggcggaggttgcagtgagccaagatgtgccattgcactccagcctgggcaacagagtgagactccgtctcaggaaaaaaaaaaaaaaggaagcttggcactggttttcacctgcacaaatgttaccatctgggcatatttgaaatgctggcaggtaggcaggccatcacagtcatagaggatttaggggaagagtagcgtaggcagggggaccaatgtgagcaaaggtgcctggggaaactgcatgggaagtggtgggagggagaatagcattgatttcgacagtaaagtaggggaaggcaagaaaagaaaccaagaggccgagaggcatgatcacagagggccttatgtccacactcaagcctttgtttggctttatcctgagaacagcagggaacagttgagagttattgagcaagagagggtcattgtcactttgctggctagtgtcagggaagtggggtttactccatccctggccaacctttaagccccagccacctctgtccctgaggttcaaggcccccatgtcataaccactgtccttaagctgtcaggcatggagggagtggggagggtctaaagatgggagctcagagggagaagtggtccctgctaccctctgtccccagctcgccagtcccaggctgaatgtaattgtcctcgatgaagc

SEQ ID NO: 476861 - DNA, 1000 bp, Homo Sapiens; identical to SEQ ID NO: 161093

SEQ ID NO: 476862 - DNA, 1000 bp, Homo Sapiens
ggtgatgatcatttgctttactaaaagagtttttcactgacttccatttaaatggcaattaaaattggatctggtttacagaacgtcagtctacacacttcttcaggaatgtgatacttgtataaagcaacctgcaactgtacccagcctccagctaattccaggtcctattgctgtttaataaaaatgtccatgctttttggagacaggaggtttttactgatctcccctggctgaaaagaaatggatgggtattttctcagcctttctgtgcttctttctctcttgcttgttgcttcgacgcctttcacaacactttaatctctatcccttttcttttatgatgtgaaccaaacctcttgttctccaaagacgtttgtgtgctgaacccttggatagagtcaaaagcttactggaggatttttttaacttacacaaatattcttttcttaaattaggtagtctaaaatgaaaggaaagggtttgtttctttatttaatatctctacctcctcatgaggttgcagaagcacaaatatattaagtaaaacagtagttccaggaagcctgcctaaagcttccccacctcctcgcagtactcctgacagcccctgtctttgggtcaaggtcaggagggagtcaagaagtgagcatcacagaaggggagcagagaccttggagaccatgaagttcccatcttgcttcctgctgagctggctgtgtttccctttgctgtcccattgctttccatttcccttccagatctccattcagtaatggcttttcctggcccaaccctaagtcaagccctttatggagaaattcagctgacattattgactctcatcactgccaggcagtattgggcattgccatcctcattatttaccagcttcttgatctgggctggtgtatcctgcagcttcattaccttaagcctattgcgcatttgcagtgtctgctctcctttttctgagctttcttgtaattagcttaaccac

SEQ ID NO: 476863 - DNA, 1000 bp, Homo Sapiens; identical to SEQ ID NO: 345145

SEQ ID NO: 476864 - DNA, 1000 bp, Homo Sapiens
tttttttttttttttttttttttttttttttttttttttttttttttttttttttttttttttttttgctgtgtcttccaggatttttttatgcatttatatattttatatatttttaaacaaaaatagtatcatgctatatacattattttataagctgctttttctccctatcacacagtatgtctttcctcatcagtgcatataaatctgccttaattcttacacaggccgcatggcattctctgctgtggacgtgcatatgtattgaatcagtcccccacaggtggacacgaaggttattcccattgtctcgcagctcaatgtctgcctgcaaccccgctatttccttgggctcagttcctagaggtgaggtcgctggctcaaacggtctgcctattttcgaggctctgccttccagaaaagtcatgcaggcagctgaccctccccacagccagggtggtgaggcaggtgggctgggggtggcataagcctgggctgtagtgcactcttattctccccgcttctctctctctctctagggctgaacccatcagaaccactgtcttccagtaccccgtgggctggccaccagttcaggagctgcctccatccctgcgggcacccccacctggggggtggcctctgcagcccagagtccagtggggctgagccccttgcccccgactgacccccacgtggtcacttttctcatcagtcacaataggaagccaagcccggttcctgctacgccccatggaggctccgagaccatctgcccagcctcactgaggctcaggacacggccacaccaagtgcagccctcgtcctgggtctgcaccgggcagctctcccctcactctcctccacctgcccccctgcttcttaagaagatgggggagaaaacttccaaatgtttataaagaaagtctgtcaccacagtggtctggctgtgtttccctacactgggtgctctgagctctgttctccagcccctagc

SEQ ID NO: 476865 - DNA, 1000 bp, Homo Sapiens
ttttttttttttttttttcaaagtctaaaaacataatttaatgcatcgcggtgagtctgagtcaggagggaatgcggtgtggagaggtgaattttctgtttgctggaattctgctgtgggtggggttttggctgatggacagggaaatctgcacaagtatttcgggtcacaaagaaggacgccccaggaagcccgcgctccctctggcctacctccctggccagggcccggagccctccgcttctaggcactgggaggaggctgtctgaggagggcaggctcccggccctgcctgtccagtctaatcaggtttgcaaagtctgtgccgccgcctcaagggctcgggcgtcccttcctcccttgccgggatggggatggagaccaggagcacagccctgagcgtggtgggtcgcagacgcactgaggccaggagcggggcagggaggacgcagggatttgtcttttccaaaggagatgtcaggaagtgttatgaatcgagagtggcctttgccaaggagccgcgcccgggcggagaccgggcggcctgcagccaccccgcctcgcaccccccgcgcccctaatccgggtacagaagaaagcccgagaacgtgctgtacttgttattattgcctccgtgagccttcccgccatccagcttcacatacacttcgtcccctgaatccaagtgcagcaccacgctgttactggcgtagtcgtagttctggtcggcgtcctgtgcaatggcgctggcccggacctgcccgttcttgcagaggtccgcccacatgctggtgccgtcgccgccgcgcatgaggatgtggtaggtgaagaagtagatgccgcgtacctggcagctgaacttgcccgtggtggggtcatagtgattgccgaggttggtgaccacgtcatcgaacttcagcacctcatagccttcgtgggggctcttgagacccacatagaaggcgatcttggggccgctgaaggtggcgctcagcgcact

SEQ ID NO: 476866 - DNA, 1000 bp, Homo Sapiens
caagtttcagcaaacattttattctcctcattaatgtctcaaaactgttggaagctaaagcctgaaaaagtccttcagcaataaacgtaaatgatgttttacaaagaagaaaaaagaagttgcaagaggatgttcgtttctgttaaatgtattcctgagtatttttctttggtaaagtccccaaacttgaacaaattaggcacagcgtcgatagaagtaaaagaagtaatcggtgaagaatatcccagcaaaataaggatcagttgaacagtcagctaaatccggtgcagctacacggaaatggaacatgctgtcagaaaatggggctacagggaggctccaaatgtgctgatatccctgtgtcatctcctgggagatttctctgtggctttccatccctttggttccccttttactatggaaacatatatttccaagggtgaatttgcactggaagactatcaatggctctgttgtgtttatttccagagagaacttgacattggtgggtgtgtgtttattaacaggaatattgtaattataatttccagatccgcactggaggctttgaatgcaatactgatgatctattatttgctggatttccataatctgaatagaactgatggttgtatcaatccagtcactctcccagtcagggccgctgagtgcatttcttgccaaaactgatttgcttttgtcttctgaccatcgcctctgatggaattccttctcctcagattgtctttgcacaggacttgaagagacttctttcattccccggatggggcagcagtaagtctcctgacacggcaggatttcacagaaagtaatttcaggtacttgtaaggaggccggtgtggttaccagggatgtattaggtgctgaggaggaggctgtgggcagcagagccggctcctgtgagcttgtgatattgcttggagggagatttgggacacgtcggtcttgatcttttaagctaagtatatagagggcaact

SEQ ID NO: 476867 - DNA, 1000 bp, Homo Sapiens; identical to SEQ ID NO: 345146

SEQ ID NO: 476868 - DNA, 1000 bp, Homo Sapiens; identical to SEQ ID NO: 345147

SEQ ID NO: 476869 - DNA, 1000 bp, Homo Sapiens
gactttctcactgtttcattttgtgattgaagtgcgtgcaaaacactcaatctggtagggatgatgcccgcgcggagctggcccttctcctattgtttttccaagctggagaagaagcaggcgctccctccattccagccacagatcacagacgactacggtctggacaactttgacacacagttcaccagcgagcccgtgcagctgaccccagacgatgagtgagtcccactgggtgcaggtccctggagcacccctcgggcagccccatggcaggccggcaccttgggcagctggtgacccagcctgcccttgagtcccacccgcctggtgtcatctctccagtgggcgttgggggaggattcttatgcgaacgtgactccgcttcccccaagggaatgaacacacggtcacccccctcccccctgccacctttgcccacagggatgccataaagaggatcgaccagtcagagttcgaaggctttgagtatatcaacccattattgctgtccaccgaggagtcggtgtgaggccgcgtgcgtctctgtcgtggacacgcgtgattgaccctttaactgtatccttaaccaccgcatatgcatgccaggctgggcacggctccgagggcggccagggacagacgcttgcgccgagaccgcagagggaagcgtcagcgggcgctgctgggagcagaacagtccctcacacctgggcccgggcaggccagcttcgtgctggaggaacttgctgctgtgcctgcgtcgcggcggatccgcggggaccctgccgagggggctgtcatgcggtttccaaggtgcacattttccacggaaacagaactcgatgcactgacctgctccgccaggaaagtgagcgtgtagcgtcctgaggaataaaatgttccgatgatgtggaagctcctctgatgccttttttccgtgagtggcgcctgccccacatctcagacgcaacccacacgtaggggggcagcttaggag

SEQ ID NO: 476870 - DNA, 1000 bp, Homo Sapiens
tttttttttttttttttttttttttttttttttttttttttcaaaaggaagaaaagaaatgtttaatgttcagacctgccaagagcctccaacagggctcaagaaacatataaatcccatgagcacagccttgaaaaccagtttgactcaagccttcgggcctcagttcattgaccagatgacagccacgtgatgattagggaaggacggatgcattgcgattctgcttacacatcgggttatcaaagcgagtcacttgttggaaccatgatgctcgacctccttcaaggccgtttgcactggggcttgagtttccaagattcacaacaggtgtcagcctctgagaaccctcaaagcgtgtgttcttcaacctggcaaattgtttcccctcatgggggaagccgagctctgatgaacttgagaattacacctctctcatgccgaagaccgtggtgttccccctaatgacataaacgcagcctttcttgctgtctgagaccaaatgtctagttggtagacaggtggactgtttggcctcttaagggcacacttatgatcctgggccccaggtggtgaatctctggcatgtggcttggctttgttgagactccaaattccattatcttcatgacattcggcctcatccatagggtcctgaagctgcagtccacagctcagaaaggagaggtgagacctccctccaacctggtgccacaggtctctcccaagccacatccagcctggatgacctgggaccccagaaactgccgtttgggaggcagcaacagcaacgtgcccaggcaggcagttattcccacagagtgaggcagaattgtagcagggcacttgaatgcagagctgatgatttgaaaccaacgttcacccaacttgtcagaaatggcacttacatggttcgatcttgctggagacaagtggacaattgggggtcactggcagagacggtattgcccaaaatgttcacagcaggaggccagcaggc

SEQ ID NO: 476871 - DNA, 1000 bp, Homo Sapiens
ttttttttttttttttttttttttttttaagagaaaatcctttttactttggctgagaagtttctgcaagaagactctcaatcccaagattttttttaccataacagaattcagggaaaagccaatactttctgcaaaggggcatattggggtgatttaatcaaggacgtaccctaggaacctgaatcctgaggagccagggaggtatgggagggctgagtggggctgatggcatgcaggagcaaggacccgacttttggagggcataggagactattcaggtctggtctgaaactacacagaggactgggttaaaaatgaggcggttgacagggccacaaggctgactgagagcctgactggtttctggagttctctggcaaaaagaagtccagactgaagtttgcaggtgagcacctgcctaggtgttccagaggcatatgacggtgatgatggaggaggccatgaagagcaggtagaggcggaagagcagggcgtccatcgcgtggctgaactgcacccacagctccaccgagtgctgcttctgggcctcgtgttcccgctgggcccttgtccattctgagccccctgtcagctctgcctccccagggcctggcatctgccctgctgatacctctggctccttcacaccgggcaggtgggtgggggtgagacccgggcccttatttcccttctggggcgcagtgggacagcatctcccttggccggtgcagtgcagcagcagggagtggagccaccgaggcagaggtaggggctgggtggtggccacgtgcagcaggtgggtgatgaagatggtctccagcaggctgcccaccatcagggacaggcacagggcgaagtagacacctcgcttttggtctcttgatggatgaggacgtactagtgaagcatgtgatgaagtgctagtggctgggagcaagtcattcatcatgagcaggaagacgctgtagcccagcagaacagtcatcttgaatggggc

SEQ ID NO: 476872 - DNA, 1000 bp, Homo Sapiens
tttttttttttttttttttttttacaggcccaaaatccatgggctttgtactggcctctctttattcagggcccagcagcagccaggctggggaccccaggctggggcagccttgagcgggatgcaggcacaggcccaggcctcccacgcagagtgctgacagctccattcccagcccagccacagggtcctgccagctctccagccgggaattcaaaagtggcagatgtgcctcagccggagtccccgaggacagccaaagaggaaccgaggcactgctgctgtggggaccaacgggaggcttgcaggcaggacgagtgcaggcagggacctcagggctcctctgtagaggcgccagcgcccgaaagcaggccttgtctctccaggtcattgctgtccacatcattgctgtctggggtccctgtgacaggctgccaggcccgggtctcgtctctctccaggtacagcgcagtcagcaggaagcagccgccccccagggcgatgacaaaggcgcagcacaggaagctctgctgcaggctgcggaagcgctgcagataggagtcagggcgcctggcccgcaggacactagagataagtcctgtgagataggggctgccagcgcctcccaggatgtggcccaccgtgatctgaagtgcctctgccgtcccccggcatctgggcaccaccacagacagcaggatgtcggcaaccactgcccagttgcaggacagaagcagctccccaaggcccaggaacacataggaggccagcagggtggtcggggccaggacgagagccaggtagaggcagggggctgtggcaagcaggctggaggcgcagatgaggggctcagctcctggaatgactttcttgtacctcctcgcagcttctgcccccaagatgaccccaatgacgccggtcatgatggtcagtgccccaaaaatcaggctgtcggggttgctgcacggctcctggaagcagggaggctgcagcctgtgaa

SEQ ID NO: 476873 - DNA, 1000 bp, Homo Sapiens; identical to SEQ ID NO: 161096

SEQ ID NO: 476874 - DNA, 732 bp, Homo Sapiens
ttcatgctcattgctgtttattgaaacaaaagaatcagaagaagatcagaatgaagacaataataaaaagcagaagcagaagtacaagaagaataaagaaagaaagggaaagaattgtaggaaggaaaaacttgtagaagtagagggtggagagtgcgaagaggtggagtatgatgggcagtccgatcttttccatctgggctttcagacaatgggatatgtcatggaaggcttctttaaacaccagaagaaattcaggataaagctcaaaaagagcaggcaatcgataggggttgaaaatccactcagtaggccacggaaggacttcaagaaggttgatcgttctgtcgctggatgttgtaggtgtcctacgtgaaggcaatcgacatctggatggctgtgtgtctgctctttgtgttcgctgccttgctggagtatgctgttctgactgttggatttcttcttcttgatcttcattgggtgcattagagttgttgggcttgagttgttgttctccctcactcttttctgttaacctcatttcttctacagtaaagtgatcaccttggaaaaaaaaaagcagactgccaaccaatccagagtcctttcaccagctaagttgcctgtatggatgtcccagcaacaaaaaggctgccattgttactgtagagctattccaggttgactctagtcccacctcctttcctgaactcctgcaacccgcaactgcct

SEQ ID NO: 476875 - DNA, 1000 bp, Homo Sapiens; identical to SEQ ID NO: 345149

SEQ ID NO: 476876 - DNA, 1000 bp, Homo Sapiens
ttttttttttttttttattgaaataagctttatttgaatataatctgaaaatcgtgaggcaaaaatcataaatcaggatgtgggtattacagtgaatataatatataaatatccaccccagatactgaatcatatataataattgtgcaagtataggaacttacacataagtaaagtgagtgactggactgccccagcttctgaaatcgaaattagaaaatgttgatagaagtatataaaaatattatccagtattcactggttggaaatattgaaattaaatattttcagatatttcaagttactctttgatataagcagatatgtttagtgaacaggacttttaatgaatatagacttcatgagtcacttttttctctccttctacctttaactctagaaaaagcaattttgaatctgacagcaaggctggcaatgggatgcaaaaagagcagtaatttttatttgataattgttagaagagatctagagtttatcatttagcactaatcacagcgctaagagatattaaaataaaataaatagatattttgagattgcattattaaaccccaaaagctaagaaaacattctagaaatagataaagcatttcattctacccttggaattcttcacttgcaataggtaatctgtttgattttattctgccgaacagattgatgacatctaacttggaacagtctatgtaggataataataatttcacttccatgatttggagttcttgctaattaggttgtaaattgtctgcttaggctactctgtaatcttgcctgtagtgtctaacttcttttatgataatgtgaagaaagaggggaaaatcactccaaagacattaaatcttcctcaaataatagtcacgaagttgtaaccatcatttggttaccattacaatttagcatatacctgtgtgtttagtgtgtattgatacacacatatatgttccagctatattagtttgtcctttaatttggtaag

SEQ ID NO: 476877 - DNA, 1000 bp, Homo Sapiens; identical to SEQ ID NO: 345151

SEQ ID NO: 476878 - DNA, 1000 bp, Homo Sapiens; identical to SEQ ID NO: 161097

SEQ ID NO: 476879 - DNA, 1000 bp, Homo Sapiens; identical to SEQ ID NO: 345154

SEQ ID NO: 476880 - DNA, 1000 bp, Homo Sapiens; identical to SEQ ID NO: 345155

SEQ ID NO: 476881 - DNA, 1000 bp, Homo Sapiens; identical to SEQ ID NO: 345156

SEQ ID NO: 476882 - DNA, 1000 bp, Homo Sapiens; identical to SEQ ID NO: 345157

SEQ ID NO: 476883 - DNA, 1000 bp, Homo Sapiens; identical to SEQ ID NO: 345158

SEQ ID NO: 476884 - DNA, 1000 bp, Homo Sapiens; identical to SEQ ID NO: 345159

SEQ ID NO: 476885 - DNA, 1000 bp, Homo Sapiens
cttccctgagaggtttcttttattgaatagtaacttcatcaaacccctgagacatttttaaacatttattttcatgtaaacacaaaatactaaccattcatctcaaatagcacaatgctcacagcacacacatcccatgtgaaaggttacatctgacaccacacacagggcaccctctaggctgtagacttcactctccttttatggtctgtgccacctgcacagagagcccaagtataaggggcaggggggaggcaggcttcatgatgtctccatatgaatctctaaactatatttctagtcaattggacccttccatctttgtaatgggtgcaagagagatgaaaactccagtggaacactccagaagagattcctccaaagagaagagagtttcctgaggccagtatccatacctcacttatatcccctgtccccggcacagagcatgtccctgagaaagcatgctgaatatctgttgtacaacagaatggatggatggatggatggatggatggatggatggatggatgacggatggaggatggatggatggatggatggaggatgggtggatggatggatggatggatggatggatggatggatgatggatggatgaaggatgggtggatggatggatggatggatgatggatggatagaggatgaatggatggatggaggatggacggatggatgatggatggatggatgataaatgtatggatagatggatggctggatgaaggatggatggatggatggatggatggaagatggaggatggatggatggatgatggatgggtggatggatggatggatgggtggatggatggatagatggatggatggaggatggatggatggaagatggatggaggatggatggatggatggatggatggatggatgatggatggaggatggatggatggatgatggatggaggatggacggatgatggatggatagatggatgaatggatggatggaggg

SEQ ID NO: 476886 - DNA, 1000 bp, Homo Sapiens; identical to SEQ ID NO: 161098

SEQ ID NO: 476887 - DNA, 789 bp, Homo Sapiens
tttttttttttttttttcaactcagagaagctttaatagcaagaggtgggactagcctcctggcccgggagagagcggcggcggcggcgccgttcaactgcggcagcagaataagcgcgcgtcgttcagcgcagtgtcatcgccgaggcctctaggtccctggatcttggtctgcaggccgcacgcgcccttggggcaatggtcactccagtctccaaagtctccccagctcagcccaggcccctgcagttcctcgccgtctgaacagcggaagcgcacgttgttcgctgctgtgttgtcaccgagggtcgtgggtgcctccacgcgaagcgagaaagccactaggtaggcgccgccgcgacaccacagcggctcactccattcgccccagcttccagactgggactctaccacgtgcgtattgcctaggacgttcccgcgcgcgcagtgcagcctgatcccattcagtgcagtgtcgtcgccaggaatgccttggggaggctccaccttgagcgagaacccgctggcgaagaatccatcgggacacatctcaggccaggcccagtcgccccagggacccccgctggtcacttcgatgaccgccgtgtagccgttccggccatctgtctgtgcacatgtgaaaccagtcgcccgcagaagcagcagcagcggcagcagcttggctcctgcgccccgctccatcctgtagcgtctgtgaatcaggcctcctaagcagatttatatcagtttggcctctgtgagggctccgattgcggaagggcggccgca

SEQ ID NO: 476888 - DNA, 1000 bp, Homo Sapiens; identical to SEQ ID NO: 345161

SEQ ID NO: 476889 - DNA, 1000 bp, Homo Sapiens; identical to SEQ ID NO: 345162

SEQ ID NO: 476890 - DNA, 1000 bp, Homo Sapiens
caggatgcaacttacttttttgcttctctcactgagttgctggaaagatcaagtggcaaaaagcatgtgaaagaacatggtcaagcatgtgcacagagaacatgctaaaggatcccatctctatgaagttcatgcagttatgaaagtgtcctgcactccttgtgttccttcctccctcagacctttgtccaggctgtctcctctacctaaaatgtgcttcctcctgcttctttttgccagctactattgatcctttaggattttgctcaagggtgaattcctccaggaagtcttccctgatctttatagcttggagaatttcacctcgctgaactttgccttgtgtgtttttctgtgaagttaatcggcactcatgtgtttaggaggtggggttgcttagcagttcgtggggctgggaatctggtccctgaatccatactcactagatacacaagctcaaccaagtgcttttacctctcagtttgttgacctgtgacttagggcttatgacaagtagcccatttatactgggccactgctgtgtcccaagtactaaatgttcatctcgttgaatcctcactgcaactactgtgaagtagttcttgtcatgttatagagtttattttcacctccaccttataggtgagaaaatattggcacagagagctcaagtaactcacccacagtctctgcaggctgaatggtggagctgggatttgaacccatgcagcttagctccagagcctggcttaagtaactcacccatggtctctgtaggctgaatgctggagctgggatttgaacccatgcagcttagctccagagcctggcttaagtaactcgctcatggtctctgcaggctgaatggtggagctgggatgtgaacccatgcagcttagctccagagcctggcctactaactgttagggcatactgcttattgggcttctcatgatgacactaataaagacatcattgtatagctcccccctagagctgc

SEQ ID NO: 476891 - DNA, 1000 bp, Homo Sapiens
ttttttttttttttttttttttttttttttttttttttttttttttttttttttttttttttttttttttttttttagacaacaagataaatctttattgttgcctcgaatctgtggccttttcttttgggacctgggtttgctcggcaactccactgccaaggccaaacagtgaggatttgatgaaatcgatcaccttccttcgacgaaatatcgcaaaggtaaggccggttatcagtgctagggagccgcagatcagcagccccagaaggcggcttgccagcattttctcgggctgcagaggctggaggcttatggacgactccgtggtcgcctcccccggggttacgatatttggagaaggtttttcctccttgatcattttgggcaacactgtgacgtgaaaattgatgatcgtggctgggctggaattcacagagcccagctcgcagcggtagctgcctgcatcctctggacccaccatgggcttggtcagggtggcctctttccccttggacaccaaggtctccgtattgttcccccaaaccctgtaaaagctgtaatcagtgaggccttccgaagcctgatgccagtttaactcacagtccaggatcatgtcttccatttgaggaacttccacattccgctccccgcaatcgtaggactttcgacaagcgtgaacctcctttttgcagttcttgcaccagatcagagtttgcaacatcacaccacatttgttgggacaataagcctctttttggaatcgagcaacataggtggcaaaggtttccttttgcaagtgcaacatccaaaatagctccttcacaaagagatcgccttttacatcactgtctgtgatgcgtttcagatccttcagcaaactccaggaccccttttgcagtgtggcctcatcaacgacccccatataggcatcctcattaagcgacagttcctggaaatccttcacggcattctctaccctttccatcatggctttgtg

SEQ ID NO: 476892 - DNA, 1000 bp, Homo Sapiens
ctccagcccaggaaaggtttattggctaagcaactgtagaaggtggagtgggaaaggcacaggcctcggggctgcctccagcctgagcttgggctgggaccggggctaacccaagctgtgatggggatctaggccctagtggagctggacgccgagttctgggacaccagaagctccatctccagccagctactggggagggccggaaggtgtccctttccccacctggcctggcctggcctggcgtgacctggaagaaactggggcactggaaggagactcaccctgtaccctgcacagggccatgggtcacagcccccagggactggaaggatcaggtgtcctagaaggacctggacagttcaggaaaggggagggaagactcctttcccagcccctctcgccttctagcccctccagccaaagccaggccccaggagaggcccgccagcccccgttcactgtgtgggaaacaggcctggcctagcagcagcggccgggcagcctgtgccccgcaggccgggagggcgtggtggcggccatggtgctggcccgtttcgagtggcggatgcccatagagaacgctggagccctggctttgttcacggtgacctgctctgggcagtgggcgccagggccgggggtctcctccaggggtcgcggggcccggggccgccccagcatggtgaaggcaggcaggcgctggcggtaggtgtttgcgtccgggctgtcgtactggcccgggcctggtatctcagcaggatcctgcggggggcgggcggggggggtgcggcccaccaccgtgtagctggggctgctgggcttggtgaagatctgtgagccccacagagggggcatggtgtaggcattaggggcaggggctgaggtgtccaggggcttcagggggaggcggcagcccagggtgaaagccggcggtgtccgatggcgcacagggggcaccttctctgggctgtaggccccagggcctggcgtcacctcc

SEQ ID NO: 476893 - DNA, 1000 bp, Homo Sapiens; identical to SEQ ID NO: 345164

SEQ ID NO: 476894 - DNA, 1000 bp, Homo Sapiens
gggttttggagaagcttgctttttaataaatgggacagatgtatctggcaccatcccttcctcctatatcctgccttgaatagggatgtgataccttgagccatggcatccacattgtgactctaagaaaaaggccaagaaaaatacaggacatcatccccaatattattgtgtcctaaaccaatgccggctactgacaatatccagacttcttgctattaaaaaaaaaaatctcaacttatttcatctcctactagttggcttttctgtttcctatcattgaaaaacattcctaagtgacaaacttgctatggacattttcataaggaaggaaacttcaaggaggcccttagcctttacagttgaactgggagatgagtcaccaagatcctctatctaggaaagaaagtacctggaaaggagctccctccctccctgccactggaggacctggacctcctagctctgcttgggtgccactgttaggctttccccagatgaagggccctgcactgttcattttgtgcaggataaatccaggccctgggctgagtgccaaacaagtgaaaaagacagcttcaccctgatagtccctctgcctctctgtcccctgagcatcccagattgtcctctggaggcacgtgtgccttgagccacggctggggctcactcccaggacaacggtacagctgctgcagaggcataggtttgtctgctcttgccccatccttcctcctgggatcctcggagcacataaccccatctcaagaggctttccagacaaactctggggatccaggcagccttacaattctttaggtcagaaatccaaaatgtgtctcactgggtgaaaatcaaggtagaagctgtgccatattctccctggaggctctggggaaaatccatttcattgcctttccagcttccaggcactgacagcatttcttggctggtggcctccttacattgtccactggggctggcaatgactgttgaagtg

SEQ ID NO: 476895 - DNA, 1000 bp, Homo Sapiens
aaaaaaaggcaaaacaggctgaccactagcagctttccctagccagggagcaaggacaaaagggcaaccatgtgcttctcctccaaggcgtttgcttccttgctgaggagccaagtgaataccccagacatgagcagaataagggaggtgcggggaacagaggatggcggaggagggaacacacaagcaggagcccatgcagctgggagccactgagatcccagctggaggaagagtgccctggcactgaggtctaatggctgtccagctgctgccccaggatgtgagggcaggtggtgatggagggagaaatggaaaagagggggagggaagtccctccacaatccggcctgccaggatgaagggctcctcctggtgacctattccctacactgcagtcagaccaggctaagcaggagaccaccagtgccctcctctctgctctgtgcccctgccctccaggcctgctggtcagaaaggcgacagctggggccccttcctcctgcagaatataaatgactcccccttcctaccagggctgggaatagacatcagatggcacagcccacgcaaactgccggctgtcagcacgcctgcccgcccgcccaccaccccccgcaccacctgggaggaggcagcacctcaggcaggctcaggctttacggcattgcctgcttgctcttagagcaagctggtgaactttgcctggccctcctaccctgcggcaggtagaaggagcctctcagcactggctgtgatgaggaaagaggagatgcagtccctggatcaaaatcaccgcaggtgaaattctccatgcagccccagtaaccgtttcttctgagttcacaccacactggagagtttgagaggagggaggacaatgaaagagacaggaacaatacccctctgcacagcaggggcctcctttagatgcttgtcctggagatgcaatctcccccaggaggggcataatgagttacgtggagaggacacttctgcc

SEQ ID NO: 476896 - DNA, 1000 bp, Homo Sapiens; identical to SEQ ID NO: 345165

SEQ ID NO: 476897 - DNA, 1000 bp, Homo Sapiens; identical to SEQ ID NO: 345166

SEQ ID NO: 476898 - DNA, 1000 bp, Homo Sapiens
ggctttgttttgttttgttttgttttgttttttaaaaaaagaaagaaaagaaaaagaaagaaagaaaagaggccagtagcctggtcagaattttcttttctgacagcatgcctcctattaggtggcctcacagggataatatccctgttacagaagcacagaattcaaatcctgcaccccttgtgtaaggcacggctgcatgaactaaagaaaattactacatctcccagagcctcagtttgcctacttgtcaaatgggatacaataacatttactggccatggctgctgggaaaattaagtgaggtgatgcatgcagagcacacggtggcagtaggtgctcaacagatgatggtcctcaggattcagctggtgcccttcccattcttcacctagtcaatggttgttgagttcactcaaagccatcagacatccacagtccgtctggcctggcctttcctgctatgtcatggcacacagagagcccattgtcactgtcacacccaactgtccttgtttctttgtcacaatgtccatcatcccctggctagtgcttgggcagaaatggtggctctcttgccagcctagtgcccctggcactgacatggcagctgacgttccgtcccccaagtcgcatccccccatcagctcagtggcacacttctgcagaaagtcctggagccgcagggtcctcaaaggacctcttcttgcaagagccagttcacgctccagccttggcacatcaagggctgctgcctgtgccgcctggctccaccccactcctccccaccacctgcctggcgggaaggctccgtcctcccatttgtcttcctggtggctgagattttctccactccacatccctctccctccaggagcaggatcctccccaaccccgcctccaagtccagatggcagtcagggatcaggacttctgcctccaagacgtcagtcagcctctactgtacacggctcacactgggcgccaaggacgtgcagct

SEQ ID NO: 476899 - DNA, 1000 bp, Homo Sapiens
aacattcaagctgagatttagtggggacacagccaaaccatatcattccaccccttgcgcctccaagtctcatatcctcacatttcaaaacctaccatgccttcccaatagtctcccagagtcttaactcatttcagcattaacccaaaagtccacagtccaaagtctcatctgagacaaggcaagtccctgcgcttatgagcctgtaaaatcaaaagcaagttagttacttcctagatacaatgggggtacaggtattgggtaaacacagccgtttcaaatgggagaaattggccaaaacaaaggggctacagggggcatgcaagtccaaagtccagcaggacagtcaaactttaaagctccaaaatgatcttctttaactccaggcctcacatccaggttacactgatgcaagaggtgggttcccatggtcttgggcagctccaccctgtggctttggagggtacagcctccctctcggctgctttcacaggctggtgttgagtgtctgcggcttttccaggtgcatgatccaagctgtcagtggaactaccattctggggtctggaggacagtggccctcttctcacagctccacctggcagcactccattagggactctgtgtggggcctctaaccccacatttcccttctgcactgccctagcagaggttctccatgagggccctgcacctgcagcaaacttttgcctgggcatccaggagtttccatatatcttctgaaatataggcggaggttcccaaacctcaattcttgacttctgtgcacctgcaggctcaacaccacatggaagctactgagacttggggcttccaccctctgaagtcacatcctgagctgtacattggcccctttcagccacagttggagcagttgggacccacggcaccaagtccctcggctgcacacagcatgaggaccctgggcccagcccacgaaactgctttttcctcctgggcctctgggcctgtgatggga

SEQ ID NO: 476900 - DNA, 1000 bp, Homo Sapiens; identical to SEQ ID NO: 345167

SEQ ID NO: 476901 - DNA, 1000 bp, Homo Sapiens
tttttttttttttttgcagacaaatgtttttaataagatcaaatatttaactatacaactggacaatttaactatacaaactgggagacatggagaaaaagcaagccttcccgaaatgcctcttttcagaggaagggcaggaagaagggcagggaggagagggccagcagggcgaaggcaagggttctgaaatcaacagctgctggggtggcagggagcacagagggaagatctgggggcgggcagacgaggggtgtgggggctgcatgtttgataacgtggtgtcagggccccacgttgaggtagagcaaggatgagcaagtgaaagtagatacgtgggcttgtgtctccggaggtgggtagcagagcccagattcttaggagccaaaggggccagcagactgggtgacctcgagggcgaaggagaccctactgcagctgccgcaggaaggcgttgtcgcctcccagaagtcccagatggcggatggggcgggctggaccagcacggaaggccaagcatcatcacaaaaactgaggctccaggggccgaggctcggcttcagaggccctggcctgggcacgaaggaagcaaccgctccatttttgctcaggggcttgaaggcagagggccggggctgcaggttccgcctgccacccttgctgtctgagacctcgaaccacaacggcccgtcgaacctagcgcttcccttggggcactggctgagcgcccccagcagagtctcccgggtgcaggggtccaggagctcctgggcggcggggcggcctgcggggcgggctctctgtccaggggatctccaggggctctcctgacgctcagggggcgcgatcccgatggtcaccgggctccaggtccgtcctgggttccaggcacgacacagcccccctttcatgcaaccctcccaggcacaggagaggtctcgccccagagcggtctccccgggaagggcagggcgcctccagccctcggagaccacccgct

SEQ ID NO: 476902 - DNA, 1000 bp, Homo Sapiens; identical to SEQ ID NO: 345168

SEQ ID NO: 476903 - DNA, 1000 bp, Homo Sapiens; identical to SEQ ID NO: 161099

SEQ ID NO: 476904 - DNA, 1000 bp, Homo Sapiens; identical to SEQ ID NO: 345170

SEQ ID NO: 476905 - DNA, 1000 bp, Homo Sapiens; identical to SEQ ID NO: 345172

SEQ ID NO: 476906 - DNA, 1000 bp, Homo Sapiens
ttttttttttttttttttacactttaaatgtctggtttattatacataaatgctatgtcagaaaaagttgtttataaaaggactagccttaggagtcactaaaatgagacattatgagtattatttattgagccttaaagtaagatttaaatatgattaattccacaagtgaaaaggtaagtctacctgtaagtttcttcaaggtgagatgtgggtgaaatatgatcatgagaaagcttttcaacaggggaagaagaagtgatatcagtgcattttagtaatattagcattcatataagattggtatcgctttattaatgtggaatgtacaggcagtaaaacaggttatttaattagttgaaattatctaaaatagatcttaagagttcacttagaacacttttctggactgcctttcaaagtagataacatcagacacagtgataacataataactcattcaaaactaaattgtacatcacctatgatatcaacattttgtattcactgaaggaaattatatttgaaagtgtttgcctgtacattatttgacaaagttgtggggattttttgttttttgtttgtttgttttctgtttttgtttttgtttttcagatggaatctcactctgtcacccaggttggagtgcagtggcacaatctcggctcactgcaacctccaccccctgggttcaagcgattctcccgcctcagcctcccaagtagctgggactacaggcatgcaccaccacgcccagctaatttctgtattttcagcagagaaggggtttcgccatgccggccaggctggtctcgaactcctgacctcaggtgatccacctgcctcggcctcccaaagtgctagggttacaggcaagaaattgtgttattttttaaatttgccatgctcagatattggataccagggtgatttcttgggaaatctaatatgaggaatgaagcattaattataagacctgattttaaatgctacgtaccaa

SEQ ID NO: 476907 - DNA, 1000 bp, Homo Sapiens
cactccttagttatttttactttatacatcttgatggtagtttcatatcagaatataaacagcttccttagtcttattttagaatacactgtagagtatgctctgtatggatggacagcaattacatccgtaatcaatctagcctgtcccttactgatggacacttcgggtgtttccactctttcactcttgcaaacaatgctagaatgaatgaccttgtatatatataggttgagagcagatttacttaggcagaggtggatggggaggccggaggcactccagaggggaaagaagccctgggaggggcctgattacctgttcccagcctgtcctatcccatcttcccctatttctgtgccattctggcctcctcctcctgtttcctcttctctatcctgagctcctggtatcgccagagaggaagggccagactttggtgtcctgaaggactgggcttcggctggcactggtgggaggatgaggatgccttggagaggaggatcttggggacttggggcctggggctggtgctatccctgggttgtagccactgaaggcacttgctcaatatgccctgagggctctggtaggggacgaagacccacggggacctctggggactccctggcggggactggggaaccaggggagggggcggggcagtacctaacagctctggcacggacttgcttcgggtgcccagcgaaggtggatggtcagggcacagagtgtggcaggcagtggtgacgaagggactggccaggctggttgtggcagtcacaaggtggtccagaacacccccctcctgaggagacggggcaaaggggaggctcaaggtagcctgcagccgttctaggagtgaaggggcaacctgggcctgggcctgggcctgggccacgagcccggacaaggccggccactcgggcttgtagtgccggctaagctgctccacttggggccgcctcagcagctgccgaatcctccacacggtgtcgaa

SEQ ID NO: 476908 - DNA, 1000 bp, Homo Sapiens; identical to SEQ ID NO: 345173

SEQ ID NO: 476909 - DNA, 1000 bp, Homo Sapiens; identical to SEQ ID NO: 345174

SEQ ID NO: 476910 - DNA, 1000 bp, Homo Sapiens; identical to SEQ ID NO: 345176

SEQ ID NO: 476911 - DNA, 1000 bp, Homo Sapiens
ttttttttttttttttttatcttttactccacgcctctatcagggtgcgtaggggggtggcttctcccccgggggaaagtaggtgggtgcgtagcacggtggagcctggccgggaagcccagagccagagctgcttggagaagggggctgcaggtcctcagacgaagccagggcagaggagggcgcaactgggaagcggctgcagggctgaaggggcagagggtaggacgagcaggtcgggacgggctcgggcgtcaggcggaagcctgcgtaggccaggatctgctgggcggggttgtagagggtctgtggtgggacggctgggccataggccagctgggacagaggcaccatgtccttgaaggcccccaggacggcggcggtgatgatgcccaggaacaggcccaggacgttcagaactgcagaggcccagagcaggcggtacaggtgcagcacgtcctggcagccgctgacgccgatgaactcatagtaggcgggcgagggctctgcgctcccgcaggcatagaggtcacagcagtaacaggtgttgcttctcaccttcagctggcacttgccgtccagggagtgacaggtgacctctgtctggtagacatcgtacaagtaccccaccccactggagtaaaactggcatcttcccgtggtgaggggcctcggttcaatgtgctgtgctgcaaatacgccgtccacgatggcgcagcagaaggcggccaccacgccaaaactgataaacacgatcgctgccaccagcatttgccttctattctccaccaagttgatgccaataattcctaagaaagatccaaagccgagaatgatccctgggtagtagcccccaacggtcacattctccgtcctggtggtggcagccagcccgacggtgactatgaggacggacaccagcagcagagaccccacaaaccagagcgacgtcttcttcctcctcgaaagcccttctgcggggtccagcaggcccaggggc

SEQ ID NO: 476912 - DNA, 1000 bp, Homo Sapiens
ttttttttttttttttttttttttttgaataaataaattgtgctttattcatataataggaaacttctcaacaattacggtaatgaacacggattaacctccagaacatgacgagtgaaagaaaccaggcagaagagagttcctactgaataatcccgttgattcgaagttttaaaacagttaaagtctctgtaatactagaaatatgaacatctgttgcctccagaaggtgggttgactggaaaggcacacacaaaaactttctgggtgttagaagtattctgtcttcagattgttttaaagttatcatggtcttttccctccattttaaagaaatcaaaaataaggataattaagagagttagatgaatgaaaaatgacttggaatttaaaatcttcagacacagtctcattagtgaatgaaagacaatttgtgttgtaagctgaaatacatttaaaagggattataatttgcctcaatggtataataaaattttgtgtcaaacatgcacaaaatgtgaaaaatcaaaattaatttcattaatataaaaacatatttccaaattcttcttaatgtaattctttattgcataaagtttcttgtaatcatataagtaaaacaataaataagtaaaataataaaccataaataaataaaacaaatgagcaataaataaaacaagcaagcaactagatttgtcaggtgactgggtggggagatgctcttcagtggcttgagatccttggtgcatgtataaatctggtccaatcaggaaagatagaccatataataatttgaacagaaaatgctttttataattataggaaaatttaatattaatataaaaaattattaattataacaggatttagagtaacaaggaaataggtaatacaaagaaaagaaaactctgctattcctattcctgtaggaatagcagatataaggtgcagtccctactcctagggctgggtacaacaccccaagaagggaccccta

SEQ ID NO: 476913 - DNA, 1000 bp, Homo Sapiens; identical to SEQ ID NO: 345177

SEQ ID NO: 476914 - DNA, 1000 bp, Homo Sapiens
ttttttttttttctttttttttttttttttgtaggaaaacaaagatattattgagatacaacagggacagtctaaaacagcatcagaaagcaagttcatgctgttcaacattagcaggcaagggaaatagggaaagaaatacgcaaacgtggctatcacagaaaagccagcttattactttaggttctgtgggagactacaggtcacataaaagcagtctcaacaataatgtgaccacatgtgcaatcaacatttacaaaatgaaattatatatcatgtataacacaaatgttttgcctatactttaatttacaaagccacataccgaatgactgaaatgtacataaacattcttttatgatagaccagaacatctatattatcatgacttagaaaaagaaaacagatgcaaaatagtgttgagaatttctggcctgaaattacaagactaagtgtgtgtgtgcatgcgtgtgtacatatatttaaatcgttttattctcatttgatccttttggctgaactttattcatatattatctgcccttcttcttataatctctctcatgaaagatatcattatccagtcattgaagccaaacccccttcaccagcccccaatctctagacatcaagggttaacaagacatcttcctaaatttctccggaattaagctcttctctgttagaatttcctttccaagtccatttcttcataaatctggcatgtgaaatttgaattgctctgccgcagttttctcttctttagtcagtggtgacagctccaggtctgtttgcttctgtagtttttgtatcatattcatagtctttttcacagtagcacaaatgcggctcttactctctttctgctcaacagcaactggtttaaagcgggcatacaaagtttgatatcgagactttatcactgacaattcctttaagagtgtaactggatttttctcacttgctgaatcaggatgattagtcttgatttcatattcca

SEQ ID NO: 476915 - DNA, 1000 bp, Homo Sapiens; identical to SEQ ID NO: 345178

SEQ ID NO: 476916 - DNA, 1000 bp, Homo Sapiens
ggacataatgacatacattatcagaagttttcaatacagaggatcttttaaaaccagagttttaggtgactttttaaaaattacaactttgattaaaatggcaagtgtttcatgacacagagaacattaaaatttttaccacacatgaactagataccttccctctgtctctgctattgctgatagtactaaaatagttaagttatacctaagtgttttaaatttcaagtgctttggaatcttagttttaatctctggcataaaggaagagggctatccaaacaagtaccagagttgttttctttcttatgacattgtagagaactcagagaactttttgttgaatctgggaaacagctttcttcattttcagctgtttcataagatctgacacactgttcagtttctttaatatgtatcttagggctactcaacttgttatggccactttctttgaaatgggatgaattatgcttttgagaactgtgcttcattctttgagttgtgtacttagctttcccaaacactggggcactttgttcatcagaggaatgtctgtcaaggcaaacactcttcttcattaaaattttccgagtggtttgcatatcaacttttctactatgatctaaagcagtatttggtggtctaacattgcaggtctttaccactgtgttactgacagaataagggacagaagtattgactttatagtcttcttgaagcagctggtctccttttagaattttagagtctctggattcattttgcaagggaattcctggaagatcctttgaaagatgtgatgtacaatcagaaccactgttagcaatacaagattcttttacactaagtatggacaaagttttcaggttgacatctggttgtagattatcctgaggatatgataattttataaatattcgttcctttaaaggcaaatcctgaagacataaatcagtaatgccagaaagtagatgctcctcaggactaatcccatcag

SEQ ID NO: 476917 - DNA, 1000 bp, Homo Sapiens; identical to SEQ ID NO: 345179

SEQ ID NO: 476918 - DNA, 1000 bp, Homo Sapiens; identical to SEQ ID NO: 161101

SEQ ID NO: 476919 - DNA, 1000 bp, Homo Sapiens
gagacagagtcttgctctgttgcccaggctggagtacagtggcgtgatctcagctcacagcaacctccacctcccatgttcaagccattctcatgcctcagtctccagagtagctgggattgcaggtgtgcaccaccatgcctggataaggacttctgattttttaaaaagttttatatcagatttggaacatgactccaaatataatctcatttgtaaaataaattattttttctttttataacccctcctgggaatgtaatatgctgctagtttaaggtctaaattaatttggtttctacgcattgaaagtttatggccaggcgcagtggcccacgcctgtaatcccagcactttgggaggccgaggtgggcggatcacctgaggttaggagttcgagaccagcctggccaacatggtgaaaccccgtctctactaaaaatacaaaaaattagctgggcgtggtggtgcatacctgtggtcccagctactcaggaggctgaggcaggagaatcgctcgaacccaggtggcagaggttgcagtgagccaagatcgtaccactgcacttcagcctgggtgacagagtgagactcagtctcaaaaacaaaacaaaacaaaaatttatgtataagctttctctccactatgaataatttgatattgaatgggataaaaaggtctgaccaaaaaatctcctacatttatatatttatctgatttcccccaccataagttatgtgctgctaaatgaaggactgtggcgaacagtttgctcacatttatattcacataatttctcccgagtatggattttcctgtgttgattaaggtgtgcactctggctaaaggctttcccacattcattacatttatagggtttctctcctgtatgagttctttcatgttgattcagatgtgtcctctgactgaaggctttgccacagaaaccacattcgtaaggtttctctccggtatgaagtctatgatgttcagtaaggg

SEQ ID NO: 476920 - DNA, 1000 bp, Homo Sapiens; identical to SEQ ID NO: 345181

SEQ ID NO: 476921 - DNA, 1000 bp, Homo Sapiens; identical to SEQ ID NO: 161102

SEQ ID NO: 476922 - DNA, 1000 bp, Homo Sapiens; identical to SEQ ID NO: 161103

SEQ ID NO: 476923 - DNA, 1000 bp, Homo Sapiens; identical to SEQ ID NO: 161104

SEQ ID NO: 476924 - DNA, 783 bp, Homo Sapiens
ctagctccctggccgtggctgcctgagcactgagtacacgtcgtccacacggctgagttgctcgaagaaggggaggaggtcgtggagctctgtgtcactcatgttgtcaaaccacgaggccaccggtacagcattgtctggatggaagacataggaggcaggtgaattgtccaggatgagcacccgccgcaggtctcgacccaaccggctcaggtccttcacgtagttcccccggtggaagacgcaggactctcgaaacagccgggcccggaaggccccccatttgtccagcaggtcagctactgggtctgcgtacttggcgaggctagcagtgaacagcacacattcaaagagctcgcccattcgctgcaggaactcatccacatgaggacgcttcaacacgtagacctggtggaccaccccatcaatctccacagggatgatgaagtccgcgttgttcactggcttgaaggagctgtgcaccagggtctcgtccaggtcgatgaccacgcagatcttgtctgagtcctgggccttggcctcagggagcaggtattggactggggtcttagggatggcgccattctcctccacaagcaggggcgccccgctgtgagcaggcagggcctccccatcatcccggcagacacagcagaagagtgagtggaggatgccccggcttcggggcttctgggaagctgctgacttctggtcacctttgccccgcagcgggccccgagcctcctccttgctgatctgagtaatgacggccgagctgtccat

SEQ ID NO: 476925 - DNA, 1000 bp, Homo Sapiens; identical to SEQ ID NO: 161105

SEQ ID NO: 476926 - DNA, 1000 bp, Homo Sapiens
aggctggtggccatgtctcagcctcaggatgccacggtcagcacaacagcattctctacgatctccagaactgaattggaaaaattgatattaagaaccttaggcaggggaattccaacatccagggccacgttaagctttggtgcatacactgccccgaccacatggctgagccattcttctaaacgcgatccgtcaaaggcatgggtaaaggaggaggccaccttgacactgagccgttccagggacagggagatgtgcagcttggtagccgagggagccagctgggcacgcacagtcatgacggagttcagctcaaagagggattcaggggtccccttagggacatagaacagcacatggatgttggctgggagggagaccaaggccttcttgttgtggagtgtgaccgtgggagcttccctcacccgcaggaacagtaggagttgctggtgcaggggcagcttccccagggcctcagggagcaaagctgccaggtctgtagttgtcagtgggacatcgctgggaaccagctcaggggtgatgtccatgtcgagggcgccgttggtctgcaggagtccaaacgtggtgttgaagaggtacagtggcaccatcacctgggatgtgtggtccttcttggggggcaccttggctggggcacgggacttggggaagtcaatgatatcaccagctacactcttcacgatagggttgatgtccagttctatgtactggttggagatgagaggcaatgtggccagagagaattccacggacccaagagccccaagggacaccaggcccagcacagcccccaggagctcattcaccacacccagcacactgtccaccacggggcacagcagtcccggaagcaccttgaagagcatctgttccacgaccccaaagagtggtgtgggcagcagccctgagaacaggctgatgtggcccaggagcgtgctgcagcgcttgaggataaggatgggtgtgccccttgagc

SEQ ID NO: 476927 - DNA, 1000 bp, Homo Sapiens
ttttttttttagatgtaaagtaggaactttatttctccattagcaatgtgtgttttacatactgtaattttgcttacatttttaaaagtttaccgggcatggtggctcacacctgtaatcccagcactttgggatgctgaggcaagcagaccacctgaggtcaggagttcaagacaagcctggccaacatggtgaaaccctgtctctacaaaaatacaaaaattagttgggcatgatggcaggtgcctgtaattccagctattcgggaggctgaggtgggagaatcgcttgaacccaggaggcggaggctgcagtgagctgagatcacaccattgcattccagctctcaatgattcctggaaggaggaagcctggtattgtgcgtatttggcaattgtagtatgagatctattgctttcacaacgccagattttctttgttccagtgggatcccagttttcatctgctggttgcagcaactgtgtcctcacttctaccatatgttcattgttagcttctaccaaagttttggtagagaaaagtccaagatctaatttaagagctccagcaaggccacgtattactgtaacagggttttttggatttgtacaaaattgatgtaatggaggaaagaaagcatcacgtttattttccaagtaaatactaggtgtgggtggattcaacttgtcctttggcaagggtgggtatggtgaagttggtggtcttggaggtggacatttatctaacaaaatgcagctattagacaagccatttttacctggattcctgcatgctttcagaacttctgttgaactggggcatatagacactgacattgatggtaagatctgagaagtagatctgtggctagctaaaggcaggtctacttttgtagagctctgtgacttccccagcccctctccattgactgtgtgtaatccactgtgaggactgttaaggctggtaacactgtttatgcttctctgctcagtggatttag

SEQ ID NO: 476928 - DNA, 1000 bp, Homo Sapiens; identical to SEQ ID NO: 161106

SEQ ID NO: 476929 - DNA, 1000 bp, Homo Sapiens; identical to SEQ ID NO: 345186

SEQ ID NO: 476930 - DNA, 1000 bp, Homo Sapiens; identical to SEQ ID NO: 161107

SEQ ID NO: 476931 - DNA, 1000 bp, Homo Sapiens; identical to SEQ ID NO: 158166

SEQ ID NO: 476932 - DNA, 1000 bp, Homo Sapiens; identical to SEQ ID NO: 345188

SEQ ID NO: 476933 - DNA, 1000 bp, Homo Sapiens
ttttttttttttttttttttttttttagcagggactcaatggtcatatgttttaatatggagtggcagaaaagcatgtccgaaaaaacacattgctttattttgagacaaagaacattgtataaaaaaactccagttgtagaaatcaggacagacacacagcaacttatatacagatactatacacgtgggccctgccctttaggctacactctaggcagaatgtacacatgggcactgcccttacagctacactctaagaacaggttggcacagcccccctgctggcacagctctggggagtgctgccccaggatgggagagaatgcagtacctggctacaaacttctctgtggcagctccacagatgaggtcttgctgggagatgctgggtcagcccaagcatgctgcctctcctgtacctggcttccaagcaagaaactgtttcttgcttttccttcagtcagttcatctgggcatcctggctctctcctggagggggcatctttgacaagctttgcccatccacgtggccccttccagctcagctcccactgtgccttaagggaccatgcctgcacagcttgtttctttggcttaaaggcaggaatggtgggaaaggactgtctccacttctttctccatccctccgaggtgaaggtggggatggcactgtcgggctggttggcctccttccggttgaaaaccttaatactgacccgttttgaggctgctaggtgatagcttatgcctgtggtgggagtggttcccagggctgggggctctgaaagtggccccaagacaggtttggagtgcctgtccctctcttcagcctgtccctctttaaggccaggtgtggcatacaccttcacggggtttgcagcagcagaagtggaaggagcagcacagtccaggcaagtgggaagaggcgtggggcagcactgtgaccgatgctatgtagaacccgcacctctgggtcatctgctgcaagtctcttctcc

SEQ ID NO: 476934 - DNA, 1000 bp, Homo Sapiens; identical to SEQ ID NO: 246609

SEQ ID NO: 476935 - DNA, 1000 bp, Homo Sapiens; identical to SEQ ID NO: 161109

SEQ ID NO: 476936 - DNA, 1000 bp, Homo Sapiens; identical to SEQ ID NO: 345193

SEQ ID NO: 476937 - DNA, 1000 bp, Homo Sapiens; identical to SEQ ID NO: 345195

SEQ ID NO: 476938 - DNA, 1000 bp, Homo Sapiens
acaccaccacacctggctaattttttattttttgtagagttggggtctcactatgttgcgcaggctggaacatagatcttacaggtttagaaagtgggccctggagcataatcgagtttggagtgtcacgggtttgagtctgactgccatccccgtttccctcacaaccccagaaaatgccaataagatggaaggttttcaaaatgtatctggaaccagggcatgggaaatgacgaatccacaaaagaaacaaactgccctcaggagcaagaggagtggaggccagacagaggactggagctacaggactagccttccaagctcccctccctcccacccctggggccagaatatcaggtgacttccacagacctcagaggtgagtgtggcgacagcagacacagtcagactggacacaggggtgctgactctgcatgtattctcctcttcccctccctgagctcaccccagccccagccaccatcagaaaaggacctgacttggcaacatttcagcccttctcatcatccagctgagactcctccagctccaccccttgccggctaccttttcttgatttcctcatcgataacgctcacaattttctgcagcctggactcgttcacaaagccatcacccctcttcttggaatggaccagtctcccgttcacaaacacctcaaactcccctgtagcctgggcagctctgtcctcctcaaagagtaggtgattcggaaattgctgctccaggctctttttcagtagaatgtaccgaaggctatagcttcagaggccacagtaggtcactcgaatcaggaccctcttgtccagcgcgaagttctcgctggaggaggggaaggtttccgtacaattctgtaaggagatggccgacgggatggtccccaggatgggcgaggggacaggactgggaatggggggatccgccagcccgatggccgacgggtctgccctgaaggtgaagtccagggtgggcccgggtg

SEQ ID NO: 476939 - DNA, 1000 bp, Homo Sapiens; identical to SEQ ID NO: 345221

SEQ ID NO: 476940 - DNA, 1000 bp, Homo Sapiens; identical to SEQ ID NO: 345199

SEQ ID NO: 476941 - DNA, 1000 bp, Homo Sapiens; identical to SEQ ID NO: 345200

SEQ ID NO: 476942 - DNA, 1000 bp, Homo Sapiens; identical to SEQ ID NO: 338265

SEQ ID NO: 476943 - DNA, 840 bp, Homo Sapiens; identical to SEQ ID NO: 345201

SEQ ID NO: 476944 - DNA, 1000 bp, Homo Sapiens; identical to SEQ ID NO: 345202

SEQ ID NO: 476945 - DNA, 1000 bp, Homo Sapiens; identical to SEQ ID NO: 345203

SEQ ID NO: 476946 - DNA, 1000 bp, Homo Sapiens
ttttttttttttttttcatgaacagaaagaaaagtcttttattagtactgtgtagggaaggctaaagaaatatacatttaattcagaataatttttaagaaaaaacgtggggttccaagaaatggtgatttacattcaaatgaacatgtacatttgcaaacctggataagtagatattttcatgaagcacgctacaagaaaattcacacagaattatttgtttttcaaaggcctctttcaaagtacagactccaagtccaaagcaaatacccatggcatgaacaaataggatgcctaagattctaacatttgcttcggcatggctttcctcctcacttccctacctcacaacaagaaaaaatttcctagatgggacaatggcaagatattgtgctaatacatttcataggatttctagatgctgggctataacatccaggttacaatttggtgacggatttttttatttctattgcaaatggactacactccaaacacaaaaagattcttgccatagcatccaaacatccctatgtagacccacacttcctctcaatacagaaagagaatcactcagaaaggacaaagctggcagaccaagaaaggaggcaagggtaaactctgtcactggccaattatctaaaacaaaaatagcagcctctgttatcaaagttgtcagttaaaactgtcagctgtcaggcacagtgacacacacctgtaatcccaacactttgggagcccaaggtgggtggatcgcttgagcccaggagtttgagacaagactgggcaacacagagaaaccccatctctacaaaaaatacaaaacttagccaggtgtggtggtgtgtgcctgtagtcccagctgctcaggaggataaggtgagaggaacacttgagcccaggaggtaggggttgaagtgaaccatgatcatgccactgcactccggcctgggtgacaaagggagactctgtccaaaaaaaaaaaataaaaataagtcgc

SEQ ID NO: 476947 - DNA, 1000 bp, Homo Sapiens; identical to SEQ ID NO: 161114

SEQ ID NO: 476948 - DNA, 1000 bp, Homo Sapiens
tttttttttttaaggtttgaaacacaacctttattacgtatgatgtttacatgttagactgagtgctggtccctcatctgcttcataccttgggcagcctgtctgctactatctccatggctctttcttctccctcttgcaagagaaggccacaccatcttccagtatcttctggcccataagtctcagctgtcctttggagaatgaaacacacagcctggacattggctccaggatctcctcaggccaaggtcttcttctgtgggctgcccctcctcctcctttgcttctggtttctcttcctcctccttctcatttccattttcctcctcctgctcatcttggggcagctgaagccctctctgatcccaaactgcacatgctcctggagggcttccatggtggtgaacacccggcagcaggccatgcacctgaagccgttctccatggtcaccagccagtcaggagtcttggctctgggtgtgtcctcaacggtgggtgagcctggcaggctgtctgattctgtcctttcctcatgctctttctcctccccactgggctcactgtcagacaggaggtttctggtggacacatcagaggggggagtacctaccctcacaacctcagaaagggtcacttcttccatccttggctgcttttctaaggactccaaagtttcctctgtctcccaggagacagccacacctttgttcatttgtacctgcatgtagtatattttcatgcccctttcctctttgtttacacacagagaggacacacaagtcttataggatgaataggacgacaaggagacatgttgtgagcggggaggagtctctcctcgttcctgaacctgggccaggggtgattgaggctgggggctgtctcgatgtattctctggattcctcctcccttctcagcggtttcctgggactcttcattttccaaatgtttcctcttttgtcgtcgtttcatgatatcagctagaagagtttctag

SEQ ID NO: 476949 - DNA, 1000 bp, Homo Sapiens
cctttctaagaacaaagcagcctaatacttgtatttgaaacatacacaaaaatacatatttgaggataaaacccatcttggttatcagttaggctgtgctttcatcaggaaaaaaaaactggttttgagcatgaagaaaattaatataatgcttttctgagattctttctttcctacacacacacacacacacacacagacacacacacacagacacacacacacagacacacagagacacacacagacacacacagacacacacacacacacacaccattacctcattttccctcccatcaaaaacacacgctttgtttctatacttcctcagaagtggagaatgcagttactctcaaaacctccaaagaatttactagtattaaaactccagttaattctctccagtgtttagtcacagggtttttcattctgtccaaagctgactgaaggtcttgtaacacatctgtgtagttatttccatagtgagcactccaggtatacagaaaatcataggcaggtttccacatcatctcaacagcaacatctccagtgtttcctcgatgaggaatttcatatgcctccatttgttgctttgtgagtcgtactaacttttcagctagttccctccagccttttccaagcttgacagctgaagtcagaacagcagcttcttggatgagacgtgcgactaactcttggcaatccattttcagaagagccacaataagttcatacagaaacttccttgtatttctctctgtgtggcaatcttcctttaacttctttataacataagaaactttctctgattctttgtctgcttgaatttgatcaaaatcttccagggacagatgtgagtaacccaggacatcagctaaaactttccaatcataaactttttctgacaccaaggttaatacaactgagtagatataagtcaatttttttaaaggcaggacaatctgttcaagaagatttctggttgtaaagacactat

SEQ ID NO: 476950 - DNA, 1000 bp, Homo Sapiens; identical to SEQ ID NO: 161115

SEQ ID NO: 476951 - DNA, 1000 bp, Homo Sapiens; identical to SEQ ID NO: 345207

SEQ ID NO: 476952 - DNA, 1000 bp, Homo Sapiens
tttttttttttgtacaccttagatatatactttatttgctttcactatatttatatacatcaaaacagcatgttgtacaccttagatgtatacttttttttttaagagcccccatggcaagagagtgagagaagaagaatggtgctatttggcaatacattattgtgttacggttaaagtctggcaggttaagtattaaagattagggtaccatataaaaatattgcctcaacacaaaaataaacaaaatttttattagttcagcctctgaaataaggaagcacatttgtgaatattcatacataaaatgctgtccaaaataaattattcacagaaataggtaagatatagaagagagaatatagaatgctgtcatttatgtaatatattgtatttccagaaggatacagaagaaactggcaatggtgattgcctttaaagatggagaatggatggccaggagaaatgttggatgagaacttacttcacactgaattgtcataattttttagttttgtataatgtgcatatactgcctatttataaaatattaaacattttaaagggatacaaacacaatattcatgaatatattttaaaagactaaaaatttatgcaccagtggatttaatactttaaatgctgtgataccatttattaacatctatctatagcagagcgagaatactggctgaaataaatcaattgatatggcatgtgtattacctcacttattttgctgctatatccatcattgttttaaaaatgtaactgatctggtggtaggataaatgaaagatttttaactagaggacactcagtgaggttcctctgctctatccaatttcatatatacaacagttttatttaaaaatcatagtcttttatactttgcagacaatattgaatcagcaagcagtcaattgtacacatggtttcttgggaggctgtaagtactttttcaagaatcataagactacataagaacaccattgaacca

SEQ ID NO: 476953 - DNA, 1000 bp, Homo Sapiens; identical to SEQ ID NO: 345208

SEQ ID NO: 476954 - DNA, 1000 bp, Homo Sapiens; identical to SEQ ID NO: 161116

SEQ ID NO: 476955 - DNA, 1000 bp, Homo Sapiens
tttttttttttttttttttcctgaccaggcaactttattgtgaccccgaggtggggctcttcactgggggcctcctgaaagtggagagttgggggtgaggggctctcatgttgcccccgcaacacccctgttgcattcagacacaggtggaggggctggacaggggcaccctgtgcctgcagcacagcccagggaaggcccactttgcaccgtgccccccaaggcgtggctcctcatttcttgaatcctggcttcttggctctggctgtggctttggcctttttcacagggctcttgtctctaacgctggctcttatttcctcttcttctttttccagcttttttttcttagccacgctcgcctgcttctggggcaccagccttttgacttgtttgacagggctttgctcctccagagatatatctgcatcctcatcctcatcatcttcctcttcctcttcctcctcctccccttcttcttcctcctcctcctcccaggttaggtctgatgcttcataacgttcctggccactgaggaacacgggtcctgagccagcccggagctggaaagtaactgggggagaaagctgcactcctaccatggagaccatggggaggactgaggcctggagtgaggcaatggtgaccggctgcatcttcttgtcctcctggtttgctgggggcaggatctccacgcgatgcatctcctctttggctttctcccccaagcaaatcgtatgaagcaacagcctgcagctctgcttcccctccagctggggtctgaaggtccaagtccgcctctcctgactgagctcgcagccccagagcacggtcgtcactgccttttcctccgtgctactggcgctactgagattcatggctccgggcagagaagcgggctggccgggcagctcctagcggggtgcgcagcccggggctcgaccgggcgcgtacaggacagcgggactcacgggagagggagctgtccaccgagctcagg

SEQ ID NO: 476956 - DNA, 1000 bp, Homo Sapiens; identical to SEQ ID NO: 345211

SEQ ID NO: 476957 - DNA, 1000 bp, Homo Sapiens; identical to SEQ ID NO: 161118

SEQ ID NO: 476958 - DNA, 1000 bp, Homo Sapiens; identical to SEQ ID NO: 345213

SEQ ID NO: 476959 - DNA, 1000 bp, Homo Sapiens; identical to SEQ ID NO: 345214

SEQ ID NO: 476960 - DNA, 1000 bp, Homo Sapiens; identical to SEQ ID NO: 345215

SEQ ID NO: 476961 - DNA, 1000 bp, Homo Sapiens; identical to SEQ ID NO: 161120

SEQ ID NO: 476962 - DNA, 1000 bp, Homo Sapiens
ggcccgctgctgctcatcagctggggatcctcggccgcgtggctgccccctccccggccctcgcgctacctgcagccgcaggcctccaccaccatgtcctcgtattgcttgtagacaacgttgttggcggcgtcgatgtagaggatgctgatggggctgaggcgcgctggcacacagcaggaggccggcgccgcgtctggtgccatggagttgagcagcgtctgaatgatggcatggttggtgggctcgaggtgcgaacgcaaagggaagtcgcaaaggccctcgcagtggtacgcctcgtagtccagcggcgcgatgatccagtcgtcccagccgagctccttgaagtccacgtgcaacggcttgcggctgcagcggctccggcccctgcgcccgtggccccggcccgcgcccccgccgctgccctgcgctgtccgcgtcccggccaacgccgtcctcctccgtctgcggccgccaatgactgcccttggcgacgcggtgccggttcctgggtcgggcagcggctctgaggccagagcggccccgagcgcgcgggcctgggcgcggatctcccggaataagctctctttcctctgcgtgcgggaggagacgactagcaccgcgcgctcctctgccgcagagccccctccgcccggccagccgaagcccagccgccgcagtgccaacgggctcggcaccgggcctgccactgcgcgcagcaagaggcagaacgcgcggggggggcgcggttcacgacggtggcgcctcatggcgtccgccacgtcgaacgcctcccagcgctgaccgactaggggctcagctgcccgcgagtacagcaggcgtggcgctcgggcggcgcccgggcacgtggacagcagcagcaacggcggagaagtccagctgcctgggcccgactctggagatccccggcgcagcacgcgcagctcggcacccaccacctcgtctgcgtcgttaaggctggacacgtcgaacaggaagc

SEQ ID NO: 476963 - DNA, 1000 bp, Homo Sapiens
tttttttttttttttttttttaccttacctggaaagaggctttattgaacatagctgtaaaattatattttaagttgaattactgaatttgcacaaacatttctacagaattgttttaaaaaacaagctttgtcattttccactacattttgttgtgcttttatattaatatttgcaaatgctataatttaatacttatattccaattgcttgcataatcagtttttttaatcctggggtgttgaaagaacatataataataatattcttcttagacaaaagtctttttaaatgaagttaaaagctgagataatttaaggaaaatgatcttcaaattttcataaccaacaggtttaagtgaaatttacaatgcattggaaaactggctggttaaagatatgatttgtcgtcaggtagctcaaaattatttttacaggtttttgtttttttgtaaaagtgtttttataatcttggtaaaataataaaataatatttcacaatttgcacagagtctgactaaagggcagaggcatattaccctcagagtttagaataaagccagatttttcaggcccagttccactgtagagttagtatgcactgcaatcccaaacattttcttgttccctctaaagctagggccaatttcatttcaaatggaggttagagtaaaaaaatcacttttgtgttttaccaccttctgcactaagtattcttaataaccttttgctctggttgacccatttaataacctggaagaaaaaaagtgttgctccatgtctggtctcaatggaagtgattttctaatggacaataagccgaaaggccatggctgtctaggaggttaaacaacaaatatcttgtctgcatgggcttacgcagcagcttcggtcctttcttcttcagaagcggctttgttgtcttgcctgtaatttgcacatttaggctctgtagtttgtttataaaatagttttacacaaaccactcttagcagtgcaag

SEQ ID NO: 476964 - DNA, 1000 bp, Homo Sapiens
ttttttttttttttttcttttttttttgacctctctagacaccttttattgtctttgctgccccctcagctttccttctggtacctagtggatgtcttcacgacagtctctggcctcttttcctttgtgggcagactcacttcaatgtctgtgaggtcaacccagggagggggtttagtgcctccagtaagagacgggcagagactttggctttcccatccaccgagacggtgctcacaaaatgctccagagcttccccatcgcagctgttcccggctgggttgggctctgtcaccatgaagtgcttctcacggcattgtcctgccatcgtagtcactgtctcaaccatctgaacacaggatggctcctggcctcctttcttgacatgaatgaggcatcaggaagcctttgctcctgagaagattctgggctgaagatgtccagagacagcactcaaaggaaaaaaaaaaaaaaaaggacgcttggagctctctgggatggtgcctcccaagtagttgggattacaggtgcccaggcatggggatccatttacaccgccctctaatgttctcactagacctagtccctgtgtgccgggggcatccctggctgctcctgatgatccttctctggtgacagtcacttagtctggactccttgggggagctgagagtcgtgaaggtgctccgtgtgcaccgtggctgtcttgctagtgcttctgcgggcagtgacaatgatggacagagtgtggtgctgcttggccaggatgaagtttcatgtggatgtggcactccacgcatggtgctcactgcagatggttcttgatatggacagtcccaaccatggttgcagcttgtttcttctgagctcatcgtggctggtgttggttgcagatggcattcatcatttaggatggtttcatcatggaaggttctaactcgtgacagttcttaatatcgtcagcgtttgccatcgagaacatctgtcgccactgatgagt

SEQ ID NO: 476965 - DNA, 1000 bp, Homo Sapiens; identical to SEQ ID NO: 345218

SEQ ID NO: 476966 - DNA, 1000 bp, Homo Sapiens; identical to SEQ ID NO: 345219

SEQ ID NO: 476967 - DNA, 1000 bp, Homo Sapiens
aaaaaaaaaaaaaaagttttttttttttgaaccactgctaacaatcactaatgttcactaaaacactaggcttcaggagcatttggaaataattcctgaccgcacaaagaaacatgctggtgagagacagtgaccaagcccaggagaccaccatgagttccagaaaaagtgagagagagcggccacttttcctgtctcggagatacctcctactcaggacgcaggaagcatggggcagggcagcgccatggacaaggcgactcggtgcagggcctgcgggacctgaaagtcaccggggagattttccccatgagggcgtacgccgtgacgctctgaaggtggaacaggactccgtctgtcagaagcagcagcaccacgtcctggttgtagctgaagctcttcccgctcctcccgatcactgggacgtcctgtgtactcccccagaatcatccgagacatgatcaccgtgaagatgggggcggagctcttcaccgtctcagcaaacgaaaccgccacatttttcaggctgaccaaacccaaaaccacagttgcaaacctcatcagacccacaaacagcatcgtcataaggaagttgggtgggtaggaaagccgggccttgtgctgatataaacagcaaggaacgagggttttcacacacccgataaccgtggtggacagcatctgcaccgcacctagcatgctgggctcgcctcccagcagggacaggatgtacttgttgaggaagagcgtgcagaagctgaagaagaaccacagcgtgaggtagagcagcgcccgcgagctccacacacccaagtctgactcgatgaccgtggtctccgtgatggtgacggtcagtacgttctcatctgtgccgccgtcgctcttggcaaaaacaatcttctcacttcggtgaccaaacagagagccccagctgagaggcgacctgcctttcggcttctcttcggagccaggaaccagctcttccagtgctggggttttc

SEQ ID NO: 476968 - DNA, 1000 bp, Homo Sapiens
tttttttttttttttctttatgcctctttattcccaatctcgtcagcactttataaaatcagactggagggagagaggactgagaaggctcccttcccaccctccaagctcagccgaagtctggaaggtctcctgccccctccctatagaagggactctaggggtggggctggtgcagggggaactgggagctgggccaggcctgctgggccatcctctccccctgccaagaggggagctgggcctggagaggggcaggaagtaggaccagcccagcactcctgagtcctggggctctccctatcctgctgacattggggctgggaccctggctgtccctaaatcacccacccctgtagccctacccaccttctacatctgtatcccctccccccacccggctttccctaaatatttacaaatgtacagagggctccccctccccggctgggatgggctctatcctccccctccctctccttccttcccttcctctccgtgagggcccatggcctggtctccagccctcccggggcaccagcctggggataaggggtgtggacaagaaggacctttgtgcaaagcagctgacatcagggcaggggaggatgagagcaggaactgagtcctggccctcccagtgagcaccgcccccaggcctctcccaggagcaggagaatgtgctggggatcccaggaggggtcccagactcctgggtcctttcagtcacagcaccgtcctagcaagcaaaatcttcaaagagacctcctgggggaccgtgggggtggtggtgattggggagcagactgctgacccccccaccctccgctcggcccaggctcgggcagggactctgttccttcagctcctgaagccccaaagtggagatgcccccagtggaggtccgcaggggggtcttgggacgcctccatacccgcttcagtcgatcccaggacacctcatagatgtagtcgaggatctccagcaacgtgaggatgct

SEQ ID NO: 476969 - DNA, 1000 bp, Homo Sapiens; identical to SEQ ID NO: 345220

SEQ ID NO: 476970 - DNA, 1000 bp, Homo Sapiens; identical to SEQ ID NO: 345220

SEQ ID NO: 476971 - DNA, 1000 bp, Homo Sapiens; identical to SEQ ID NO: 345221

SEQ ID NO: 476972 - DNA, 1000 bp, Homo Sapiens; identical to SEQ ID NO: 345222

SEQ ID NO: 476973 - DNA, 1000 bp, Homo Sapiens; identical to SEQ ID NO: 343908

SEQ ID NO: 476974 - DNA, 1000 bp, Homo Sapiens; identical to SEQ ID NO: 345224

SEQ ID NO: 476975 - DNA, 1000 bp, Homo Sapiens
ttttttttttttttttctttttttttgaaagtccaaactagaaagttattttatcctgtccctgcatataagacagtgaattaaaacccaaagtgctctgtggagatgagcaaggttgtccttggaggatgctcctcccaacatgcaggccaaatgtgttctctgtgctgggtcccagcattggagtagagggggctgcagctctgggcaggtggttgagcagctccactacagtaggtgggagttgctggtcttgtcctttaaggtactggcgatgaggttctattttctatgtgcctgctggaggcccatcatggttttcaagtaattatgcttctgctctatcttgactttggcattgtagaaggagatggaatcagggccctcaggaagcaccctctgctgcagctggctgaatttgtcctggtcatcttctcccagagacacaatcctgttcacagggaccatgcctggccggatgctgccgcctggcttcagtgccatctgcatgtcctcagggatgacaaaggactcattgtaccagatgtcaaattccatgagcaggcggtggcgacactgatccactaggtgctggcaatactggatctcagccctgaggtcacgcaggtcctggtactcgctgcggtactgcttcttgaggtctttgagcttgaggatcagcaggaattcttcctcatcgatgatcatcagccccttgttttcgtacttgccttgcttctcccatagtgacttctggaaattcagggcctccttggtcacatcaatctcccgcttgatggcattgatgtgctgtgtggtctcgctggcccttttcctccgttcattcaagatggatttgttttctttgaaaattcggttgatctcactaccttgctcattcttaaactcctcaaaggccactggtttggagggtggggtgtcgggcctaattgggcgtaattcctccttcggggagtctgagggaaggggctcaatgctg

SEQ ID NO: 476976 - DNA, 1000 bp, Homo Sapiens; identical to SEQ ID NO: 345225

SEQ ID NO: 476977 - DNA, 1000 bp, Homo Sapiens
ttttgatttataaacatttttaatgactgtgttaaaaaaccatcatacaaaaagaaaagaaagttgttttcaacttaaaaaaaatccttatataatgtaccactcatctgggatatgcttctgggagggggacactccctgcttgggctgcagcagaaggcagtggggagaaagtcttaaagttctgggagtcaggctagcccctcctgcaggtgtcctcattgccacttcttggtccctgtggtcaaggttcaaagtgccaaaagacccactgatcgaacctgagactgttgagatgtcctgttcccaacagagagtatctgaactccagaaacttccctctcaggcctccactcccccctcctttgtactgtgcatcctactctgacttccgtggctggggcagatcaaatgtacattctcagtgtcccctggtaacaacctctcccttgcctctgatttgcgaggcacagacaaagctgacaaggccttcttccaggaggctgctctgctttctcctctcctaccccagcttttggctcctggcttctctggaaagccacaggactccaccagcttctctctgccaacagttcagtcttcagggctggagctgcagggtctgcggaattcctgtccatactcatgtatccacttgttggccacccacttatctcccaccaggacaggacagccagcatgaagtgtgtcactgtccccttcaccactcctgtgcaggttccaccaaaacagtgctgcattcctaaccacaggcacgctgaggttggcatagatgaaggctgtggctcctccagcttccaccgagctcagatagatcataaatgttgcaactcggtttcctgacttcattctgtagagggggctgcttggtgacgtagcatggtcaaagtgaggctcatagtgtcctccgatgccatagttcaccacctgcagatactctgcatagggaggccggacatcaaggcctgtgagggcagca

SEQ ID NO: 476978 - DNA, 1000 bp, Homo Sapiens; identical to SEQ ID NO: 161121

SEQ ID NO: 476979 - DNA, 1000 bp, Homo Sapiens; identical to SEQ ID NO: 345228

SEQ ID NO: 476980 - DNA, 1000 bp, Homo Sapiens; identical to SEQ ID NO: 161122

SEQ ID NO: 476981 - DNA, 1000 bp, Homo Sapiens; identical to SEQ ID NO: 345232

SEQ ID NO: 476982 - DNA, 1000 bp, Homo Sapiens; identical to SEQ ID NO: 345234

SEQ ID NO: 476983 - DNA, 1000 bp, Homo Sapiens; identical to SEQ ID NO: 345236

SEQ ID NO: 476984 - DNA, 1000 bp, Homo Sapiens
tttttttttttttttttttggagacagggtctccctctgtcacccaggctggagtgcagtagcgtgatctcagctcactgcaacctctgtctcccaggctcaaccgattctcctccctcagcctcccgagtagctgggatcacaggcatgtgccaccatgcttatgcatgcggtttcaccatgttggccaggctggccccaaactcctgacctcaagtgatccacccgcctcggtctcccaaggtgctgggatcacaggcgtgagccaccatgcctggccaggttttgaagtttttacagaatgtacagaatgtaatcattaaaaaatgactttcagaaacatatacattcaaagaaaaccttttagtattctaagcattgaatactttgggggaagaactggtttcttttttggattgtttaagaagtcagtcttttctcaacagtttcttgataagcaataaatcttcgcaaattcattttcacattgtcaagaacacacagctgatctgtgctatagttacctctcccttctttacgtatcttcattttaaagaccggctggaattctttcaaagcagataataatttaatttgaatcgaggctctttcggcttctttaccatctgcaaaaacatcaaagagggcatccaaagcttctcctgctaccacaagggaaggatctttggtggtaacttcaagcagaaagcacccaatgttcttaagagtttcaagtgtaccatcttctttggcaaggacgctgccagtgattcctaaaatgctaacgacattcactctaaccccgacattactactatgaatgcctgctttgcataatgtcatcagctgatcaggagtcatgcactgggaaatgttcttggaggccattgtttgcaaaagggccctcaaagcactacttatggcttctagaaagtcaacatgtttagcaaaatctggttgagaaaaaagcagctgtgacagatgctgtgcaagcgtctga

SEQ ID NO: 476985 - DNA, 1000 bp, Homo Sapiens
tttttcaaatgcatcagtgtctggaatgggttctaagctgctaaataattcttagaggtaaatgacaaacatgttgccctagatgtagctagacagccttccctctacagtgaagtctcctccaccctcagtgacagagccccgatgacacggacacctcggctgctgtcacttccctggttcgggcctcccacaggctttgaattgaaggcgagtgcctcagaatttgcatccattgttctgtctttcctgggaagttattcatcctggtggccagcccaccgacaaaatggatttggatctactggacctgaatcccacgggggccagtggagtccgtcctgtagccaagaagcaggcaagagaggctgggacccatccctgcagctggggcagcagtgctgtgagctgtcagtgcttagtttatagacatcatctcacgttagcggtggcgtcttccaggccactgctgctgctgtcgttttccacaaaaagaggctcggccagagaccccggggttctttggctcactctctcgtgaacttcctcccttcagcttcctaaccagcttctcactgctgcgtctaatggaagcccggagtttgctaaaggaaccactgcgttttaaagatccagtgccgtccccgttccactctacgctcatactcacttcctcccctccgtcagggccactctcgtacttgaccacgtccacgttgaggctctcacggctcctgcgcttctccatgttctcagggtcattgagcacttctgccaccctctgtttgtgaacattgtcaagaccctgtttacgagacctcatagcagcttcttctaacgtttctgcagcttcaaatttgccttgacgtctgtaaagtgccccaaggttttttagagtggttgtaacagttggactatcaactttgcaggctttgtaccagccgccatactctccaaaagatgtcccatccttttgctttcctttgcattcttctctttc

SEQ ID NO: 476986 - DNA, 1000 bp, Homo Sapiens
ggacagtttgccactcgcaggtgtgcgggctgcctctgtgttgccagcgtataatactgtcatactggtggccaccccaggggctagttggctgtttggtcaggcccagaagaggaccctgcaaatgccttctttgagatggaaacacagcccctcccttcaactgtgcaggggtgggtgaggccagccagccctcgtggggagagtagctgtgtgcctgaggaggaaagggcgtttgggagacctctgctctcgtatgccttaacctccaacactgtgtgactcccagacccacagattcctcgtgggaaaacagggaccaggccaccacccagtgtgatgaaaggaggtcgccaaagagacattcccatggaagtgctggccccgggaccagcacctgcggatgctgaactaaatgacatctgaatctcagggggaggggccggggcagctggagcgtgccctggccagtcgtggtgacggaattccgggagccttgggcctggagtcctgctcttcctagctgggaagtctgcagagagggaagaggacactcctgtgccaccagagttcaaccagatgagttcccagcctgggcctccagccctctgcccgccctgccgggcctgaacccccaagtgctgggggtcttgtccgatgctgcttagtagctgttgtctgtgaagaaagtcacgcgggcagacggggagcagtggtcctcctcgcttggctccgacagctccccatactcgctgttgtaaaacacctggcctcctcgggccccccgctcaggccgccgccgcctcccttgggagtcagggtgtgccctggtcacagccacattctggccaggtcctttacagctgaagccgctttcttgtctatgcctgctctctatctgctcaaactcctccgaggccagcaccatcccactgtctgtctggttgtccacagagcctttgtaggtcgttggggtcatggggaattcctcaaatgtctt

SEQ ID NO: 476987 - DNA, 1000 bp, Homo Sapiens; identical to SEQ ID NO: 345237

SEQ ID NO: 476988 - DNA, 1000 bp, Homo Sapiens; identical to SEQ ID NO: 345238

SEQ ID NO: 476989 - DNA, 1000 bp, Homo Sapiens
ctgatttgttttaccttctatttaagattttatttataaatataccacgggtgattcactcattctattggtggacattttggtaatttctcatgatctctctcctattttcaatgccaaacaatgattccttgaacagatttacgtgtacctactttttctatgaattcaagttttctctaggatgggtgcctaaaattattattgcttgaccacaggttgtacaattttctgctttgccagtatccccagattgaacccaaaggtgtcataataatttataaattctcatcagtagcttatgagaattttccccacatctttgccaatacttgattttttttatttttgccactttgatggttgtataacatctttttttttcccacatgtccctggagaaagacatgtatcttcagattgaagaaacttgagtccgtggaaggataagcagactgacagcagatctctcagtggcaattatagaggtcagaagacaatgggatgacatcttcaaagtactccaggcaggctgccctgaggcccccatgccatggggaccatgagcatcagcagttgccacatcagcaggtgtttgcccctgcataatatttgaagccagataacttcatccaggggtagatgggttgtgaagcaatgagtccaggagccaaggttgttcattcagtttaaactcctccttggtcacttcttctttggggttggcctgatcttccttttcaatcttagggctggggaacaaaagggaagagatggtgttaccagaacctagaagctttgacgggggaccccccacggctggcgcctggccctctgagggggctgctgcgcggctgttgcttggacttctgagggggacgctgcttggctggcggtggtcggacctctgggcggggacgtggctgacgctcagacctcggaggggaccgtggctgacgctcagacctcggaggggaccgtggctgacgctcagacctcg

SEQ ID NO: 476990 - DNA, 1000 bp, Homo Sapiens; identical to SEQ ID NO: 345240

SEQ ID NO: 476991 - DNA, 1000 bp, Homo Sapiens; identical to SEQ ID NO: 345241

SEQ ID NO: 476992 - DNA, 1000 bp, Homo Sapiens; identical to SEQ ID NO: 340113

SEQ ID NO: 476993 - DNA, 1000 bp, Homo Sapiens; identical to SEQ ID NO: 336361

SEQ ID NO: 476994 - DNA, 1000 bp, Homo Sapiens; identical to SEQ ID NO: 160760

SEQ ID NO: 476995 - DNA, 1000 bp, Homo Sapiens
tttttttttttttttttttttttttttttttttttttgggaatgtcactttatttggatttggttcgtggggtgggggtctcagaacaaactagaaggccttacataggcagctgggcccagccagctgggctcctgacccaggacttcattctggcctgtccccccaaagcatagcctccaccttctcacccttctccagaggagtctcctccacccccacaggagctgtggacaggccctgcagccctagggaaggaggaagggtcctgcaagtagacactaaggcacagcgcggcccaggggtcataagggctcttctggcggtggcatctgctggggcttccagctgggcgggggctccacgcaaccgctgaccatccagaagtagtttgggtgcacctggccctgcacggcctcgctaaccatcaattccccatccactgcaaacacacctttcccatccttgggctccaagcggaaggcgaccacgggcacatataccaagtaggggcattcatactccatatgcctgcccttctccatggccaggaagaggcgcagcagcatggcacgagacactcccgcccgcacgtagaacagatgcatgacgccagctgcacagcggcccatgggtgcagcaaacatctcactgcccaggtgcgagtgcagcagtgccaggactagcacaaagtcctcgtcgggcaccactgtccagtgagagggcactggctcctccagtggcacaaggtgtgcatctaccgggccctgctggaccacaacgggggaggcaggtgtcttggaacccactcttcctacagggaggtaggccagtcggccgcggtaggtgcgcagggctgccagacgcaggaaggtgcccagagtgaagcgcatctcccccagacgccgatacttctcactctctaggtccacatcagcaatgaagccccaggccaggctgagcacagagaagaggcgcagccccgaagccgtgtgcagag

SEQ ID NO: 476996 - DNA, 1000 bp, Homo Sapiens; identical to SEQ ID NO: 345244

SEQ ID NO: 476997 - DNA, 1000 bp, Homo Sapiens
gtctacatttcccttgtcttggatatatatatatatggagatatatatacaattcaagcagttttaattaagggtaatcattgggtttttctgaaaccggaaaagtcacgagtctctctcttttttcactttcacatctccagcaaggatggttgcaatttccccttgcataaaggcccaggggacattggagcccacaagagggcatttttccccactgggacaatagacctctccactagctccctgctgtttgatgctttgtctggagcaagggaagcagaacttgtgcgaagggacggacgggcactgcacaaaatgggtgtcctccagccgctcgtggcagagggtgcagcacagcggggcactggttgccagagaggagtccgggaggctggcagggtgcactggctccagtcctcctgtgttgcctgctccctggccccccacctctctggggcccagccttctttggttcatagaggacggagagggcggactgttgctattcctcctggtagtggagtgaacctggttggcatcttttgaggcatgactgccccctgcattgtctgctactaagatcagggctgccatgggggactggccattctgggccgcttcaggcggtgtggtccggttggaatgaggtgaggcagtgggtggtggcggagacacaaaagaggatgtaggagtcatggggatcttgagcccctctgtggatgtggacagccacggctgggcctctccgttgatcttagggggcccgacttcaccttctggttctggagagggcttccttttccttgctgttcttgcaactgctttagacccgttggccccgttggcctcgaaacccaacaacctgcctgcagtcagggccggctccttcttaaacttgctctcgaagggccccgagtggccgtgctggtgcagcgccagcagcgtgtcgcgcacggtcttgggcctgttgacccagtcctgctctccagacccgcgg

SEQ ID NO: 476998 - DNA, 1000 bp, Homo Sapiens
ctggcatttattttttcctttgcgtgaactacttttccattttatgaatgttttttctcaactagagtctttctccattaaaaatattcattctatgtcaaatgtattttcacattgtctacaatacatagataataacattactgtgtattaacattaagtaattatccttttattctttatcctacattagccaaataagatggctcaaaatggcaagaagaaacatttatttgggaaggatgtaaatttgtatgtctctaaaaaatggaaggtcttaagacttccctcatttataagaaattgccgtgattcatttattcgtcataaacctcatggcgtaattcataatttcctctgggaatcatgtgcgaccttgacgtattggatctgtggaggaggagaaaatgcaagatcccagctgtatgctggtgataacagcttagtgggtttattgaggtaaaaatatttgttaaggtgcttttcataagtgctattgagtccatttttgatgtcatgaataactccgttcagatattctttgatgaagtctaaaatattatggggtgtgccaccaaccatcaagttgccataatagaaatctccctgtccaaacgggatgcaagctgctgaggtcggcctcctctcataagggaagttcttggtgtttctgaaataccaccaggcgtggagctgggccaccaacgggcccagggtctccaccccgaactcattctggaagacctggttggcagccatgctgaagaggaagtccacctcgtcctggatgtgactggcgatgtgttcacccaggctcttcacatgcaccagggggccatcgagccaccacctctcggtgcccactttaaatgctttgaacgttcgaagaggactgggctctatgtcaggcagcttgaagaaggcgtccaccatgatgtagaagatcactcggtagcctgtcatgaagtgcttatttgcggagtgtaggaacggcctcagg

SEQ ID NO: 476999 - DNA, 1000 bp, Homo Sapiens; identical to SEQ ID NO: 345245

SEQ ID NO: 477000 - DNA, 1000 bp, Homo Sapiens; identical to SEQ ID NO: 345246

SEQ ID NO: 477001 - DNA, 1000 bp, Homo Sapiens; identical to SEQ ID NO: 472918

SEQ ID NO: 477002 - DNA, 1000 bp, Homo Sapiens
tttttttttttttttttttttttttttttaaatatttcaaaacctctttaataacactctgaatttgtataatattatgactcattactgtggatgtaagatgtgcaatggttctttattctctccaccatcattaaggcaggggcagaagtagggataaagtttctccatgaaagtgttactgaaggtgtaaatgtgagtcatggttttagcattgtagaaggacaactgtcctccttcataatccaggtatatgcccaccttgtcgaggttgttagtcagtgtcagactgaaagaaggcaaatccagagcctttagatcagtttggttccttagtcttaaaagccagaatccttgctcaggagttagaggacagctgcccttccgaatgatggattctctgacaactccaactgtccattttgtcttctttgctacttctacttcccagtaccactttccagaggtgaagcctcttgagcccagtacagccacacttgagtcaaacctctcaggatcatcaggcattatcttcttaatgtcaccatgccagacgctggtttggcttttggagagcaccagatttgggtgagctgttttagggtccagagttagtggagacaggcctgggcagagagtgtcctgcatttccctccataccatgtactggataggacctttgtactggcccaggttcagctttctggaaataagctctctggttgccagcaccttcattccttgctccaagctatgtaagagagttgtgatgtctttgagaaagtcgaaggagttctgttgttccgtctttgcctgaatgctcaccaacatatccttggctaagagacattgctcctgaagctggctcagattcaactccatctcctcattcaaggctttcccctcttcccggagctcagttaaaatgtccttttctttgctgtgcaggaactgatgcagctttagaaactccatggacacatgttgctgcagatgtagc

SEQ ID NO: 477003 - DNA, 1000 bp, Homo Sapiens; identical to SEQ ID NO: 345247

SEQ ID NO: 477004 - DNA, 1000 bp, Homo Sapiens; identical to SEQ ID NO: 345248

SEQ ID NO: 477005 - DNA, 1000 bp, Homo Sapiens; identical to SEQ ID NO: 345249

SEQ ID NO: 477006 - DNA, 1000 bp, Homo Sapiens
tttttttttttttttttttttttttttttttttcactttaacaaaaatttatttaaaatgttacccccatatttcctcaatgaccaacttgtttcagttttatctccccctcatccggttattttatgtctttttgggaggaagggagatgagggtttttgttttttaacaaaatcactggctttttaaaaagtgttactgcagtcatttataagatgcatgttatatggaagtgatacctgagttgtttgcatgggcaatggaagaggcagcagctctgaaaggagtatgagtccagaaaaaaatccttcaggaaccttcaagattgaagaaagaacttcttttaacattaaagaccaagtattattggccagagtctcttctgagattgtgagtttttcattaactccttgtgtaaaagtcagtaaaatatcaatgatatcattctgaattttctgttcatcactatccaaacgacctgagagggggatagagcacaggagcatatgtaaagtaacaagcgctgaaggaacacgcatgtccttaaactcaaaggatccacctctcaggagttccgttaacatagttttaagaagagtgagtgtgcagcgagccattgaaatagtagtaactctgtgaagggtagtccccatgttgacatggagcctccaaggctgagtcagaatactgttcaatttttgcagaactcgaataaacgtgtccattccttcagcagaaaaaagctgaataacggcaagattccatttcagatctttctgttgaccttcaacaggaggtggtgggcatgcaacattacagagaacacgtaaggcagtggtaaggccaactccttctggggtcatcaagttatcgatattctgcttaacatactcaattaagtttgggatgcagttaatttcaaatctaaggtttttcagaggttcaagccacttgccaagttcttgcaatttagcattattttcatctgctttacaaagct

SEQ ID NO: 477007 - DNA, 1000 bp, Homo Sapiens; identical to SEQ ID NO: 345251

SEQ ID NO: 477008 - DNA, 1000 bp, Homo Sapiens; identical to SEQ ID NO: 345252

SEQ ID NO: 477009 - DNA, 1000 bp, Homo Sapiens
ttttttttttttcatatttaagaatgcttttttttaattacataaatgcttattgcattacaataaattacaattccatagatgcttcagggtatttcaaagccaagtacaatatgaacaagtacaatgttttaaaatgtaatcagttgacaaaacaaatgttgtcatattctatgttccataaaagaaaaaaaactgtttgtgaagagaaagataatacattttaccccttaggctccaggttccagcgaagctattgaaatgaagatgaggtgcttcacagtctatttttccagatagacttaacaactggttttctggtagcacttcagcttgtatctggcaaagcagctctccaagtttggttcccattttgtccacttcgagttgcatttcctgtgcgccgaaaggtgttcaaccattctagaagagaatcttcatgtgaactttctctagggacttctgagtctctgtaattcgttccatctctcaagtcaggctgagatgctagttgttccttgacgccatctaaccgctgttgcagttcttctgatgttatttctccaggggtgcctaaaagattatggtctctcataagccgataatcttcatcattgagttcattaataaactgataataggcctcttctctgtggagacgctcttgctgccatcttctctcattttcatgatgattatggtcttgaggtaaggtttcttcactgccaccatctgatctcgatctagactgattcatcctgagattcctggctttcttattttcctttcaacacgcttttaacatatgccatggtatccatccttcaattgtttgtgccttttttgagagctgcccatctctccaggtcttgggccttcgccctcctgtccggagaacgtgtgctgtgggcggccgttctctcgggtgctggaggctgtggttgggaggcgggataggcttgccgccgcgcctccggagcccgctgtgccctcgaattgg

SEQ ID NO: 477010 - DNA, 1000 bp, Homo Sapiens; identical to SEQ ID NO: 339345

SEQ ID NO: 477011 - DNA, 1000 bp, Homo Sapiens; identical to SEQ ID NO: 161124

SEQ ID NO: 477012 - DNA, 1000 bp, Homo Sapiens; identical to SEQ ID NO: 345254

SEQ ID NO: 477013 - DNA, 1000 bp, Homo Sapiens; identical to SEQ ID NO: 345256

SEQ ID NO: 477014 - DNA, 1000 bp, Homo Sapiens; identical to SEQ ID NO: 345257

SEQ ID NO: 477015 - DNA, 1000 bp, Homo Sapiens; identical to SEQ ID NO: 464509

SEQ ID NO: 477016 - DNA, 1000 bp, Homo Sapiens; identical to SEQ ID NO: 345258

SEQ ID NO: 477017 - DNA, 1000 bp, Homo Sapiens; identical to SEQ ID NO: 345259

SEQ ID NO: 477018 - DNA, 1000 bp, Homo Sapiens; identical to SEQ ID NO: 345260

SEQ ID NO: 477019 - DNA, 1000 bp, Homo Sapiens
tttttttttttttttttttttttttttttttttttttttttttttttttttttacatttcctgttttcattttattgggaacttcaaagaaaagaaagagagacggattggttcccaagacaagccgtgacgtagactcccaacaagctggggaattctggacagcgaaggggtggacagtgagactcagcacagcccaaagtcaaaggcattagggttgttctgaaaatagagattcaagaagccctggaaaatgctcttatccatgagaagagcacagactgtggggtcccacttcatggctgatatccagagccgcagggctggcgtgtggctcacacagtccagtatcccatacacatccagccgctcaaaccagggccagaggaggtaatcaatcatggatatacaggttccaccaaagaaggtggtgttctgatactcaagaatctcttccaggttgctgaattcctgacgcagggctgccttcagattagtgcattctctcccacatctcaacgctaccaggcactccttggtcaaatgtgggaccttacaaaatagctccaataacatcttttggcgagctcgttcataagggtcatatggaaacagcttccttcctggataagcatcatccaggtactcacaagcaataacagattcatagatcagttgacattggctggtctccaggacaggaatgtggccaaaagggtgctttgtatagtaccattcaggcttgtttctcaggttaatgttgaccacttcatgtctgatgtctttggccttgaggacgaggcgggtcctgtgagaataggggcagaacctcatgctgtagatgcggatcagcccctccgggactggccctgggggctggcttcctttccccagggtcctggtcgcatccccagacatggtctccaggtggtttgcgcagctcccggagctcacggtcgccgccctgtggctcgccaccgctgccgcaggctccagaaac

SEQ ID NO: 477020 - DNA, 579 bp, Homo Sapiens; identical to SEQ ID NO: 345261

SEQ ID NO: 477021 - DNA, 851 bp, Homo Sapiens
ttttttttttttttttttttttttttttttttttttttttccaaccaagggagctgtttatttgacagggaaggaatttgaggagccgtgttagtcctggcccaggacaggcaggtggaggtggtggcggggggtctctgatgggggcctcaaagactgcctctcccctcataggcggactccccgcggggccacgcttgtgctgcaccttcaggtctcatcgaagtccacgccaccagctggtttcttactcttgaacccggggttgatgagcgactctcctggacaccgcctcctgactccaggtccagggccacctctctggggatctgggtctggtaagaagagctgaggccctgcaggccgggggctcttcctcgggctgacagctgtctcttctgcagctgccagtcgccgctccaggctccacacgcgttttgccaggcccagtgtcagcgcccgcagcctgggggctgcctctgggcctggtaccttggagaggtcaaaggccagtgccgagggcccccctgaaagcgtcagggatgctctgtcctcctgcagagtcagagccacagcttgctgctcacaggctgccctgaaccggggggtgatgtcctcagccgcactcaggccaaaacgggctttgagggccgccaggctgtccggcgtgaagcaggtgctccaaagctccgcggcgtcggtcacgtagaggttgaagccgccgcggtccccctccccgctttcctccccttcgcagtagcacacgaagcggggcggctcggggcccggcggcagcgtgcagagcggcggcgacagcggatccatggcgccgggcgagcgggaacccggcg

SEQ ID NO: 477022 - DNA, 1000 bp, Homo Sapiens; identical to SEQ ID NO: 345262

SEQ ID NO: 477023 - DNA, 1000 bp, Homo Sapiens
gtgtgataagtttgttgcattagatgccaggaaagtagtgagaggaaggctgctatgggacaggcttcctatctcatttaggttcatctcttgaaacaagaagccagtaccagctagctggcagaaatcccaacccagcagccgtagttttccttagattttgctgttaattatgaattctcatttccaactgtacagactgaggtgaaagcagacactcaggcactttgcacagacatagtctatgcaggtcctttcagtgcaggctgtgttgattgacaaaacaatgctgtgtaagagcagaaaggaaacattctgacattttctttcagttaacacatttttaggtgaatcagccttcaggtacggatattaaagttttcccaaggtgtaaaagattatcagcagaaaatctgaactctgcactagctatgccagctcccccgaacacagtcttcctccataggcagtcaaggttttgttttgttttttggctgagtagctgattgcaggttataagaaaagttctttgatcttccactgttctcaaggagatgtatacactgtaggttgctcactgagttgagacgcagcacagaagaggcttttacagatcttgtaggatgatgtattttcccttcgtgagaacaaccatagatttgcttaagcactgagtgcttggtggactttgtgcctgaggtgcccttggatggactcttgggggccttgcttactgcagtggtttgggggaattttagttccagttccttcctccaaacctggaggagcaatgctgtagactcttgcctccatctgtccacatctccagctccaagctgcttcatatgccgaaggtgggacaggtgcttcctgagctggtagcttcgccaggcgcgctggatgactgctgctgccttgttctttttgcgaaacagctccttcctccttcgttctctctgaattatctgcagtcggagctctctggacttctcaacagagg

SEQ ID NO: 477024 - DNA, 1000 bp, Homo Sapiens; identical to SEQ ID NO: 158788

SEQ ID NO: 477025 - DNA, 1000 bp, Homo Sapiens; identical to SEQ ID NO: 345263

SEQ ID NO: 477026 - DNA, 1000 bp, Homo Sapiens
ttttttttttcatttttgaggagcagacttgtaaatttaacttgtgctaggtagtagtggtttgtttttcttaaaccaaaactctgccaaacttgctgatcttctgcttcatctactcaggtagaataccaggtcaagctgctgctgtggctgctctcaccatatgaaaccagtttgtgtctgcattattactgtcttcaggaaaactttaaattcttcagttttctttactcctcccatatttcacttcctgcctaaatccaagttaaattatacaatttccactggtcttcaacacggtttaattctgcactgtcctttcctttgcatgtcacagtagctgttcacacattaaatattatagatatgttctgctcttgacatctacacacttacaaaagcagctttgtactttgtttggtgtgtttgttactatgttggctcacaaaaagcagttttctcagttctaagcatggtactttacaatttttaatgcattcatacaacagtgcattggaaaagtactgagcctctacaaaatagctttacatttttaaacaaatgaatgtgattttttttcacttacacaagcataggctttttaatatttccacaagataaatatctcaattaaactataagctcactctacagtgtgccacagtgatgggcttaggagacagttatacacttagaagatcctaaccttagtgttatttacactgacatgtccagtatcaccaagtctgaaaggtgaacaaacaatactcagaatgtggctgaatttgtgttaactaataactgggaatgatatagctttaatcacttatgaaacacatactgtaacttagtctaaactggtaatttcctttgctcctctcttatggtgtgggaaaatttaaagatcaacatgaaaaaggagccattgctaaggcagatcttttaagataacaaaggaaaaattgacaagtgtatatgataaattatcagtaacagtgat

SEQ ID NO: 477027 - DNA, 1000 bp, Homo Sapiens
aagctgcttccatgcctctggaggccaggctgcctggcaccattggccaacagctgctaactgagcgggggccctccattgaggaagtaggtcatcatctcgcctttgcccttgaccttgaccacgccccggcactccagctggtacgtgttggcagccagcacctggtacatgtctgtggtgacctggatgcggtcgggtacaccggtgctgtccatgcggctggccacgttcacggtattgccccagatgtcgtactgaggctttcgtgcccctatcaccccggccaccacggggccgatgttgagcccgatcttcatctggaagttgttgaaggagtgctcattgatgtacttcatctggtccatcagcttcatggcaaagtcggccagtgccttgatgtgggtcttgcccaccttgtcgtaggtagagtcgttgaggccggaggcagccatgtaggtgctgccgatggtcttgatcttctccagctgccggaaccgatcctcgctgatgatctcatcaaagtcagcgatgatctcattgagtagccgcaggcactcgacaccctcgttgttggcctccagctcaacgtagaactcggagaagttggcgatggaggcgaacatgaccgccacacactcacaggactgatagtagagctcatcattgcgccgctcgcgggccaggaagtgagcggccacgtccttgggcaggatgttgtgcagcagccgccggttgtaggcctgcagctcctccatctcctctttctcctctgtggcctgcagtttccagaggaagtcgaggcgggcagtggactccacctgctgggcgtgcaggtacagggccagcacaaagactgagatgatgatgggcgtcaccaccttcaatgccaccttggttgcatgctcagggcactgggaggtcccgttgttgaagaagtctatggcgttggcggtgaccagcaggtcggcgttgtcgaagagcgtgacacctggcacct

SEQ ID NO: 477028 - DNA, 1000 bp, Homo Sapiens; identical to SEQ ID NO: 345264

SEQ ID NO: 477029 - DNA, 1000 bp, Homo Sapiens; identical to SEQ ID NO: 345267

SEQ ID NO: 477030 - DNA, 1000 bp, Homo Sapiens
ttttttttttttttttttttttttttttttccacaagaccagcttttaatatgactgtgatttgaagcacgaataaataaatgccaaagaaaatggaaaaaccaaagcaaacctcagaacatcaaaactaaaataaaaaagcataaaatgaagcaaaacaaaacaaatctccatcggacaaacataaaagcccccctaccccagataaaaagaatcagactgtacaagctgtgtcacagggagagaagaacgacatgggcaccatgggtgaacacaggcgtcccccacccgctggctgctgtgccgccgtcataggcactgggggggagggaggttggcgcgggtcacctttggcgccgaagccccatgggcagcttggggaaaagggggtttttgggcaggttaagaactttcacaaacgacacaagaactgaatgtagcagagagtcccatgggttccctcttgattgtgcagttctgattccagggtggcctcatggtgactttggacctggaatctggtcccactgcacgggcagcagtgtggacactggaaaccgcgtggaggagtgtcatgtacaagacagacgtggaggtggcgccacaagaagtctgagcatgcaggtgctttatacatctggcagtgagatgtgatggcaggttcgttcttggacagttccagagtgtgactcatctctcctaagagggacgcacggcggggcccaaggatgcgtcgtgttggacgtggccggagcgaggtctaggcagctagtctgcaatgtgtgcatagggggctcttgcttctttccagcactggggccatcccacctgagcttgctgttccttgtcctgggtcttgggcctcaaggtctgtttggagggagtgctgggtgactcgaggggtgtcagcaggcaatctcctccaaggtccccagggtcgtctgcaggggcacgttcacagtgtgactgatggtttcagagtggtttggcattgtgtcac

SEQ ID NO: 477031 - DNA, 1000 bp, Homo Sapiens; identical to SEQ ID NO: 345268

SEQ ID NO: 477032 - DNA, 1000 bp, Homo Sapiens; identical to SEQ ID NO: 161126

SEQ ID NO: 477033 - DNA, 1000 bp, Homo Sapiens; identical to SEQ ID NO: 345270

SEQ ID NO: 477034 - DNA, 1000 bp, Homo Sapiens; identical to SEQ ID NO: 337529

SEQ ID NO: 477035 - DNA, 1000 bp, Homo Sapiens; identical to SEQ ID NO: 345271

SEQ ID NO: 477036 - DNA, 1000 bp, Homo Sapiens
ctgtgttgcccgtcacagcagccactagccacatgtggctactgggtcctgaaaatgtgggtggcaaaatatacacccaattttgaatacttaatacaaaaaagagtacaaaatatctaatgatgttaattatatgttgaaataacttttagaaatttgtgttaaaatatatagtgaagattaatctcaccttttttttttctttggtgagacagggtctcactgtcgcccaggctggagtgcagtggcgtgatctttgctcactgtagcctcgacctcataggctcaagtgatcctcccacctcagctggaaccacaggtgatggaacccggctaattttttgtattttttgtagaaactgggtttcaccatgttgcccaggctggtctcaagctcctgagctcaagtgatccacctgcctcagcctcccaaagttctgagattacaggagtgagccacagtgcccaggcttcttttttgtaatgcagctactagaaacattttaattacatatatggctcacgtgtttctattggacagtgggaatctagaacttctccagtagaacagcatctgagataaggaacttagtgttttttaaaaagtatttacaacccactgcccaccagcaaggagccctctgtgacataagaacagttgaagaatgaacatacccaccggaaagagacctcagggccctcctctgagctccttgacccctgaggcctagagagtagtgtggctggccccagtctcacagaagtcagctgcacagctggaaccaagccgtagattcctcagcctgattcggccacttgtgccaccatacaaaggtacccactgggattttaaaatcagtgtttttacttcagcaaacggaaccctgggataacaccagttggagtctgaggcctatgatcttgagaaggcagtatcctttgggagggtctgcatggggccaaatcttgagccacagccagacacctcagggctgcatta

SEQ ID NO: 477037 - DNA, 1000 bp, Homo Sapiens; identical to SEQ ID NO: 161127

SEQ ID NO: 477038 - DNA, 1000 bp, Homo Sapiens; identical to SEQ ID NO: 160526

SEQ ID NO: 477039 - DNA, 1000 bp, Homo Sapiens; identical to SEQ ID NO: 345274

SEQ ID NO: 477040 - DNA, 1000 bp, Homo Sapiens; identical to SEQ ID NO: 340182

SEQ ID NO: 477041 - DNA, 1000 bp, Homo Sapiens; identical to SEQ ID NO: 345276

SEQ ID NO: 477042 - DNA, 1000 bp, Homo Sapiens; identical to SEQ ID NO: 161128

SEQ ID NO: 477043 - DNA, 1000 bp, Homo Sapiens; identical to SEQ ID NO: 161129

SEQ ID NO: 477044 - DNA, 1000 bp, Homo Sapiens
ttttttttttaaaaacatcatttatttaagagttcatataaagttacacttatgttctgaaggaggcattatggtgggacaaatattaacaaagcatgatttaaatatatatatatttaatgtgtgatatgtttgtatatatatttaaacacatgcaattgttctacaatttaccagattggtgccacagtgaataaaagagaaagtagacagcttttgctggaagattcaactaaagtgcctaatacgtgaaaatctaaaactaatattagaaaaatgtcacaagagatgcccaggccttcagctttctggaccatgaaagtgtcaccaaattcaaagaacatttctgaatgtacatccagtgacatctgttatgcaaaagaggaaaactttgtgaaacatttcatagctttggtcaatgatttactttttgtccatgtattgataaatcagtcacttctgagttgacactgattttcactgaccacctgcactgttaaagagtaaaggaaatgaaagctaccataatataataacaaaaagtcagtgcctatgagagacaaaagcatagtgaccacttttttcaccatttgccacttgttagtgacatacacatgtaccacacctacacacccttcacaacattttccacacaatagaagatttgtataagatcaagtttattatttccagtgctttctgcaactattttctcaaaatattctttccccccaagatgttagataagtcatatggaattgcagtttggggctatttttgcagaaatcctgttcagaggtccctttcatcatctgcataatattaatttcacttgggcttcctgctgcccacatgcatctcagccaggcagacagaggggcagcagttggaatgaatatcattcatttagggagttcaaccaggaaaaggagaagatatggcgagctggctcagaatcagctccactgccactcgctggagctgcagcctgtccctggag

SEQ ID NO: 477045 - DNA, 1000 bp, Homo Sapiens; identical to SEQ ID NO: 345279

SEQ ID NO: 477046 - DNA, 1000 bp, Homo Sapiens; identical to SEQ ID NO: 345280

SEQ ID NO: 477047 - DNA, 1000 bp, Homo Sapiens; identical to SEQ ID NO: 345281

SEQ ID NO: 477048 - DNA, 1000 bp, Homo Sapiens
tttttttttttttttttaaatagttaacaaaaatttattgcaagagatatttttcactgaatttacagtttcaaggaacatgatacaaaacatagtgccatcagctttgtctaaacattaaataggtgcaaatacacaaagattaagaaaaaccaagggagcatactttacaacataaattagagtactataaatatattttatgtacattatacatactcttaagacatcattttaatatatagcatatattgtattgattttcaaactattcagtgctttaataatattatatatcagaaacttagggatttatttgcatcattgcacttacagtaaatgatttcaaaccaatgacgccatgtatcggccagtttatttccaccagttaaatagccatgtacccacatagatgaacacttaacgcatatagcaatagttttcacaagagtatttttttcccattatggtgatgactagaagagaggttgcaaagggatgacagtagggtgtggggaaagcagtgaaggaaagagtgcatggggtaaagatgggaaagccagatggctaggatgaagaacggaagctggaatgattggcatctgaggaggagcaacaaaagttggctggttcccaggacaaagcctcggtcctactggtcctactgagagctgaggtaatgaggttctggtgagagctgggatttgggaaagaaactgttggtgtggctgaagcactttaaaggttcctgcagctgcggctgcagctgcagctgcagcagctgcagcgtgctgctgcaaaacagtgtgatggatagtggttacagaggtagaacataaggactgctgcaaaggcaaaggctgcagaggtgtgctagggggtgggagggcagctggaggaaaggtaaatttaaccttgttggccagcatgtttggctgcagaatgtgctggtagacctcacatggtacatttttgaatttgtcatggttttctagtggga

SEQ ID NO: 477049 - DNA, 1000 bp, Homo Sapiens; identical to SEQ ID NO: 345284

SEQ ID NO: 477050 - DNA, 1000 bp, Homo Sapiens; identical to SEQ ID NO: 345285

SEQ ID NO: 477051 - DNA, 1000 bp, Homo Sapiens; identical to SEQ ID NO: 345287

SEQ ID NO: 477052 - DNA, 1000 bp, Homo Sapiens
tttttttttttttttttttttttttttggttttgttttattttgcatttcatatattatccagtttcacattctcacaggatcagcaatgacaacagccgcctcatctcccaagtctgaaatggccagacggtcacagctgcggctgacagtaaagcactgatatgctcaaaacaaaaaacattgcacagtgtttccttcatttcattttcttaaacaaatgccagacacaaaggcgtactgctgaagaatggaaacccttttcttcttcatgcctcaaactaaacattaaacttatctgacagggcgaacgaggtcgctttaataattaatggtacgcacatgaaaaatcctttatgatgcataaatattttgttacacagggtacaaaaatacttctcacgttttggttggtttcgaggtttggaaagaatgaggagcagcggcgggcggggtgcgctgtggagaggtgaacagaacgggcagagagggctttcttacgactgttggcccatccgagaaggcaggagcggaggagccccatgtgaaatgaaaaagcaaaccccatctatctgttgggtggaggtgggagctgagcctggaagcgtgtggggccacggaacttgggcctccctgaagcggggtgggtgcaggggcggggcgaggagagaggggcaggcaggatgaaccactgggagccaggacctgtcgctatggtgacagtgtgagaacaaactgtacactcatatatacaagtataagtgtcttaattcatgccagaaaacatgcaaaattaaacacctcacttcctcgagggggagctacagaagcaagtttgggcgggaggtcaggccttgccaggtcccagtgaggcctccgagctggatctgggcgccccagggagaaagtccccaaatcctcctgggaggcattggagaaaggcttgagggtgcagaacaaggtgaggaagaggagggaggggaacaggaagcagtccactg

SEQ ID NO: 477053 - DNA, 1000 bp, Homo Sapiens; identical to SEQ ID NO: 345288

SEQ ID NO: 477054 - DNA, 1000 bp, Homo Sapiens; identical to SEQ ID NO: 345289

SEQ ID NO: 477055 - DNA, 1000 bp, Homo Sapiens; identical to SEQ ID NO: 161130

SEQ ID NO: 477056 - DNA, 1000 bp, Homo Sapiens; identical to SEQ ID NO: 345291

SEQ ID NO: 477057 - DNA, 1000 bp, Homo Sapiens; identical to SEQ ID NO: 345292

SEQ ID NO: 477058 - DNA, 1000 bp, Homo Sapiens; identical to SEQ ID NO: 345293

SEQ ID NO: 477059 - DNA, 1000 bp, Homo Sapiens
acgagatttaaatattttattccaacctgtgtaataggggtctcctcctccttgaactgtcccgattggctggggtcacgtggtgagggtcctgggtgaccaggcctagccttggccacatgagtccacacagtggaaaaggcttggctcctgtggtcggcacacacgagactctggttgcgcctgctgggtgtggaacaggcgcaccatcgccatgcctgcagctcacaaagctcctgctggcctgggatgcactgggagcagctgccatgggtccgtcagctgaagtgaaggaagtcctggccctcctgcaagtgcagtgacctcaggttgtcctcaaaggcgccccctgtgaggtcctgtcaggagcagcagattcagctcagtccggtctcctggctctaggaggccactgtggagcctcctccagggccaggggttgggggtggcctgtgtccacctgtcaagtgttctgctcctctgctaatagcggagaggctggaaggagacaaaggccagagagggcagcagccggcactgcttgtaccacaggccctgttggtcaccagaggggaggccccccctgccttctggccttgcctctctacataaggtggctgactctccctgggggcactcggaatggaatgagactaacaggcaatgcctctgctgtttgaccagggcagacccaccttccctccacacacccacccctctgcacaggccaggagtgggaggaggcccctcagacagaaactgcatctcagaaccatcaacagctgcccctgtctgatcccctctggcctctgtcatccccacccctgcaatggagtgagggctgtgaccctgggtccctggatgcttaatcttgtcctgtgtgctggccttggccaggtcacctactctcctgtatgaggccacagcaggtgtccagaaatgcctttcagacgtgccctgcaccccagcacctcctgaacaagttcctgaagacagcccg

SEQ ID NO: 477060 - DNA, 1000 bp, Homo Sapiens; identical to SEQ ID NO: 345294

SEQ ID NO: 477061 - DNA, 1000 bp, Homo Sapiens; identical to SEQ ID NO: 345295

SEQ ID NO: 477062 - DNA, 1000 bp, Homo Sapiens; identical to SEQ ID NO: 345296

SEQ ID NO: 477063 - DNA, 1000 bp, Homo Sapiens; identical to SEQ ID NO: 345297

SEQ ID NO: 477064 - DNA, 1000 bp, Homo Sapiens; identical to SEQ ID NO: 345298

SEQ ID NO: 477065 - DNA, 1000 bp, Homo Sapiens
caataaaagcatttacatttatttgcacactaaacacattgatttactacttattcccagttttcttatttacttatataggatccattcattcattttacaaatacagattttcagagtaagaagagagaataattcttctaaaaataaaggcattacaatagaatttgcaaatctaggtaccacgtggaaagtctcatccgttcccatatcattaactgctcattttcacactagtgacttccaagtccttattgtcagcatcctctatcttcccatctccactggagcatttccaacctcctgccaccaactcaacacattcagggagaagagggctggtctgggaccacagaaatccttgttttaatcttggaggcagtgctcagtatgaacttaatgaattgttaagtgaatttgttttttttgaaagtcaacaagtaatgtatccccaggcaattttatctgatttttgacatttagattggttttctattacttggcaaagagaatggcgtacagtcactcctctgggggttctgcatgaggaagtatccattatacatgccgttaagcagtgatcaggtagggagggaaaggcttggccacatcaactctcctttgtgaagccaacagctctcaacaaggagaatatagtgctctgtagagcagaaacatgaatagggctgagatccttcctggatgatcccaggcagaaccctaaccctcattctccaggcccacctgccctccatgggggctctgcattgctggggagagggcagcctcctaaccacgtgggtgaaggattgactccaaggtcttatccctgacactcttaagaaagctcataactgcggttccacctgtgcccctgtcttttaaagcctgaggaggccctgggagatggtttggcttcccatgctttgccttggctgcagctgtgatgaggtatttggtgaccatggtgatgtgatagctccgcagctctgccagggcc

SEQ ID NO: 477066 - DNA, 1000 bp, Homo Sapiens; identical to SEQ ID NO: 345299

SEQ ID NO: 477067 - DNA, 1000 bp, Homo Sapiens; identical to SEQ ID NO: 161131

SEQ ID NO: 477068 - DNA, 1000 bp, Homo Sapiens; identical to SEQ ID NO: 345302

SEQ ID NO: 477069 - DNA, 1000 bp, Homo Sapiens; identical to SEQ ID NO: 345303

SEQ ID NO: 477070 - DNA, 1000 bp, Homo Sapiens
aagatttaaaacattttttattaaaactgtacaataatttacaaacgagtaaaaaattctctggtatatatcataggaatcacaatacaaaaatatttgtaaaatcttgtagatcaccatacaaacctattttaggcctgtgaatactgcttagcatggaacggaatgtcatgtggttagagggtgactatgaagggagtgcctgggagaatacacacactacctggcatgccgccgtaagaaaacaggcccggttagtttttgcataaatttacaataaagctttttaaaaaatatacagtaaacaaatatatgatttgatacctatattcacaatatgagtttcctgaggctaaactgaattccattactgtgataaaacacacactctctctcagggtttcaaggaggggatgacggtgagttggcgaatgcgtcagtgcctccaaacccacacttgggcactctcttctttttgacttctagtatcggtgttcacaagccctgtaaggcactcggggtatcctgaaggctacagattctgcaagggcagagactttaaggaacagccatagtccttctccagctcaaaatctggaccatgggcacaaggtaaacaacacactggtgtcaacaaaggaatctgctatttatgtggatttttactttagacaaactaaagtatctatgttgttctgtgtgttgaacacagagtgtgatgatgttaatataatgtaaatgttgatgtaacagtacatttctggcaacatttcagggtccttcctcttgccttattagggggtgatgcattcatacagacttcccctgttagaagagctagcagtaagacagcccaagtacttggaggaaattcactctagcccattggtttggaaaagaaggtatagcctgcaatttagaaatgcaccttatttttaaatacttgaattctgctgctgctcactggaccaggaggagtcagtgataaatgctcatattt

SEQ ID NO: 477071 - DNA, 1000 bp, Homo Sapiens
ggccttgtattttgtatatctttccttttttgttttatttttctagctgatcttttttactctattttgcaaaagttagcagtctgcagggtgcttccccctggctggctggagaagccccatgtgccgagcctggtccgaggtcctctgagcccccacgtcgcctcgctaagttgctgtgccctgaccccagtgtgggaggggccatcagagcacatgtgccttctacttggtgagggcggcattatcttggggatgcaactgcaataatcaagaaacttagaaatatttcggatgaattaactgagaacgcagtgcactcactggcatggccacctgccctcacctggggcgtgcctccggccctggcactgctctgccccacccagttggtggaatcatggaagcagaagaggggtggtccctgactcgtgtttgtgctgtggagacgcccgcaaaggccaggacacttgcatagaatgctcccggcactctcccgtctccagggctgtgtgtaagagtcagtgacagaactgtacgcagcgtgcaagagacaactgccatcactgccaccttgaagggcagcctgggcacatactgtcgagggacaaggaacttgctgacagcagaaggcttcatgccacatgcttcggtctgtatacagtccaaatccggcaaagtggcacgcaacactgtccaggggttcactgcacatggcaaagctgtcctagagggtaaggatgacaaatgcctgtgcaggagggaggtcgcctctgggaaccctttgctctcaaggactgtggacaccggtgaagaggggcacccggttgatgccagctggactccgtccacccctcgagagccagggcgttgggctcactgtcttccccagaggaagcctcgctggggccacgggaggctcgggcctctgttcctccggcacattctggcacggtggcaggggaggctccttaggaggatgaggggacggagaaggccc

SEQ ID NO: 477072 - DNA, 1000 bp, Homo Sapiens; identical to SEQ ID NO: 345304

SEQ ID NO: 477073 - DNA, 1000 bp, Homo Sapiens
cagtctctctggtttgttttgtattatgttgtacatcattaaagatctaaatacaaaggatatacagtcttgaatctaaaataatttgctaactattttgattcttcagagagaactactaataaaaatctaaaaggtatgtcttggtgtgataacttctttattaccaaggctgttttatgggagtgggggggccatgtggtgtataaagagatttcttgcttagatttgctggggatagaataggacctaaccgttttctatttcggagctttcttcccacttcagacctgtcctcgtttttggtttgcaaaggcaagcctagactgagtcttttaaacctggcccagctccgtctgtggaccaaggacgtaggccttcctgactgtggagttgggataggctgggccttcagggggatcacccagtaaaagaggaagaagcccttttactgtgagcagcaggcatttatgcatcatttgccacaagcagaggatgggatttaaactgtttcaccagctctcagtggtgctgttgtatatgatgatagaatagggttcattcctaaagtaagtaagtttttgtccttgaccttaatactgtgccattgtcccacttgagcttttggctagactgggtctttgaaggtttttagtgatcatgtgagggaggggccgcagtgccctgcagccgggaagcaccaataaggatgcctcctggcggtcagatgaggcactgtcaggctgacaaagggtgactggaccaggctgctagtgtctcaagagagccatttaaccctcttcttggccttttaattaagccctccttttaaaaccgtaaaaagttatcctttatctgaaggaaataaaggctcacatagtaatgggcgttcgggccaaggccgtgactcatgaatctccatttgacccagagtggctttaaagtaattggcacctggaggctactttgtcttccctgtcctgagctgcttcctgctaaa

SEQ ID NO: 477074 - DNA, 1000 bp, Homo Sapiens; identical to SEQ ID NO: 345306

SEQ ID NO: 477075 - DNA, 1000 bp, Homo Sapiens; identical to SEQ ID NO: 345308

SEQ ID NO: 477076 - DNA, 1000 bp, Homo Sapiens; identical to SEQ ID NO: 345309

SEQ ID NO: 477077 - DNA, 1000 bp, Homo Sapiens; identical to SEQ ID NO: 345310

SEQ ID NO: 477078 - DNA, 1000 bp, Homo Sapiens; identical to SEQ ID NO: 345311

SEQ ID NO: 477079 - DNA, 1000 bp, Homo Sapiens; identical to SEQ ID NO: 345312

SEQ ID NO: 477080 - DNA, 1000 bp, Homo Sapiens; identical to SEQ ID NO: 161133

SEQ ID NO: 477081 - DNA, 1000 bp, Homo Sapiens; identical to SEQ ID NO: 339045

SEQ ID NO: 477082 - DNA, 1000 bp, Homo Sapiens; identical to SEQ ID NO: 337451

SEQ ID NO: 477083 - DNA, 1000 bp, Homo Sapiens; identical to SEQ ID NO: 345317

SEQ ID NO: 477084 - DNA, 1000 bp, Homo Sapiens; identical to SEQ ID NO: 345318

SEQ ID NO: 477085 - DNA, 1000 bp, Homo Sapiens; identical to SEQ ID NO: 345319

SEQ ID NO: 477086 - DNA, 1000 bp, Homo Sapiens; identical to SEQ ID NO: 161135

SEQ ID NO: 477087 - DNA, 1000 bp, Homo Sapiens; identical to SEQ ID NO: 161136

SEQ ID NO: 477088 - DNA, 1000 bp, Homo Sapiens; identical to SEQ ID NO: 345323

SEQ ID NO: 477089 - DNA, 1000 bp, Homo Sapiens; identical to SEQ ID NO: 341096

SEQ ID NO: 477090 - DNA, 1000 bp, Homo Sapiens; identical to SEQ ID NO: 338058

SEQ ID NO: 477091 - DNA, 1000 bp, Homo Sapiens; identical to SEQ ID NO: 345325

SEQ ID NO: 477092 - DNA, 1000 bp, Homo Sapiens; identical to SEQ ID NO: 345326

SEQ ID NO: 477093 - DNA, 1000 bp, Homo Sapiens; identical to SEQ ID NO: 345327

SEQ ID NO: 477094 - DNA, 1000 bp, Homo Sapiens; identical to SEQ ID NO: 345328

SEQ ID NO: 477095 - DNA, 1000 bp, Homo Sapiens; identical to SEQ ID NO: 345330

SEQ ID NO: 477096 - DNA, 452 bp, Homo Sapiens; identical to SEQ ID NO: 345331

SEQ ID NO: 477097 - DNA, 1000 bp, Homo Sapiens; identical to SEQ ID NO: 161137

SEQ ID NO: 477098 - DNA, 1000 bp, Homo Sapiens
tttttttttttttttttttttttttttttggagggtttcttttattttatgtttataacatttgaattccttaaacaaaaggcttatactaatttttttttttttttttgagacagagttttgctcttgttgcccaggctggagtgagtgccatggcgcgatctcagctcaccgcaacctccacctcccgggttcaagcgattctcctgtcccagcctcctgagtagctgggactacaggcatgtgccaccacgcctggctaattttgtatttttagtagagacggggtttttccatgttggtcaggctggtcgcgaactcccgacctcaggtgatccgcctgccttggcctcccaaagtgctgggattacaggcgtgagccaccgtgcctggctaaggcttgtactacttttaaaataaaatataaaaaaatttttttaagtagaaaaacaacatcagtctagtgcaaaaagttcagtaaattcactgagagtaaagatgaaatgtccagttaattcccctaagaactagtaaacaaaattacagagaaaaaccttaaacttaaaaaaaatttaatgataaatacatattgatagaaattattcaattctcctatgaatgcagcatccaaggatattctccatgttcatggctcccagcccttccctccaggctgatggggcaacttgagacccaccaagccagcagactcctccaccgagcgctcacccttgccatgaaattcctgatgtagggccacatgtttccggatgctacgcaggaggcagagataggtggcagcttggaaatgaagctcatgttgggctctgcacaacttttcactggtgacccgatgtgcacggaaagccttcacaaggtaccgataggccgcggtgtcgcgatagggtcggccggtggccgcgctcaggtagcgcaactcccgcagaagtcctcgaaaagtgtgcgccggggaccctaaggccgccattgtcctgtcctt

SEQ ID NO: 477099 - DNA, 1000 bp, Homo Sapiens; identical to SEQ ID NO: 345334

SEQ ID NO: 477100 - DNA, 1000 bp, Homo Sapiens; identical to SEQ ID NO: 345334

SEQ ID NO: 477101 - DNA, 1000 bp, Homo Sapiens; identical to SEQ ID NO: 161138

SEQ ID NO: 477102 - DNA, 1000 bp, Homo Sapiens; identical to SEQ ID NO: 345336

SEQ ID NO: 477103 - DNA, 1000 bp, Homo Sapiens
ttttttttttttttttttaagcattattaacacatttattgaacaactagaacttgacaaccacttgccaagtagaggggatacagtggtgagcaataatagtgatgataatgaggagcagttttccctagcaggcagcagttgaaaggaatatgggtttaacatccaccaatgaccaggagtggacagacctatttccaggagactgagtccatagtgggattaaaaacatccctgtaattcttttagcttccttgatccaaatttcctatatcacagagaatctctagggtatttgctctgcctggaaaccttgattgaaggaaggctggctctggctgcacaatcacttatcacatttgttgggtgggaacatatctgtgccccatgatttatcaagtgtggcctctagtctctttccaagtcacatgtcatgttggtactatgaggttattctctcaaccaagacactctgcagagctaatccaaggagtgctgggtctaagtctctgatatcagctgggaaagagtcaatagggatgtcaactccacaagcacttaaaatgatctctaccctgcagctgtcctgggaaggaaacctcagggctacatgtgggctcttcctgtgggaaaaaaaatcaggctggaaaagaacaggcaattagccagggactaaggctgaacatctcccaactgcacaaattactgtatgagttatgtaagttacttcatgttgccctgcctcagcttccatacttgcaaaatatgactacccgacagggtgttgtgaggattaaaggagtgacatccaccaaagcttataacacagcactaagaacattttaaattctctgttaatgttagttattgctgtttagatcccagctctgctgttcacttgtcatgtctactttgtaaagttaattcacctttctgcaccccagtttccttatctgtataaggggacaataaggtggtacgaaactcaaaacaactgtca

SEQ ID NO: 477104 - DNA, 1000 bp, Homo Sapiens; identical to SEQ ID NO: 161139

SEQ ID NO: 477105 - DNA, 1000 bp, Homo Sapiens; identical to SEQ ID NO: 345338

SEQ ID NO: 477106 - DNA, 1000 bp, Homo Sapiens; identical to SEQ ID NO: 467895

SEQ ID NO: 477107 - DNA, 1000 bp, Homo Sapiens; identical to SEQ ID NO: 345339

SEQ ID NO: 477108 - DNA, 1000 bp, Homo Sapiens; identical to SEQ ID NO: 161141

SEQ ID NO: 477109 - DNA, 1000 bp, Homo Sapiens; identical to SEQ ID NO: 161143

SEQ ID NO: 477110 - DNA, 1000 bp, Homo Sapiens; identical to SEQ ID NO: 161144

SEQ ID NO: 477111 - DNA, 1000 bp, Homo Sapiens; identical to SEQ ID NO: 161145

SEQ ID NO: 477112 - DNA, 1000 bp, Homo Sapiens; identical to SEQ ID NO: 345345

SEQ ID NO: 477113 - DNA, 1000 bp, Homo Sapiens; identical to SEQ ID NO: 345346

SEQ ID NO: 477114 - DNA, 1000 bp, Homo Sapiens
ttttttttttttttttttttacgaaaggaaagactactttaatgactactttcatattatatacatatatataataaaatcaaaaacaggaactgccacatggttttggtcttcccatgcctttgaatcatcaggcagagaatgaggttactctattgatagaggtgaactctagtgataggttactctattgatagaagttctttaacatctggaaagactagctgttgtaaattaggactcgtttgtcctttagatacactgtatacatagataagtaaaacaaaatgcacaatcataagaaacaatggtgaatctcgcctcactgtaagcacactggcttagagctctctgcacctcccttttcccctccttccctgaaccagtccacaaacaccatgccatccccccccccccacaaaataacatttcctatgaattttaacaaaaagttatttacaaaatgtgtcattttactacctctaattttaacatgtatcaggtacttcagaacatctagaagaaacagacatctcaaaaaagcttagcgttgtcacctctatatacagaagtaataaaatgcacacaaaacaatggatagaatatgaaaatgtcttggaaatacgacccgtcaggactaggtaggtctcgcccaactgcgacagagcggtcgcccaggacgtggacctgccggctccgtggcctaaacgggcagccgagcccgcgcctctggaccgccttcctcgccctccacagcctaacggcctccgggcgcatttgggcggcgccatgtttcctccccgcttaccgccgccacccgaaggcgctgagtcccggcggctcggcgcggtcttggtctgggtcggtggggttgggccgggagacccgcggccggcggggtccaggctgggggaggccgccgctgccaccaggtccccgaggtagggtaggaagaggttcgccgcggcttcaaggcctgggccgagcgggggagccacag

SEQ ID NO: 477115 - DNA, 1000 bp, Homo Sapiens; identical to SEQ ID NO: 345348

SEQ ID NO: 477116 - DNA, 1000 bp, Homo Sapiens
tttttttttttttttctttcagacaagctactcaagcactctttattataaaatgagaatactaataataccttgcgctaggttgtttaaggatcagagaaaatatatgcacaaagcacctggaacacaggaggcactctttaaatggtaatacttcttattacaacttaaaatgtcacacgacaaatagggtacttgtcacagacaaacattcaaatgttaatgttatacagtaatagtaatattgaataagtaattttatttccatgatctatttacactgtacaaagactgttgaaaagcaccctacaagttcacagtacattacaatatatttactttaaaaatatattcctttataaaaggtttataagaacattggcatgtcaacatgtgacaaaactctcaaagcatgtcaccaattctgtgagagcaagaatgcatccaagtgttatcaatttcacaatcacaagtcaccagttgagttttaaatacatacatgttttaaataaaaaaagaattctatagtggaaagttcttgaggcaatacttattagttcattaacgtatgcattttcatggagatgtggcataataacccacaatatcaacttaatctgtccaaagaaacatttcaacaagtttagcagtacagaaattctggtcatttgtttctactttttcttctttgctggttctcctggctctactttgcgctttttagaagtatgctcatctttttcatcatctgattccaacgtctcctccccttctggtagaagcctagctttcttagcattctgtggagcatcatcaccattgtcctcatatatgttagaccattttattgccatgtcaagctctggaggcggaggcttcttctcagtggtgtaggtctcaggaggtggtacataatttgacttccatattttgaattcctttggaggctcctcaggcgccttgacgacgtgcctctcccagtctatctgtttgttgagcg

SEQ ID NO: 477117 - DNA, 794 bp, Homo Sapiens
ttttttttttttttttgttattttgagatttttcagtggctgacacttcattatccacatgacattggctctttttcctttcacagtattttttaatttcacggagatctgggtcagcctgtgggcgtgggtagcttgtgaaccaccatcagtgggtatgctccaaagaggctcagtattgaggacgactgtcctatccatccagagtgtgatctaaggccgtggagagagggtcggccaggcccagccacaaacaaaacacccataagatctcaagtcagtatcacctccctcctgggaggaaggctcggcacaggcaggacccggggaggagggctggggaagccaccctggcctggagaggagaatgggagacagaggaaaagggagcttggtgaggctccaagtcacagccaaaacccgacaaagtgaggcacaaactcgtttgggacacagaggagagcagcacccacagcgtggtgccacccagagagtccaagacgacgatggtggggctagaagacgacggtggggctggaagacgacggtggggctggaagacgatggtggggctggaagacgacggtggggctgggccgtgtcctcacaccacattttatctttcatagatcctttctggggactcaactcagcccaccacagggctcaggcctgccccaggaatgctgcgccctcgggctgctccaggctggaagggggcaggaagcagagccggcctccagggctctgccaggggccacactccagcccatgcactggggaccggagagagc

SEQ ID NO: 477118 - DNA, 1000 bp, Homo Sapiens
ttttttttttttttttttttttttttttttttttttttttttttttttttttttttttttttttttttttttttttttttttttttttttttttttttttttttgggcacagacatgatgcatgtttattgaacacctaccacatgccagatattaagctaacactggggacaaacctatgaaatcaaggctgccattattattatcacaattttataggtgaggaaactgaagcacaggtaagttaagacttgcaaaaggtaggcaggaagcagcagatccagcatctcagcccaggctgtctggctctagtcccagtgattatccactatactctatggcctttaggcactatcaaaatactgaagcttgaaaatgattttttaaaacatcaatcagaagggccttcaagctattactataatcctttagcccttatagcgcttttgtagactgcattccaacaagctttctttagtggatgagacagaagtggcattacaaccagcattgggggaattttgcctaactctgcctctgctcatgtatttgtatcctgaaggtgacacttcctatgcaagagacaattctttaccaaggtctggttctcctttctcctgggcagagctaacctacagcttccagagtcccttatggttaagtgtggcaaaatgaccagcttttgccaatgagatgtgagtggaagtgatgagcatcactttcagattgcagggaagcacctgtgtcttctccacaccttctttccctttctattccctaatgcatggggcatgaaggctgtagagggtggcagagccacaaaatagatggagcctatgtccctatattgagatgcatccatgaatcaggaacattcacctttggctctcgaacaaaaatttctatggtatttgagcctgtgtacattttggagtctacgtatcctgtggcctagcctgccctaatacacgattttctttgcttatcaaaggttgagttt

SEQ ID NO: 477119 - DNA, 1000 bp, Homo Sapiens
tttttttttttttttttttttttttttttttttttttttttttttttttttttttttttttttttttttttgcgtttccaacacaagatgctgttagctgaagggaggactgggatgggcccgtcccgccccccaccaacggggcgtcaaggtgaaggaccaggagaagaggaggcgtgtggaggaagaaggcagaggaatggggagagggggtggagcagggcccacttccaggcacggccttcactgcagccctcgtcccacctgagctcccagggcatacagacagcaacgctggcagagcacaggcaaggacggtttctgtggcaggaacctcggcgggtggcaggaggagctagcgggcacccacctctctcccaagggccacggcgtccgaggctgggggctgcttcctgcctgaaggctccgctcccccgtgctgggctatcctgagatgcttccccagctcagccacctgcttccgcagctccaaaacctccaggtgtacctggtccacctcacggggaagctcacgctggagagcggccggctccaggggttcccgcagcaccttctgtctgagtcgtgtcaccagcaggtttaggagctgcactctgtccccgagcttcctgagtgccagtccagaggatactgggccagcttggacagatcctcctgcttgaccagcttggacagaccctccggcttgaccagcttgggcagaccctccagtcgtctctgtcgaggtgcggacgctgggctgagactcagcatgaggtgaggacatctttaaaggatccaacacatcttctagatgcttttccagagttttaaacttatgctttagagttcgtatttctgcttcaagggccagaacataatcaggagtggcggcatctcccccagcctctgggtcaggctggtttgcatctgtgctctctgccgctgtctggatgggaggaggaatctgatggcttagagcctccatttctttcctcat

SEQ ID NO: 477120 - DNA, 1000 bp, Homo Sapiens; identical to SEQ ID NO: 161146

SEQ ID NO: 477121 - DNA, 1000 bp, Homo Sapiens; identical to SEQ ID NO: 345351

SEQ ID NO: 477122 - DNA, 1000 bp, Homo Sapiens; identical to SEQ ID NO: 345352

SEQ ID NO: 477123 - DNA, 1000 bp, Homo Sapiens; identical to SEQ ID NO: 345353

SEQ ID NO: 477124 - DNA, 1000 bp, Homo Sapiens; identical to SEQ ID NO: 345354

SEQ ID NO: 477125 - DNA, 1000 bp, Homo Sapiens; identical to SEQ ID NO: 161147

SEQ ID NO: 477126 - DNA, 1000 bp, Homo Sapiens; identical to SEQ ID NO: 161148

SEQ ID NO: 477127 - DNA, 1000 bp, Homo Sapiens; identical to SEQ ID NO: 345357

SEQ ID NO: 477128 - DNA, 1000 bp, Homo Sapiens; identical to SEQ ID NO: 161149

SEQ ID NO: 477129 - DNA, 1000 bp, Homo Sapiens; identical to SEQ ID NO: 345359

SEQ ID NO: 477130 - DNA, 1000 bp, Homo Sapiens; identical to SEQ ID NO: 161150

SEQ ID NO: 477131 - DNA, 1000 bp, Homo Sapiens; identical to SEQ ID NO: 161151

SEQ ID NO: 477132 - DNA, 1000 bp, Homo Sapiens; identical to SEQ ID NO: 345361

SEQ ID NO: 477133 - DNA, 1000 bp, Homo Sapiens; identical to SEQ ID NO: 345362

SEQ ID NO: 477134 - DNA, 1000 bp, Homo Sapiens
gccatgaacagcaagttttacttaggcctggcaggatggaggcctctgagggaggccaggatttcaaactgttaacacgatggagggagggcatgcccgcgaacccactgatgtgatctcactctagtggggtgagttttccagaacatgcattcccggattccccatcagtcataggagggcctggaatagcttctggggcagatgcccccgctttcccggaacaggcagaagggggtgtgggtgtggtgggagtggcgtaggggattctttccttctgtagatattttcctggcattgttgacagccatgtgattggttgagggctggaggggaggaactttccagctgtgggtgcctgggttcccgggaggccatctgacactgggattgtgggggatctgggtttttggggattttcttgtttttcattatctcaccaaccagaagcagggatgtctgggttttagggtctggagactgtctttggagctgggactaaggggctgactggttcccctccaagggatgtggaagttgtgagtgcataccccttagagctggaggctgggaggttttcagcgtcttcacaagccactttttgcttggaggtggtgggactccaccaggaggctcagaacacccagaagcaggaaagctccgaagatggagaggagcagaatcttggcttcccaaagatcctgacttcctgggaagcagcgctttcggggccagcaggacacctccgtccccttgcaggtggagcagttgtacagcgtggtgctgccccctgcaggagacagcagaggcaacgggcaggcggggggacagagagcttccctggtgtactcagggagcttggtctttcgaagccaactccaatatgaagggagtgaggagacagcctctttgatttccatgaccctcaggactctgtgagtcttctctgtgactttgttcatggacacctcatctaaggcaaaggccgagaagtctgggg

SEQ ID NO: 477135 - DNA, 1000 bp, Homo Sapiens; identical to SEQ ID NO: 161152

SEQ ID NO: 477136 - DNA, 1000 bp, Homo Sapiens; identical to SEQ ID NO: 345365

SEQ ID NO: 477137 - DNA, 1000 bp, Homo Sapiens
ttaatgcccactgtctaaaggagaattctcagccagttcagacctaaagagagcaagatgtcgtttgagctttttcttctcctctgtctgttcacacaatttgacttcaatgttgccatcactgaatgcttctcctttggtttcctccactggattctctctgagggaaaactttgctttcttccgcatcattgtaattcctgaatttccatgcctttgtgctggagagaaggttttatttactatgcaataacaaactgcagacaaaacattttttttgaagttttcattcataaatgcatagacaatgggattacagatggagttggaaaatccaataatttgcacgatagcaaaaatcatcttgattgtgacatcatcatattccttttcaaaattactgtattcaatcatcatatggacaacatggaatggtgcccagcacacagcaaagagagccaccactgtcaccatcataatgacagctcgtttcttcttcctggctattttggacatttcttttccatgaatagttcgaagcactgaaccatccccaactcttttctttatccaaagttcataaccaattttactgtacagaataagcatcaccataagaggcaggaggaagaggatgacaaggatgaaggtggtgtagatcttctggtgcacagggctggtccactcttctaagcagcagatgtgttccttttcatataggaagtcatatttgatctcaagttgttgcacgtgccacatgggtgatcctacgatgactgccaccagccagaccacacctagcattgtgaaagcccttcggttggtgtattgccacttcattttaaaaggatgcacaagtccctggtgcctttccacagcaatgcaggtcatagtgaggatttctgtcacaacagcggtagactggacaaatggcaccatcttgcaaatgaaagcaccccccagccagttgtcggaaatgttctggagcatggtgacggga

SEQ ID NO: 477138 - DNA, 1000 bp, Homo Sapiens; identical to SEQ ID NO: 345366

SEQ ID NO: 477139 - DNA, 1000 bp, Homo Sapiens; identical to SEQ ID NO: 345367

SEQ ID NO: 477140 - DNA, 1000 bp, Homo Sapiens; identical to SEQ ID NO: 161153

SEQ ID NO: 477141 - DNA, 1000 bp, Homo Sapiens; identical to SEQ ID NO: 338893

SEQ ID NO: 477142 - DNA, 1000 bp, Homo Sapiens; identical to SEQ ID NO: 246461

SEQ ID NO: 477143 - DNA, 1000 bp, Homo Sapiens; identical to SEQ ID NO: 161154

SEQ ID NO: 477144 - DNA, 660 bp, Homo Sapiens
ttttttttttgccacggaaaccagatacatttattaaatctactcttagccaagcaataaagatgtctacagagttcacaacctgcaacacttcaccagggaatgctaggtaaaggcaacttcagtttaactgagtactccatttcaagtgggtaatgtctgctggttggcagctatccagtttggaaaactgtggaagatgctgttgctacccagattgttctgttcaacaagtgggcctgaagcctgagcagtgtagccagctgtgtggggagcagaggttcactccattgcttctgcagcctcctcacctgactcctcctcctcctctaataagcagcttcttgtcacagacttctggatagcttcccgctctccttcatcagtgcagttctgcaacaagatcaacagctgtctcctgttgtactgaattaggaacttctgacatgttcttattgtacccgcgaagccgatggagcaggcggctgcgccgaaagttccgtgcaccctggcgatcgtgtcccgtacgaggctgctcagaactcggtcatcgaggcttaggcggcagcgggggtcgtcagacaccagttcgcagagcaggtacctgtgcttgaaccgcaccatggctgcctccgcgctctccggtccggcgtgcaaacc

SEQ ID NO: 477145 - DNA, 1000 bp, Homo Sapiens; identical to SEQ ID NO: 161155

SEQ ID NO: 477146 - DNA, 1000 bp, Homo Sapiens; identical to SEQ ID NO: 345372

SEQ ID NO: 477147 - DNA, 1000 bp, Homo Sapiens; identical to SEQ ID NO: 345373

SEQ ID NO: 477148 - DNA, 1000 bp, Homo Sapiens; identical to SEQ ID NO: 345374

SEQ ID NO: 477149 - DNA, 1000 bp, Homo Sapiens; identical to SEQ ID NO: 345376

SEQ ID NO: 477150 - DNA, 1000 bp, Homo Sapiens; identical to SEQ ID NO: 345377

SEQ ID NO: 477151 - DNA, 1000 bp, Homo Sapiens; identical to SEQ ID NO: 345377

SEQ ID NO: 477152 - DNA, 1000 bp, Homo Sapiens; identical to SEQ ID NO: 161158

SEQ ID NO: 477153 - DNA, 1000 bp, Homo Sapiens; identical to SEQ ID NO: 345380

SEQ ID NO: 477154 - DNA, 1000 bp, Homo Sapiens; identical to SEQ ID NO: 161159

SEQ ID NO: 477155 - DNA, 1000 bp, Homo Sapiens; identical to SEQ ID NO: 161160

SEQ ID NO: 477156 - DNA, 1000 bp, Homo Sapiens; identical to SEQ ID NO: 161161

SEQ ID NO: 477157 - DNA, 1000 bp, Homo Sapiens; identical to SEQ ID NO: 338841

SEQ ID NO: 477158 - DNA, 1000 bp, Homo Sapiens; identical to SEQ ID NO: 345383

SEQ ID NO: 477159 - DNA, 1000 bp, Homo Sapiens
ttttttttttttttttttcatatttaaaaagcatatatttatgttatattttttctaaatacacaaaatatctttagtaaaggtctaacaagcaataaaacaacaaaataataaacaaaacaaagaatagaaccaaagagctatatgaattaaaaagcaggcagtctctaaataaggactgatacatacagtcattgaatatgaggaagaatgttactaaacaaattagtctagattcaaatgtaaatgcctttttctaagtttatagacataattaaagactgaaacaattaagacctttttttttttggtttttattccacagtaaatcaagctacagcctattctacctatctttaggcagtgtcttttatgaaatttttttcagaataactctatgaacaaaagagcccaggttgttagcaccattaaaatgtgtgtactacataaaaacaactagacattttccatggctctacatgacacattttcaagtttgtggtataagcatttacaattcacaccatatgtggtgttcaccttttatcttgtgtcctgctcaccaatgacattttacttacacgtacttgttcagtaataaatctgtacccaggaaagacaacataagtatgaaatctatacactgaagttagccaaaagtgagcatgtgttttctgctttaatttactttaatgcaaaaacagaaatgactatttcttaaagtgtatattttaggagaagatgtttcaaatgaaaaagagcaccacaattgcatcaatatgagaaatagtgaatattctatctatcttcttggtgttttcaatcttttagaagtgctgcaagtcatatatctggtttgccaactgaaccttctcatctgcatcttccaaagctttatagtagtcttttttgatggatgccatttgctcttccctccactcaggtttatttttctttgcattcataaagaattcactgactctttgttctagttgatcca

SEQ ID NO: 477160 - DNA, 1000 bp, Homo Sapiens; identical to SEQ ID NO: 345384

SEQ ID NO: 477161 - DNA, 1000 bp, Homo Sapiens; identical to SEQ ID NO: 345384

SEQ ID NO: 477162 - DNA, 1000 bp, Homo Sapiens
ttttttttttttttttttaattgcagtcacgtttatttgcagtttctatacacactttctaggtaatcaaacttttctgatacattttttttgagaggggttcacaatgaaactgtcaccatttttactaaaaataaatacaagacttaaagtgttgcacagctctaaaatatacaaaggcttggattgaatgtaaacgttgaaaacatcttacaaaagaaaccatctttgcagcaatttaaaaagttcatatttacaaatattacaaaaatacaaaatggatgcaagtccataaaccattgtcgtttcggccagcatgaactggttctagtaccaaaatagttacactgtaaccttcttcatagttttaaatctttattaccatctagttctctacgtgccaccactgcagcaaatgcactcactcactgacctttggcaagagcaaacagcatgttctgtttgctacaactagtccatgtcctctacttagccaaaaacaaatcaaaacaacaacaaaaccaaagtagaatttttaaaaaatgaaaaaatttcccctacacaacatagatacgttgtataaacataaaagaacaaaaaatcgcatcagtgcaaacaacagaagaaaagttcggattgatgttcttcacaatacctaacgtgtgtaccctgcttcaagacggcagtgatgtttaagacagccctaaatcttggtcttgtttgctatgtaatcaagccatgtagaatattccagattattagggaacttcctgctttttcttctcagtttgtaactcaatactcttttccacagtgaattttaaatccatctttatttgggttttttaaatctatgaaatataaaatagagaaactctgctatagatttttagagtaaacaaaataagtaaaactatattataagggttagttctgtgatcattacatatagaaggtatcttattgcctcacaattcaagtcaatatgtattttaaaaaa

SEQ ID NO: 477163 - DNA, 1000 bp, Homo Sapiens; identical to SEQ ID NO: 345386

SEQ ID NO: 477164 - DNA, 1000 bp, Homo Sapiens; identical to SEQ ID NO: 345387

SEQ ID NO: 477165 - DNA, 983 bp, Homo Sapiens; identical to SEQ ID NO: 345388

SEQ ID NO: 477166 - DNA, 1000 bp, Homo Sapiens; identical to SEQ ID NO: 345389

SEQ ID NO: 477167 - DNA, 1000 bp, Homo Sapiens; identical to SEQ ID NO: 345390

SEQ ID NO: 477168 - DNA, 1000 bp, Homo Sapiens
aagcagaaagagcaacaacattttatcttattacaaataaacatttcacaaaaatgtaattgggaatgtatatgtactgttaagcagaacacagaaaacataaagaaataaggtattggggcctaaaaatttcatttaaaaatcccatccatttgctcttacacatagtaggtatgcaatacatatcaactgaactaaaagtaaacactctataagatgtgcttgcaaaatgtgtaatgctgtagtagtaaagtacaattttcaaatatgagattttgtttgtcagatttttaaaaagcctttaaaaatatgatatgcacaagcttgccctgagggaaaaataagatggactatagattacaaaatctttacatattttccacaatagcattttgaaattggaaaagagcaaatagttgtggaaaaaaactgaatgaacatattactaaaaattcagtgcactcacaactacctgatggaatatttgaagcaccttgtctcttgccttcttataatatgaaatgtatgaattatataggccttgatcttcagaaacttaagaaaacttcgagttataagccaaaatgtcatcagaaaaagaaaaatctggtatgaaattttctaccataaggccactgtttaaagttctttcatgtaaagacactatacaattcagacacttgtttttgtttttattatgtaagcaaaactttcaacatataaacgtctgaatattacttggtgaagttctctctatgaaaccatgctcagagaaaaatgcatcaacaaataatgcccttcaagtgattcttttgagactttttgcaaaggaaactgtagttaatacaacttttaaattgaatactgtaatttaaaagcaattgttaggtgtaaaaaagttgcagcattccactactaaaaaataaagttattttatcaagaagttacagtattagtgccttagtgtcacttctaactcctgacaaaaagagagagatgc

SEQ ID NO: 477169 - DNA, 1000 bp, Homo Sapiens; identical to SEQ ID NO: 161162

SEQ ID NO: 477170 - DNA, 1000 bp, Homo Sapiens
tttttttttttttttgatgactatcaatttaattataactttttgatatgtgatattatctgctcaaatgatacataaatacctgggtctattaatttcatctttacaaacagcttcatgttgacactcattttcttgatcatcagttgtattttccagatacatgttgccagcccatctgagaaaacatagataccgatattcctgactgtcttcttcactcaaacaactgcatccatttgcacaaatctcttttgtgccttcatgtgggaaccaacatgaagaattattatcttcaggatcgttcacataggttgcatcttcagtgcagtttgcagccagaaagaaataggcatcaataaccccttggcacttttcgccttcagatcctgcaaatcccaattgccacacatattcaaattgagcaggacctttatcttggcaaataccatggaaggtgactccacagtagcagaggtgttgatgaattaggtaaacattcttcaaaaaccaacatggattttttgtgcaccctggaatgcatacatatttgaatcttccaattatattgaaacaccattcttcattcagacagttgatgctgagcagtttacagtggtcaattgctttctcacagtttttttcagtaaatcctgatatacagctgcaaggataatctttctcacatttcttacatgtagcattattcctcaaaggaaatgactcacatgatgtttgaatgctcttacaaagcaaatctgtaaatattggtgaacagatgcacataacatcatttgatattttgatgcagtcagtaccattctgacatggtactaatgaaaactcactgacatcagtttcaccattttggctggaagatccttttgggcattcataagtataagcagaactgctatttgggcaaattcctcttttccaaaaaagcagagaaacacaaggttttgctgacacctcacagaatggacctgaaaattgctca

SEQ ID NO: 477171 - DNA, 1000 bp, Homo Sapiens; identical to SEQ ID NO: 161163

SEQ ID NO: 477172 - DNA, 1000 bp, Homo Sapiens
gaaggtcattcttgcgatgggtttattgcaggagatgatggaccaaatggctctgacacatgcacacgctcctgggcacgcctgctgcgtgctcgcttcccatgacccccagggccctctatgcctcccccccagggcaccctgcccactgcccccacttcatgtaccaccaagccctttccttttctgggcaccactcctgagcagcgtgaccagcggcctccaagtgcatgtggctcagaacataaaagcatcttcaacattcgtcattgagccaaacgaaacacagtgtttggctcaagagccggcgacagcctgcatccctatccacacgtgaacctgcccttggcttgtgaccggagggatggccgctcttccttgtcatccagcacccggagcatgtatgtgcccagatagatgagaaactgtcccgtcacctgggcggagtaggacaggaaccgcagcagactcctcagcaggcccttgagtcccgtgcaccggatgtcgtaggacacggagtacatctcatacatggtggccttcacgttaaggcagccgatgaagtccttggggttcagcctgtacaagtcgaaggtgactctcgctattcccgacctcttcggcggcgagcaagtggggacgtgctggctgcccggcatccacttctgtcctttttccaagatcatgaaatgcgtgttgtctcccaaggtctgaaagaactcttctgtgtccaccacggtgccatcttcctccagcaccagagtgaccagtccggtagcgatgacgagggcatccagagtcttgctgatgagctcctgcaggctgcttgccatcaccccacgccggctgctcctgtcatggttggagacccggaaagggcgagctggatgcatgagcggggtgaacaggactcgcttagtctgtgatcccataaatgtcaggggcctggagggctccgccggacggttggggcctcccctcggagaccagagcccgcgct

SEQ ID NO: 477173 - DNA, 1000 bp, Homo Sapiens; identical to SEQ ID NO: 345394

SEQ ID NO: 477174 - DNA, 1000 bp, Homo Sapiens; identical to SEQ ID NO: 344342

SEQ ID NO: 477175 - DNA, 1000 bp, Homo Sapiens; identical to SEQ ID NO: 345396

SEQ ID NO: 477176 - DNA, 1000 bp, Homo Sapiens; identical to SEQ ID NO: 161164

SEQ ID NO: 477177 - DNA, 1000 bp, Homo Sapiens; identical to SEQ ID NO: 345398

SEQ ID NO: 477178 - DNA, 1000 bp, Homo Sapiens; identical to SEQ ID NO: 161165

SEQ ID NO: 477179 - DNA, 1000 bp, Homo Sapiens; identical to SEQ ID NO: 337677

SEQ ID NO: 477180 - DNA, 1000 bp, Homo Sapiens; identical to SEQ ID NO: 160234

SEQ ID NO: 477181 - DNA, 1000 bp, Homo Sapiens; identical to SEQ ID NO: 345402

SEQ ID NO: 477182 - DNA, 951 bp, Homo Sapiens
ttctcagtaagatcttgtatcatgtatttattccaaaaaaatcggtcatcaacctagaaaaggtgcaggaacaatagttcagaaacacattatttcagttttcctacaaaagccaaaacaggccatcacttcttcccaagtgcaaaccctgctctacgagctgtgagtggtaccttctgccagaggggccgaccgtccctctccccagtgctctgcctctgcacggaattggtcaggtcataggtcaagctataataaaaggattctgagtccatgaacatcttcagcaactcttcaagtaatctcctctccaacttctccttctctttactttccttaactttctttttattaggagcagacacattggatttaatatgcgtaaaggtcttcagtagaaactttgagtcatcaggagatggtatgatcttctctggtttgttaataccaaaatgatgcttcttacagagctctagctcaagatcctgaggttccatttcagaaagtgagagcacagcaattttggtaactttacagacctcatggtctcctgggagtttgcccaccaatgctttctgccgaattagaataagccaccatggaagatctgaatgaagttgaattttcccaataacaccttctaccaaccccaaacaaatgggattccaggcaagaagtagatcagtagcgggtcggagctggaggccgccgtcgcggcggctgcaccacagcgcgcgctcgccctgctgcaggatgtagtggtccttggcttggaagagctccatgctggccccgcgcgcccagggaggcggcggcccgcgggcggcgcacggggcgtcctagtcggtcgaggccgccagagcccgcgcctcggggagcggccgggtaggaaccgcgccgagaagcagcggcagagggaacgccccggggcacccgaccggtaggaggaga

SEQ ID NO: 477183 - DNA, 1000 bp, Homo Sapiens; identical to SEQ ID NO: 345403

SEQ ID NO: 477184 - DNA, 1000 bp, Homo Sapiens
ccaagcaacaaacagatcttccctatttcttgtgatttatttgtaacattgtattcatgcaaaaataatacttgtttcattgaattaacatttagacagctttagatttgggtcctatagccatcgtctaaaattttacttgatgttgcttcatccatatatcattttagttggtatgatatgatggtttgtttttggtaagttacaaaatgacaaacatatccagttgaccagagttcaaaaaccaagatactaagcttgatcatgcacattttactttcattcttgtaaaatggtttgaatcagatattccattttgatttaacacttattgatttaatattttttcctttttaatcatgtttctaaaaagaacaacaactaaaacataaaagaaaatactgtcccacatccactgttcacaacaaggaagagcagcaagaatcacactgaccattgttaggacatcagtcaggtggtgacactgtagtaaacattgaatgtcatcaaaatactgcaggaatgtgacaattactataacccatacttctgcaacagttcagattgccattggcgtttgcgctctggaaaataatctggaatgtggatttttttaaaatcctgaatacactttttcatttcttcttccacacttagcttctcacagactttctttttggacagatttgtttcccgggacttgctgatgagggtctgaaagagttcactgtttctgcgtttgtctggtgggggtatccattgtacaggtgcttttttagaggggcgatccaatgttaaagtgttaggttggtgagctgttgcctgctgggcactggatgggttgtcctggggagtgcttgcctctgaatggctgtcacaactggaagtggagagctcattacaggaagtcccactttcacttcctttatcagtgactttgtcatgtttcctatcttcatgttcttgtttaggtgatactattttctgaggtggtcggaag

SEQ ID NO: 477185 - DNA, 1000 bp, Homo Sapiens; identical to SEQ ID NO: 345404

SEQ ID NO: 477186 - DNA, 1000 bp, Homo Sapiens
ctagattcaattaatttaataaaatagaatatacatagagattctgcacaaacgtattgctttctcccaacagcttctggtgtcgggaacctcagctgcaccgggcctctccttctgcctggagccagagttgccggggctgctgcttttaactctctttggaagttctgcttgcaggtacccagagccactgaggcagggaggagcgcctccgcctccttggtgtctatatggaacttttgtcaggaatatagcccaggaggaggagctaggacttggcacccagtggagaaaggtgagtgggaaagtggggcaggactcaggggtccaggtctgctgggtcagaggataaaccggagagactcagcacatctttctttggggagggcgaggcagccatgctgtcaggggggccagaggccaagggatccttggagtcgctggacggagccctcctccggaggcagataccagggctgggcggggtccgaggaccttggctctcgggggggtctatggtgatactaggcgggctgagttttttcttgggccggctcccaggccccccaagaggctggcccccaaggttagaggggtctgtgcccaggtggggttgggagccgctgtccaggcagctgacggcgatagagtgtctcctctgctcatccagccaggacgtaggccggcgctggcagctctgggcctccacgctgtagcacttcttcaggtcccgtggggatgggggctcctcctggccgccagggggcaggaggtctcctgaaatccagctcagctccgtgtccaactctaagctgcttctggtctctggagggcccttgccccagttgggttctgggcctgggcaaggggctggcggggtcatgtgcttggagatcttgctgtggctgcgggagtgctgctgtgcctgggtacttgactggccccagaaagagtaggcccgggccaggggcggggagggcccactcacctctgccagcag

SEQ ID NO: 477187 - DNA, 1000 bp, Homo Sapiens
tttttttttttttttttttttttttttctagattcaattaatttaataaaatagaatatacatagagattctgcacaaacgtattgctttctcccaacagcttctggtgtcgggaacctcagctgcaccgggcctctccttctgcctggagccagagttgccggggctgctgcttttaactctctttggaagttctgcttgcaggtacccagagccactgaggcagggaggagcgcctccgcctccttggtgtctatatggaacttttgtcaggaatatagcccaggaggaggagctaggacttggcacccagtggagaaaggtgagtgggaaagtggggcaggactcaggggtccaggtctgctgggtcagaggataaaccggagagactcagcacatctttctttggggagggcgaggcagccatgctgtcaggggggccagaggccaagggatccttggagtcgctggacggagccctcctccggaggcagataccagggctgggcggggtccgaggaccttggctctcgggggggtctatggtgatactaggcgggctgagttttttcttgggccggctcccaggccccccaagaggctggcccccaaggttagaggggtctgtgcccaggtggggttgggagccgctgtccaggcagctgacggcgatagagtgtctcctctgctcatccagccaggacgtaggccggcgctggcagctctgggcctccacgctgtagcacttcttcaggtcccgtggggatgggggctcctcctggccgccagggggcaggaggtctcctgaaatccagctcagctccgtgtccaactctaagctgcttctggtctctggagggcccttgccccagttgggttctgggcctgggcaaggggctggcggggtcatgtgcttggagatcttgctgtggctgcgggagtgctgctgtgcctgggtacttgactggccccagaaagagtaggcccgggccaggggcgg

SEQ ID NO: 477188 - DNA, 1000 bp, Homo Sapiens; identical to SEQ ID NO: 345405

SEQ ID NO: 477189 - DNA, 1000 bp, Homo Sapiens; identical to SEQ ID NO: 246610

SEQ ID NO: 477190 - DNA, 1000 bp, Homo Sapiens; identical to SEQ ID NO: 345407

SEQ ID NO: 477191 - DNA, 1000 bp, Homo Sapiens; identical to SEQ ID NO: 345408

SEQ ID NO: 477192 - DNA, 1000 bp, Homo Sapiens
ttttttttttttttttttactatcacaatcaatcaatagatttatcaacctggggctggggctgaccgaggaggtggagggtggcagaggctgggggacaaccacaggccagggagaaagaggagacagaggaagcaccgagggtgactacgttgtcttccctagatcaattttcttctggatggctcgtgctgagtggtagatgagcgaatcgatgagtccagccactgtgaacatgcccccaatgatggcgcacacacctgtcaggaagtgggtgaaggacctgtgcttctccgtcagcttcaccatcatgggcgagagctcatagaggacgaagactccgggaaggccttggtcgcccaacagcccattggcaaccttctcatgtctggtcacagagaactgatttgtcctcagtacctctccgtccaccttcatgtacacagtgggcaccaccttcacaaagtactggaacatcatggaggcttggggcgcagtgacattggtgtggtccagggggttcacaatgcctggatagtcctccccaaatgacaggtgctggatgtagtgggtcatgttgatgttgtcaaggccaaagctctgcaagtcatggatctccacagcatgtacgtgcacatgggactgctggaagctcttcccaggggcaaagtggaagtttccggccaccttattgacttccaagaagccatacacctggcagccttcattcttctgctcctgcatcttctggctgaagccctctcgccggcactgctcaatagtatctgggttcttgaaggcccagcctctacggcgatatgcctcccgcacatcttcacaggtgttacagcacttgatatcttctgcctcagcaccatagcagctctcacagcgatcagggtccagggagtcagggtcaaacaccgtcacctcgactttcccaagctcatgccgctcagcctctgagctcacggggatgccatctttatctagtcgttgc

SEQ ID NO: 477193 - DNA, 1000 bp, Homo Sapiens
tttttttttttttttggtaaaaaacaatctgttattttttaatatttttattgatatgctcaataataaaatacaagtgttaataaatacattggtacaggataagtttatatccaacaacagtaaaagagtgattcaagttgcagtaatacactgacaggtaaatagtataacattagaaaagcaaaattcttttaacttaaggacagactgaaccatcaggtatgggtctgagatcaagtaatacaggtagcaagagtttttcccacactggaaaatgaaggcagttttccaaatactgtgaatttacaaacattggggaagcgatacaatccatatactgtatacatctgccagtgttctctgggattcagtccgcacattttgtaagtgccggtggtacctaatgaaggcattgcatataaactcaaaagtctgtttctttattctctaaaaaggtagcacggccacttgcttatatgtgtgtctggatgttttctatcaaccccctgctcccaccactcctcagccaatccaaagagaggcttgcaggctctcattctctcctacaaagctagtcttggtttctgagcttggaaccagcaggaacaaagcaccatttacaccttatttctctgcaccaattgtatggatacactagacttaggtccagagtgggcactgtgatacagttgatcccttaaaaaatttcctcctggtaccttgtcaaatgggacaaaaagcagattaagtctataaaggctgtccttctctgcctggcattaggagtgggggacaactggggcattacttctcccagggtctgtcattctgcagagttaacatatattgtgtgcagtacattacaagccatcaatcaacatttaataatataagccgtgatattcacattattctcccttttcaatctccattaaaaagagaagcacaaataaaatgctgaaggaaagccacacatttctcagagcccaagtaaaat

SEQ ID NO: 477194 - DNA, 1000 bp, Homo Sapiens
tttttttttttttttttttttttaagggatatataaatacatttattggtggtattcctgaatgatgaatgcagagaacagaatacaaagaaatcagcacataaaaggaaccattaatctttaaaaatgctatatacttacattttgaccaattttgcatatttgtttagatttacaaacaaatgtaaagctaattccaaagttttcttctgaatatacttcaaatttgaattgtagtgttctccattccaaagccagctgttttttgctggatttacaccaactatgatttactttgtttgtatctaacctaaaagcaagactctgcaagctgatcctgaagcagccagttactcaggaattttacaacagctattaaagagaggataaagccacatgaaagagcaagcctcaatactagatacatagatacaagagaaaataccaagaagcaaaaagaatcacagaaataccaattctattctaaagcataatttctaattctagcagcaattcaattagcaatagcttaggtgcctttattccaaaaaacaaaaccattagttctttcactacaatttcctgactttacccaataaataattatcaagccttcatattcttttttaaccactcaagaacataattcatacattacagaatcattaacaaaagaggccttcaaacatactgctgaaagctgcaatatagtttgagggccagatttcaatttacataatattaccattcataaagagtttatgacacccagtacgatactgtccagcactgttaactcagaaatgctccatccattcttgccatcagagaattacagatatggatgggattgttaaaagtctaacagggcctccaaataggattgcacatgaaataattatgaactatgataaaactgtgacaacacagctagcttatagaactgagtttttcactataatagcactacagaattatgacagttaaatatcagaattat

SEQ ID NO: 477195 - DNA, 1000 bp, Homo Sapiens; identical to SEQ ID NO: 345411

SEQ ID NO: 477196 - DNA, 1000 bp, Homo Sapiens
ttttttttttttttttgtgttgagataatttaatactggcttggacacactggattccaggtgcaggaaccctggaaccccctggaatgtgctagagataagcataaggcatcctgtctgtgcccactccaccctggttgggagtcgcagaatgaggacctcctgacttgagacagattctttatccagagaatctgagattccaattcagatcctggagctgggcctgctactcacctccccagtaaatgtccaggcagcattggacagagaggctggccccgccctgacgggggctgaagaacaggcccccagcagccttgttgtttggctactgagcacttcagaggttgggaggacctggaacagtcgccccagatccatgtgccttctgtttggggtacacctgagtagcctctaacagccactgattggcaccaagagagaatccaaatgttggcatcacaaaccttaagtatggagcagggagcaagtgcctgggggctgtttgccccatcttatgaatgaatagctctcgtaatgtctctggatttttggagacgggaagaaatggccaagtaacagcatcctcattcccaactctactgagaatcaactacggtggaacagaacatcaggggctgcatgggtgtgcgcctcagtttccctctactgcccccaaactgcctactccaggagtttcccaaaagggagggggagatgaggagataggcatgcaaatgcccatttggagattttcagctactctggccattatcccatttcacagcacaccagacaggaagggcaaagaggtcccatcatgagtgccaaattgattgatactggctgcccagaacactgtgctgggaagaattctgacatcacccatgtgctgcacttgattggtgatgtctgccatggtcacagccattcaccatccctcatcttcaagctgggctgtcccctttccctgaaccagagacaattcgccagcctg

SEQ ID NO: 477197 - DNA, 1000 bp, Homo Sapiens; identical to SEQ ID NO: 345412

SEQ ID NO: 477198 - DNA, 1000 bp, Homo Sapiens
taatgggagcccttttattgggagagagggaagagaacacaggtgagggtgaaggtgaaatatgaagaagctcagagcacacctttgttcctctgccgtgttaatccatgccgtgccatgctccagccctcacaaagagggggaccccatccccacaccaggcagggagcatttaaagcaatctccacaacagatttttaaagcataattagagctcctgccatgtaagtcataatgaaaagtctgctggatagctagagctgtagctatagctcaactttccaaaacaaacttattcttgtagacacatggttaaacataaaggagtgaagcataagctcagtaagactaactgggcttctaaatagtaccattatgaaaaagatacaatgcacttaatttctgtatctaactatttagaagtgaaaatgctccatacattacctatttcccctccccgaaaatcccctaaaaactgactaagaaatcttcagtattcacttgcgctagttgatatttagaacaaagttgacaacttaaagctttataatagtctgttttaatagaaacaagtgttggaatcaatcaatgtccatttcaggaagcttcttgtctgaatccgaaggcacagctgtgtctgtaccctgctcagcagcctgggggcctgggttgtctccttgtccatccactggtccattctgctcttcctccatatatgtcacctttatacctgttaatcctgtaggcaactgcacaatatcatatgcaaggttagatttttctgcctccacaaatggatcagagaatgctcggccatggaatcttttaaatccttggactgtgttctttgcattagaaattacctggcttttagctgctgctccaattgaacgattcttaggaccaaaagaaatgcaagccggcgtgcagcggtcgctatactcattagcgatagtctcgatgccgccggcgcgggccacagcgacgtagcagctctgga

SEQ ID NO: 477199 - DNA, 1000 bp, Homo Sapiens
ctggtgatgggtgatgctgagacctctgcatatacctgttggccatctgtagagcttctctggaaaaatgtctactatggctctttgccatttttcaattgggttatttggtttttgccactgagttgtatgagttccttatgtatttggatattaaccccttactggatatacagtttgcaagtattttctcccattcacaggttcgtttttcattttgttggttgtttcctttgttgtgcagaaactttttacttcaatgtaatcccacctgtttacttttagttttgttgcttgttcttttagtgtcatgtccaaaaaaaaatcatcgccgaaactgatgtcatggagctttcccctgtgttttctcctaggagtttttttggtttcaggtcttaagtgtctttaatccatttgtgagatgatgtttgtgtatggtgtgcgatgaggaccccatttctccatatgacttcaggggtagccattcccacatctcctggcacatgtggaccactcaagatcatcaagggagcgagtgatactgaatctcttggatctcccaaatgatctccgagcagacgtgcgttgagaaggctgagtgagtccagttccccgcccaaattttgagccctttttatcttccttagtctttcgaacatttcgatggggaccaaaaatgctttgcattccaaaggccttcctggaccactccctcttcggggcattcagcgggggctgcgcgaagctgccctccaccctgtagcggtctgcggggatcttgctcataggagggggcagtgtgccgcagttgatgctggaccagccatcggtggaatctgtgtaagagtcctggtcgctggtgtgtccgcactgccactcccggagcacgtggaccgggagccagcgctggttgaaaccacagccagcacccacggtgcccctcttggaaggggggactgagctcctcaaggaagctgggggcacctccacaggagaggct

SEQ ID NO: 477200 - DNA, 1000 bp, Homo Sapiens; identical to SEQ ID NO: 158204

SEQ ID NO: 477201 - DNA, 1000 bp, Homo Sapiens; identical to SEQ ID NO: 161167

SEQ ID NO: 477202 - DNA, 1000 bp, Homo Sapiens; identical to SEQ ID NO: 345414

SEQ ID NO: 477203 - DNA, 1000 bp, Homo Sapiens
gatgtaaaaagttatctgtattttatttggacgtttacaaaggagtgaaaaccagccaacaacagcctacctaataaaatacaaaatacaaaagttcataatacaacatttatcaaactctgaaaagatgggaactaactcaacttaaacatctaagagacacctacagccaacatcttggttaatggtgaaacattcaaaatattcccattaaagccaggaggaagccaaggacactgccgtcaaattactgattcctggtttagcggttccagtgagtcatgcactctccttgcttccgttaaccgccccccccccaccccaacaccttttgtctgattcgtcacatgtcctttgatcccctttttcctcaatctgtttgaaattttaccttctattccaattcatttagtggttcccaaagggtacccacgttgagacttaaaaatgtgtcagtctagatttttattgctcttatattcagccagtctatcgtctccaggcactagagaagcactttagtaacttctagctccttctgagttttcgcatgtcccacatgtctatatgagtgtcttctggaattttaattctaggtcatcaatcctttttccagaatcgtacttctctggacttaagaatacagtttcctaatttccatgcttagtgatccttgttgcatcccacttcttccaggttgtctgggttggcttcttcttggctgaaaaacgtgacgtgtactttcactgtacatgacagttccattccaatcgccttgtacagaaagggtgtttggcagcttgcatgttgtaagttgcgtactccaagttcaggggaagctcaggcttcaggtccagtcgggggaggagtggagcagaagtggggctggggggaacgtccaggtggaaggaagggaggctgggaacaacgtgggtggcagatagtggtcaatacgcaatgtcggtgaggaacactgggaccccttgcacgtaggtgccct

SEQ ID NO: 477204 - DNA, 1000 bp, Homo Sapiens
cacccacatggccattttattccatgcacaaataatatgatgattttataaacctcgtttcacaaacttttgatgaatccaaggcatggctgccttcgccttacgataaacaagtcctgtctgttgcttggctcactctttgatactggaaggagagtctgttgcagtcagaaagaaaagatgtcaaagtggaggcagccagttgctctggtggaggggagggctggtgtcccaggttagcattacctggatggggaccagttttgcaggtccagagctcagtttatcagtggctcaagggagcactgattcatacgttccaagctcatgggagggagtggcgtaaatccaggcctctcaaacttcaatatgcacaggaatcacggggggcgcctggggatgggaatctcctgaaaaatgcagcttctaatttagtacagctgggctaaggcctgagattccgcatttccaaccagctccccactgcactttgagtagcaaggatgtacatcggaggccaatttttctaaacttttggtacctgtcaccactggtttcctcacaacccaaagactgcttagggagcatggtggcccagaaaggggactccgccttccagggttgctgggtttcctgcagacctcatgtcttcctgcctttctgctttcaccttctatcaacctgggcctgtcagtggctccggttatacatttccttggttatgttcccagcctgaagggagacctgctgactttgggtttctctgtgtcccagggttttcccagagattcattaggaagcaatcttaaagggcgggcttcttcctctgacggctaacctagtcctttttcactaattcttcccagtttcagtctctgtgggtgactctccaagagttggaatgcactggtcacggtgttgacaacacagataagacgaatcacatttagaaataagtaatcccatgaggcagccagagagatgggcagtaagaggctga

SEQ ID NO: 477205 - DNA, 1000 bp, Homo Sapiens; identical to SEQ ID NO: 161168

SEQ ID NO: 477206 - DNA, 822 bp, Homo Sapiens
gagagtctgcaggtttccttttaatcaaggctctactgaaggtgttttgtggggctaaaagcccccaaaacatgaaatggacatgtaacaccacctggatcccccatagcaggccagaccactctggcgagcactgctggtctgcccaaatctgggtaatcagactgggtattcattggctgcatttcaaagcacagcactgctttcagccaggatgaagtgggagtgaacccagctgctagcagagctgccactccaggctgagagccaagtaccagccactgccagtgaagactggcccctttactgaagggagttgttcagagtccagccaccggccctggggagggagagaagtcagggtattctgctcggggatggtcagggctccgcagctccatcgccagcatcctttggaaagccgcctctggcggagacagccggctgggggggcgctccaggtttggctgagacgttcccgccaccagccggctccgggcgccggcggcccagctgccgtaacatctcctcgcaggctgcgatggtgtccaggagctgccgctgccgctgctccaccgcgtccagcagctgctgggcgcgctcctcccggggcggctgtgggggtggcctcccgccgagccccagccccgccttcccgcggtccacgccggcagcctccccccgtgaccagtctgagcccgggccccattccatctccgcttgcgcggcccgaccaccgcccccctttcggccgcccccctccccagcgctgcgttagggcttcgcaaggctgcgccccgccccgtccccaccggtctcctt

SEQ ID NO: 477207 - DNA, 1000 bp, Homo Sapiens
ttttttttttttttttgtagtgcagagctttagagcaagcacagttttatttatttgccttaaaccaatatttccggataaaaggtatatttttcttgtggagattgtagaataactatcattagcaaaggcagaaagtattcatttcaacttagtaaagacatattttttcactatcacagaaagatgacctttacataaaaattgttacatatacttccatagatactaatagtaagtatgattttttttaaaaaaataactttctaagacaaatggcaaaggctttctttttcatgaattctttggttataaacaggttttgagtgatttttgttctatgaagtattaagtgattctgctgatatctgttctgtgtgtcctttgaagaccagaatataattaattttattctggtctaacatatttattctgatttacattgcttttatgtaacataattacagaatgaaaatatacctttagatctgacatatatcgttgatgaagctcctgctgagcatgttgcataagcttttcatccttttaaaactaaaaactcagaggctcttaacaggaaggataaacaaagctgaaatacgaactctgtatatcttccaatgattctcgacatgatgttttgtattcactggcccagagactcattttttctatgcctggggacattattttctataccattgctatcatctgatttcagctgttcaatctgctcaaattctttcccctcatctgagtgcttctttttcttttgtgtgtacttttcacaaagcagaatggtggccactaaaagaatcacctcagccactattacaagaaatggtttgaggggcaccaaatagctcagcaccacaagctcaatgtgttcttcactctcgcctaattggaatagtgcacggcaccagtaagattccccatcttcctccaaaagttgtgttatcttcagctttgtttcgttagcatatgttccattgatcac

SEQ ID NO: 477208 - DNA, 1000 bp, Homo Sapiens
tttttttttttttttaatagaaaataaagctttatcatcaaaaggcttggggttaatacaggaatatttcacaggacgttaaacatacaaactaaaagtagctgtttagaattatttgtcaatattggaattggatgacaaagaaacaaggcttagaagtccagggccagaaatagaaaagtgaggttctgaaggataaaatgggttacttaaaaaggagatgtagctgatgaatggtagaaggggaaacttgattcttcatcacaagtcaaattctcttcacatggcactcgaggttctccatggctcggctccatcctgccttttatgctttatattccactgttcactttcatgtgtgaaaatactctctataaacaaaattcctttctttcacaaaacacacccttctttccttagtttctatgccattgtttctaggatttcttttcctttgctcaaaatttggaacaacagccactctcctcgtgcgactttccatgactctccacctggatttaagttctgtctcccctgtacccacctctaactttacttaacaccattattgtaacagtagctaaagacagacttggcaccaaccaggctgggtaagtttagagattaatgaatgtcaggggataagtaggcacagtaaggaaggcagtgttccaaaagggagcaatggcatttcaaagatcaaagagagaggtcaacaactctggctgactcatgcactcttggattctctccctttgagcaaaggctaagacacgagtctcctcccaaaagcggcggtgcccctccttagtgagcttccaaaggcaagagcgaggtcttgcattatcttcatccttaaggctgtctggcaccttctcaaagctgtccaggaagcagaggttgtaatgaatggtgctcttccagccatccggagctgtccagaaaaaggggaaatgctgtcgggtgaaattgtagatctcctgcacactgaggccacagt

SEQ ID NO: 477209 - DNA, 1000 bp, Homo Sapiens; identical to SEQ ID NO: 345416

SEQ ID NO: 477210 - DNA, 1000 bp, Homo Sapiens; identical to SEQ ID NO: 345417

SEQ ID NO: 477211 - DNA, 1000 bp, Homo Sapiens; identical to SEQ ID NO: 345418

SEQ ID NO: 477212 - DNA, 1000 bp, Homo Sapiens; identical to SEQ ID NO: 345419

SEQ ID NO: 477213 - DNA, 1000 bp, Homo Sapiens; identical to SEQ ID NO: 345420

SEQ ID NO: 477214 - DNA, 1000 bp, Homo Sapiens
gcatatacaattttaactcactttattgtgtgtaaatatatatatatatatatcctcaagtgaatgatactgttctcaggtttttctatatccaaggtatactttcttatgttttgacattcgtttgattacaacatgcaatttacaacacctgggactacaacaggacattaaacacagttctatccagaggctactacttcttgggtaaggactagtttgggctcctgcactgaacaatggtgtgattattcgatttcacagacaacttcacagcaacacgcaaagcctaagcgtagtttcggttagcctgtgttctaagaaatccacttccagataaaaacgtggttcccccatattgtctacacactaaagcacgcctttaccatctggcagagccagatactgactgggaagtgaatccttctttctcgtgaaacccaaaccacatgtaaaccatctgcagggtcctgtgctgtcagtgaactgcattccccaagcacctgcttctaagagattttcttaggttgttttccaactatgggctccattcagacttcaggctaacctcacacaaggtcagatcccaccagacacagaattgtcatttttgaggaggactcaatgtttggcaagcgtcccattttggaacctcatccacaagcacttgatgaagcacaatgaatggacggctattcgtccatgcctgacatttataaaagcacaagggctgccagaaaccttgacagagagaaaaatcaattatttctctccctggcattagccagctcttgccgactattcatcttacgcgtgatgatgactaatatccgtcggatggcaaggagccgctctttgagcgaggtcatgccgaggatggccagctgagccttgcgctccaggggcagcacggccaggatccaccaggaccaggcagggccgctgggattactctgaggctcaggttctctgtctggcattaccccaaaatgacttaaaa

SEQ ID NO: 477215 - DNA, 1000 bp, Homo Sapiens
cagagctattttaattttattttaactgctgatttctctattcagatctctcgactcagaagctacagatgtgggtttagtccctattattggatgtagcacttgattcgagggaggcagatgaggagctttgtagcaggcagcctgggatgaaatctcagccagcccacttttcctctcggtaactgtgacccagggactcagcactgcccagcttccatttcattagctctattgctgctgagccttcagtacaatccttccacttacaaagactgcttcaggaaagcagagataaaagggctgtgtacctgtagtaagagaagtatagtgaagtgggtagagcggaagctctggtctcagggccacccaggtttgaatcccatcactactacttcctggcagtggaaattttgggtgagtgacttaacctctcagaggctatttcatcatatgtggaagaccagttgccatgggtattacgccgggtggatacagttcaactattcaatgaatataggattaggtggttgtccaaggctccttcaatgttgagattttcttcagcttcttgttctccggcatcccttcaattctgtgagccccctctttcgcttcatgtaatctcctcgttgcttttgttgtaaatgatagatttctgttgcttgcaaccaagaactcagaaaaatacagcagaaaatccgatggttctgataggagttaattgtggagatgtgccagagacagcagcttcgtggatggtgacaccacaatgtctgtggcttgagggccctgctgccttcggattctggcataatttgctctgatctccatcagttgttttaactcttttggggttttgaaaccatgtcccatagacacacagatgaccatatctcgctctatgtcgtcccaggactgaattggctctccactgggggtgtacagtgctctagctgggtgggtcattttgagacgagaggagcagtcttgcagcagc

SEQ ID NO: 477216 - DNA, 1000 bp, Homo Sapiens
cttcttaccatcatactttatttttaatacaaatgccataaaataaaaggtacccaggcatcttttaagcaaaaatacattttctgtacatcaagccatcatttacagattaacactgcaaaaaatttgaatgaataactcttaatttgtttacataaaattatctgaaataaacaaaattatatgtagaatgagaacaaacaagaaccaattcaaactcctaaaatcttgcctctgtattaatttcttcagtttcaaaatcatactcatctacaaaaggaatataggtattcttaacgttgaacattatttacaaaatgaattcgtttctctcagttactgttgattttgtggtcacccaacacataagttgtggtgactccttaagcgaccctgaactgctattctgctccagctgggagtgcctgctctctgccccggaaggaggcattataccaactcatagtatttccctgtttgggggtcaaagtaacagttcagacaagggtcatacaacaaagtcagtacttcctcgtcctcttccacactgaggtcttcttcaccttgaacactcaaactttcacaggaatctggacgctgctcagccggctgttgactgggaggaacgattggtgggctcaacatatttaaccagtcccggggattagaaggagaaggtgggttcatttctttctgatagtggcgaccctggttgacagggggtggcaggcaggagttccaggtggttgtgtcgtcactgctggtacttatgctgacattacagttgtccacctgggaggcactcaggccatgggaggtcccagcatcctccagttcttcattttgttgccaccgtaggcttgctagcatctgtaactcggattcactcatctggcttggctgatagtttcgccagtcatattcctcttcactgctgtcgccgccgtaaaaatcatcctctgattgggtgtctctgcttgtcacactgttatcctctttt

SEQ ID NO: 477217 - DNA, 1000 bp, Homo Sapiens; identical to SEQ ID NO: 345421

SEQ ID NO: 477218 - DNA, 1000 bp, Homo Sapiens; identical to SEQ ID NO: 345422

SEQ ID NO: 477219 - DNA, 1000 bp, Homo Sapiens; identical to SEQ ID NO: 345423

SEQ ID NO: 477220 - DNA, 1000 bp, Homo Sapiens
agtaggaatgttttattagcaaagaagtttcagagagtgggtggatcagggctctatcacttggtccccacctcaccttggtggggccagagtgagccccttcctgccacagtcaccccaactgaaattgcctttctcttcggccagtgttagcaggggaccctggacccttctgtgcgccaaaggctgaggtgactgacgaggagatctccccacagctaggtgtagtgagccagacgaggcagcttactgaacctgggggttctctccattgtcaccgcattctccttcaccaggtgtggctgtctgggagccagggggtgactcgctctgggtgtcgggctggcccgagctcaggtgggcatgtagcagagcggccacctcatcctgctcagcctccagggcgatggccagggcactggtgccctcattgtctaggatggcagggtcacagcctggctgggtgagcagcagccgcacggtgtccaggcgcccatactcactggcacacatcagcgctgtggccccatccgcatcctgcgcattcacatcagccccacacgccagtagggttgccaccatgtcctgtcggccatggctgatggccagcatgagggctgtctgccccgtctgactggccttggcattgacatcacccatgcagaagagtctctggaccacagccatgtcctcctcttcctgcctcacagaggtgagtgcagccagcatgagggccgagtagccggctcggttctggcggttgacctcgcaggcccccgtatccaggagcaggcttgcgatggccaggttcccgtgggacacactgtagtgcagggccgtgttcccgttgccatccgccaggttcaccacgtgcgccagcagttcgggtcccaggcgcctcaccccttccagcatcctggccacgggctccgcctgagagcgccgctggctggacactcgaaaccactcctgggccacgaggcgcactgcgccgccgtcg

SEQ ID NO: 477221 - DNA, 1000 bp, Homo Sapiens; identical to SEQ ID NO: 345425

SEQ ID NO: 477222 - DNA, 870 bp, Homo Sapiens; identical to SEQ ID NO: 161169

SEQ ID NO: 477223 - DNA, 1000 bp, Homo Sapiens
aaggtgtctgcagaactttaattgccaagagaatataagaatacattcaaataaatgaaggaaaaggggtaaacaaatacacattatgaagatatctaaggttcaattaacatgtgagggtttaacttctcaatcatcagggaaatggatattacaaccacaacaaaaccacaagtcattggatcgacaaacattaaaaagtctcacaatcctaagtgttggggaagatgctgaccatcagaagccctgggaaaagccctttagaaagctctcgagcagcatccactaatgccagatatcccagtgagcagcgactccaatcccagcagagaaacgctcaggctcaattcaaatgacaggcaggcacattcacagcagagccacctgtgatagctgcacagtgaagacagcaaatgtccacctgcagcagggtgggtaaagggtgatgcattcactgcagaaagtcaccagcagtgtagatcagccactccaggccctctgggatctgaagaactttgcaggcacaggccccctataaatccagtaataacctggggcctgagtgattttcattcacagagccaccctcctcttggggctgagaccctgagtgttttttgcccatagagtcatccccttcttggtactgagaggtcatggtggagactgaggatccctccaaggggtctaggggtaggagcagctctgtgaagtgagggaataactgggtgtctggcaagaagtcggaggcatcggggctctgaggccataagggggctggggctgggagtgatcctgggcctgggattggagctgggactgagcctgagcctgggcctgagcctgggcctaaaatcggggctaggcctggaagtgagccagggcttcgcatccggccaggacttaagatgggacctgggccttggagtctgcctgggcctgggatctgggctgggctgggaatcgggcctataattgggcctgggcctgagattgggcc

SEQ ID NO: 477224 - DNA, 1000 bp, Homo Sapiens; identical to SEQ ID NO: 161170

SEQ ID NO: 477225 - DNA, 909 bp, Homo Sapiens
tttttttttttttttttcaatcaacaaatgtttattgaatgtgaacttgtgcaaggtaggccagtccctctcagggtgccctaggcccacaagtagatgtgagaggatcctttgctgttccagcagtgcctgtgctgtcccctgactggtctaggccaccacggttccttcatccaggacctagtgaactgggcagacacctgcattcttcgctgtggcctcaaggcttggtggggaagagcaggcaggtgagttcccggctgccgctgtgtctgtccacaaggggcagagggtgccacatgaagtgctggaccatggccgccacggaggagaagagctcctcacggttcctgccctcccggcccagggcatagtggcgtccgccatccagccgccggatgggaatgttgaagacccggcctcggagaagcactgccagggtgaagggctgggagccatgaggccctgagctggggcgcacggtataggccccatccttttgtaagtggagcagggcactctcaacagcatagcggtcacagttccccgagtaccaaggctgagtcagcagatcactgtcctcagcagctgaggcactcccagtgggggctacagagggaagagacgatttccttccttctagaagaagcagattattgagctggggtggggtggggtggggtgggggtgggcaaaggtggcttctaggggacagctgcgggggtggggggtaggaggaggcgtacatggccccgagcccaaaccccggcacccagtgcttcctccactctccagatccagtgccctggcaggacccaccagccaggcctcgtgtgacctccaaatgaggcgtgatcttggggcacagactaggagcttcctgatttggtgcaggcaccggaaaatgcc

SEQ ID NO: 477226 - DNA, 1000 bp, Homo Sapiens
acactctgtgatgtttatcatatgtcagtagtacttcaataaacataaaaagaaacacagcaacacaaacacagatccctgaagctgactccagacaggaagctgctggagagtccaagatagtgcaggcttcacttctcgtgaatcaggaaaggtgggcaccgctgctgggtgagtggggagtgtggaggagaaatgtcagggctgctggggtcttatccacagtcatggatttgctgagcccagagggactttagagaggatggggcccaactcttaacattagagaagaagccctgagcactgagagcttcgccaaagtcacctggctcgttgtggtagttgcagggctggaaccactccccacaccctactctgcccacagaagtgctggtgccttagatcttcagtgtctagaatgaggactggacaaacaagagggctgggaagagctacgggcagggagtggattgagtgggatgggcaggcaggtgggaggccagtcatgggctggtcttggtcttggtcaggtgacctgggcttctcttccctgggcgcagggtgggcagcagcggtctctcttcttgtaatccatggagcaagcatggcagagcaggcctccacagagcctgcatggataccgccgagaaaatcggccaaagatcttgctacaggccacacagcactcgggagccatggaagagagatgctggagcctctgccacaggcggtccttctcttggatcagttccaacacccgcctcttcatggcctggaccaagtcccgctgccctccaagctcctcctggtacatggcatccctcctctcagcctcctgttgcttctgctccagctgtgcctgcagctcggctctctcttcctgacacctgctgagctgctcccgaagtgcctgcagctccccctcctgctccctcagcagctgctcctggcgctgggcctgctcctcagccttccggagcccaagtctgaggctcttgat

SEQ ID NO: 477227 - DNA, 1000 bp, Homo Sapiens; identical to SEQ ID NO: 345429

SEQ ID NO: 477228 - DNA, 1000 bp, Homo Sapiens; identical to SEQ ID NO: 345430

SEQ ID NO: 477229 - DNA, 1000 bp, Homo Sapiens; identical to SEQ ID NO: 161171

SEQ ID NO: 477230 - DNA, 1000 bp, Homo Sapiens; identical to SEQ ID NO: 161172

SEQ ID NO: 477231 - DNA, 1000 bp, Homo Sapiens; identical to SEQ ID NO: 345432

SEQ ID NO: 477232 - DNA, 1000 bp, Homo Sapiens; identical to SEQ ID NO: 161173

SEQ ID NO: 477233 - DNA, 1000 bp, Homo Sapiens; identical to SEQ ID NO: 345434

SEQ ID NO: 477234 - DNA, 1000 bp, Homo Sapiens; identical to SEQ ID NO: 345435

SEQ ID NO: 477235 - DNA, 1000 bp, Homo Sapiens; identical to SEQ ID NO: 345436

SEQ ID NO: 477236 - DNA, 1000 bp, Homo Sapiens
tttttttttttttttttttttttttttttttttttttttttttttttttttttttttaattaacattctgttttatttcagtggggttacagtggagaggattacaaataaatgccctcgtccactaacaaagagcagcattgaggcttattctgaaaatccagtcctgaatgggctgacacacctaaaacgatctttggaatacacctcaagttaaagaaaaacccagaagtcatttggccctcccctcaataagctctgcggcattcatatgacccccaggcaatactcccatcttctttcacccaaggggaagggtcatggagggaaccggtgtctgcttcctcatctggggagagtggccccaccttgggcggtaggtcatttgacaccgtcatgaaaggggtgaaggggtaaggaggcggggtagggtaccccggagtgtggtgcagatcttccagagcatgcagcgagtatgactgagccccagccagggatgacccccagcttgagcccctgtgctgggcgatgctcccggactcaagctgggagaggcaactcgtgctgggtggcaaggtcagcagggcatcggcagacacagggtcaggctggctgagaccgtcaggcaacgtctgctcccatgagtccctaaataggaagtgagctgggtctccggggaagggcggtggcaggagcggcggtaggggcgaggcgctgaacagagagcccgcgttgggcgtcagcgccggaggccggtagtctccgtagggctcctgggggaagtagggctccaggagagccgcatggctctgccctgcggaggactcacagggaaacggcttccccacgctggaggtgtagacgtcatttgaaaactgtttactgttgtggaagtctgagtcagataagaaagatcttctgacaccgtagtaacctgacgtgaccggcgaacctggcatctgcacaaatggagactgagaggaactgacgctgccattaa

SEQ ID NO: 477237 - DNA, 1000 bp, Homo Sapiens; identical to SEQ ID NO: 345438

SEQ ID NO: 477238 - DNA, 1000 bp, Homo Sapiens; identical to SEQ ID NO: 345439

SEQ ID NO: 477239 - DNA, 1000 bp, Homo Sapiens; identical to SEQ ID NO: 345440

SEQ ID NO: 477240 - DNA, 1000 bp, Homo Sapiens
ttacagcctggcccagaaatgctgttctgtgggttggcctcccaatttgagttttctttttggaatctgttcatggctttcatagcctccgttgatgtagaatccatttttgccatcacctgaataatctgtcctgtttatgggaggccaggttgagtcttctgctagcttcttttgccaagtcctatattgacttttagagtagaatccaaattctcttttgatcaacagccagagttcatgattttgaaggatggaatcctctacaaagaaagccacacagaattgggtgagggctaccaccaaaattaaaaccctccacgatgttatggttgggatcaactccattccacggtatataacttgaaagtcagaaaacagaatgaaaattgtgaggcccaaggcagctagcagcagaaatgaaaatatatagtttgtatagatgggttttcgaaatggctttcccttagaaaagatgaatgctactgtgatatagttgatggtggtgatgggccacagtgtggtggtctcaaaacttaaaattgaaccaggaatcagagttgcatttccagtccagtttctttccaaactcacatttgttgaaaaattactttggttggccagaaaacactcactgtattggtagacctcacaataccaaggctgctgcttcacatagagaaatgcactgatctgcacaatgcaggagaaacaggaattcaaaaatattgaaagcagtaaagggggagaaaggagctgtcctgctggtctatatggagccagctttgggtaggcatgagttgaactcattgttaaacagaccatcaaagtaatggctacatcttgcatgagatactggtaatttccaaagagttgtagttgccaatagagcagtaatgcactgataaactggattatgccgtacatggtcaagtatttaaatactccaaaggatgaaaccagagcagctcggccttctctgatgagatgaggcacacac

SEQ ID NO: 477241 - DNA, 1000 bp, Homo Sapiens; identical to SEQ ID NO: 345441

SEQ ID NO: 477242 - DNA, 1000 bp, Homo Sapiens; identical to SEQ ID NO: 161174

SEQ ID NO: 477243 - DNA, 1000 bp, Homo Sapiens
gttataaagcaacagataaccgagggagtggattatcacaagtgtgaaacaacttggtacctcctttctccctcactccacctgatggcttcccactccgctgccactaatacctttctagattcctctactgcgtgctgggatggaaagaatgcggcctttggagtcggatagcaagtgggtttcattctaggaactacacaactctgtcagccacatcctccagcctgaaggtcttcactgcaccccagcatggagacatcttcaggtcggtcgtctctgcagctgtgggtagaagagctgcctggaacgtgcctgcatttctctgatttcctttttcactcagactcctcagcttccacctaccaagctggggtgctctcctggcttctcctgccaggtggccctgtcctctctgccttgtctcacccttgggcatcagcgtgccaggggctggccagcccacatgcgggatctccacccagaaccttcctgtctgccaaccctttgccaactctcagggtggggaaggaaaaccttgctctcccctctttccagggctgaccgctccttttccttggttaattttccagaggctgccggtaggctgtgtccgatgtacacccagctgcctgaagtagaattcacagcaatgacgttatccctgtcaagtcccactgccactgaacaacggcagactcatttccatgagccggaatgagaacccagattggaatccgctgtggttgttaaccctgtctttttcctctagggggaaattgtcattttaatgaaaccaaggcacagaaatgctaaacaaccatcccaatgtcatcaaaccgatcatccacagaagctggagactaatattggcactcaggcctgaggccatagaaaatctcctttccctcggatgcatcttcctgggttgaagtccagctcctaggctcgctcatgtggcccccttgagcagagcatgaagacctggataactgggtcc

SEQ ID NO: 477244 - DNA, 1000 bp, Homo Sapiens
aacaaatatttactaagcacctattatgtgagaggcactggggatacatagatgattcagaaaaggtccttgccctcaaagatctcacagtctaagtcagggatccagacaagtaaacagatgattactacacagtataaatactgtgagcgtggagggttgggggtgggctataggaacccagaggacaggaccaaactcaatctagggcaggcatcaggaaaggcctcctagaagaggtaacaactaggatttgaaggatgaattatactcacctacaggaacaaaggaagagtgtttcatgcagaaggaaaagcacatgcaatggtccagtggtaggagtgagcatggtttgttagggaaactctgagagccttgaatatgccataggagttagggaaagctgtgagcagaactactgatcattttttcgttttacaaaagtggcttgtagggctggtgaggagcatggatttggagagggtgagactggagatgtgaaggaccatgaagatgcaggagtccctgactctatgtctctgcatgtctatgtgtttgtatacccttgtatatgtgttccttagaacatgcgtgagtctgtgtgtccctgtgtgtgcttccatgtccttgggtctctgtccctggctcaccccatgccctggtttctggatctcccaaattcaggtctcctggctctggaattcagaagccatcacaggacataggagaggtaggggtggcccagaagcagctctacatgagagcgcttcaccagccagcaggaagcccagcggggcagcagccttggtgagtccttcagcagcctcttgcctagaatcacaggcacatctgggccatggtgccttcgtaagcatggccccataggtcctgtcaccagtcggatgtctgcgtgctggaactgccctatcaggccacgggctgaggggctgaggcctgagccattggccacgtagaaccccaggtggggtagttgcagggt

SEQ ID NO: 477245 - DNA, 1000 bp, Homo Sapiens; identical to SEQ ID NO: 345443

SEQ ID NO: 477246 - DNA, 1000 bp, Homo Sapiens; identical to SEQ ID NO: 345445

SEQ ID NO: 477247 - DNA, 1000 bp, Homo Sapiens; identical to SEQ ID NO: 345446

SEQ ID NO: 477248 - DNA, 1000 bp, Homo Sapiens
tttttttttttttttcttttcttaataatattttattgtcagttataaatattttccatctgtcccctatttacaactgcaaaatagtttgatatcataccatcacctaccaatcagcatctttctataaactccatgaaaattgaataggaaataaaaagctcttcttgggggcccactaacctggttccccagactccaaacaaccccacgtggacagcaggcaacgttgcagcaggtgctacacagtagcaaagaggcagccggaagtggccccggtgggtcaggacgcgaggctcctcaggacgttggtgatgctccagtgctggcccgagcacttctgcaacaccagctggaagccgaactccaggtcgctattctcctgcagctccagacagcgcttagacttgcggttctggatgggtcctccctgagagaactgccagtgaagcttcatcctcttggctttggcgtagctgcattcggtgagccggggccggctgttgacgtccaccaggcatcggttgtcatcatcatccacggtggggctcagaatgcccacatggatctgctgactgctcgtgtagtacacgttctgaggcgtcatcccatggcagatgtacatgatggggacattctctgtatctggcccctggtcaagacacaaatcagtcttcagagaattctgcagcactccataggcaatgatgtcggagtacatcctcatctctgggtacacgctgaccaggtaccaccggaaggtcttgcactgcagctgtttcctgagagccttccttgcagtgatgtccccaatgtcaattcctgagtcctcctgcggtatgttccatgccatgtagacgtggcttttaaattcatccatccagacttcagccaccctgagagcgttcctgcggacatgggcggtgaggtcctctgtgtagggcttgtgggctcgctcaatgtgggcaatccgtgagcagggcaggacctccacactccc

SEQ ID NO: 477249 - DNA, 1000 bp, Homo Sapiens
ttttttttttttttttttttttttttttttttttttttttttttttttttttttttttttttctgttcaagaagattttattcctggtgccctctggggtcccttgactcagccaaccccttccctgactcctttggtgctggctttggtacttgtgagggcctgggcaccaggacggttccatgggtcctcacgtgccccactctgtgaccctcctccatgctagtgcctgacccagtatgtaccacggaggacctcctccttccccactgcctggtccttgccaggaaggaagccaagtccccgagtcccaagagtaaagtgcggtgcctatttgccgggctggcatcagccatcaggcaattgagactgggggacactaagtccatggtcctctcagaagcgggtgtccaggaaggaggtggagcctcgttggggcctggggggcccctcgatgggggggccccgggcccgagtcaggagcccatggaaagtcttgccgcgggtctggggtttccgccgcggtggtctgggctcctccgggggctgcaccacaatccgaggcacctcaggcttggcgcctcgtcgcactcctgccagctgctgggcctcaaagatggcttgggccccggcgaggcggacctgtggccggggcgggggtcccggcgcggaatcgggcagctgggccagctgggccttgatctcccgctgcaggtcccgctctgacagcaccacgctgtgcacctgtgacatgaaggcctcctcctgcagctgcgcgggggggatggctcgaagggctcccagtgtctccaggaggccagggcaggcccctcgctgctctgcagtgcccagcgccaggcgcaccagtgtcagccccacacggaacagtactctggcaccctcactgaggaaggcatcccagacacgcagcactgtggggaagggcagggagcgggcgaagaggcacaggaaccactcgggcaggtacagcaggggtccg

SEQ ID NO: 477250 - DNA, 1000 bp, Homo Sapiens; identical to SEQ ID NO: 345447

SEQ ID NO: 477251 - DNA, 1000 bp, Homo Sapiens
ctatattacatatatcagtttttttgcataatatgtagacatccaaacataccaagcaaataatctgtatacgaagacaaaagatccagagcagcaaattctgggatatttggtaatgccacttggttaactttatgcattctagtattcttctttccaataagtaagttaattgccagcacagcttcactgacctgtgcagcagctcttattgcaatccaggctaatgaactgtacatttcaaatttatttgctgatgtttctttaacagaactacttcttctgagaggaggcttaagtgttaatggtgatcctgaaatttttatctttggcttcttcagatgaaaatacaatagagccatttctaggtaggagtctcttatcaatcctgagttttgatcatttttcaggcttagttgtatagcttcatataaactctcaagttgaaaacttggagatttctcttccattagtatttgacgttctattttgcctttctgaaaaaggatttcagcttccacctcatgttcctccactgctgttgttctacagagcttcagtgccacatcaaacagatgaagagcaggtaaccacttcgaggggtccttccttttattcttgtaatatacttgcttggccactgtatgtccaattctcatttttattttggccaataacatgacatggggaagatagatatttttcaaaggctgtaatggatttgcatatttagtgtttgatgaacgaaattcaattgtttctccaaaagctagcatctgttcagttagaatgctatgagcccgagttaacaaatttaattttcctgtttttgaagagggagattccttgaatttctcagctttggttaagtcatccagcaaaactaggcttcttgccagggttagccgtgattgaggagaaataaattcatttccttccagcaaatgtattatatcctgaaggtttgtcatgatgtctgcctttaaatgcttttcttgta

SEQ ID NO: 477252 - DNA, 1000 bp, Homo Sapiens; identical to SEQ ID NO: 161175

SEQ ID NO: 477253 - DNA, 1000 bp, Homo Sapiens; identical to SEQ ID NO: 161176

SEQ ID NO: 477254 - DNA, 1000 bp, Homo Sapiens; identical to SEQ ID NO: 345450

SEQ ID NO: 477255 - DNA, 1000 bp, Homo Sapiens
tttttttttttttttttttttaacccagagttatttttattttccagaacgtgttaggaactagtacttaaataatctcaagtccctgaggggccagagaccccaccatgcaaaatagcaaacagacccaagacttggggagaggcggtgagtgcatcagaaatggatgggtacatctgattcccaccacgcggggctcagcttagttagcaggagaccttcagactgagaaaaaatgcaagtctttttttggcctctaatatctgggaaggatggagggagctcaggagacacagaaaagatggcgtatgaatcctgtccggcctgaacgaggctggagttgtgcctctggatagcttcaagcactgatcagattgtcagcccccgctgcttgaacagatgctttagagcctcttccagttgccggtttgttccctgaagccccttcaccacctgcgctgcccactcgaagtattcctggactcgatgttctgaccatcctgcataagagtcgacagaaacttgctagcgtgatgtcaaggaaagcactgccttttccccacttcctggcaagcttggttcaaggccatgagttcctgatgcaatgagctgtcctgaaaacttccccttggcccagctattgtatttttacctctggggtgcagcgattcaggtccctcagattgtacagcttgtctgccagcttcaccagtttggccccggggctactgtggggcgcttgctccacctgcagcctctttctctccagcttgggcagagtcttgtcatctgttacctcctccaccaggcgccgcacttgtgccccaaagtgtagctccacctcatccagggtggtgtctgtgtcctccaccgtgtcatggagcagggccgcctgtaacaccacaatgtcagtgattcccgcctcgtgggtcaggatccgtgccacaccgatggggtggttgatgtagggggtcccctcggggtccttccgccgctgctg

SEQ ID NO: 477256 - DNA, 1000 bp, Homo Sapiens
ttttttttttttttttttgagatcatctactcaaagtttattggactgaacaaaggctgaatacagagatccaagccatgaggagtacatgaggtgtggtgcctataagccagggtcggaaactttccagacaaacctagatagctctactaggagggagtcaacgacctattgtgtcaattagatcccagcctggacaagggcatgactattgctgtttggggacacgtggctctgtgttgaaggcaatgactgtgtggctgttgccatgtggcctgttctcccctaagccctgaaccaaaggttccaggcccagatgagaaggcccctgggaatgcatgccataggggttgatgctggacattccccagccttccattaaatgaaaacattttctataaacttactgctttaaaaaaatgttttaaccaacaaacctaagaactgcaaatgagtttggtatagtataaatattgtcaaatataaaattccaagaaacccatttgagactgatctgatgatctgaagttctaactaatctatcaaactttctaagaaaaggcataggtcaagaaatctttttaaagcaaacattattgcttctgctatagcagagtggagatttggctgagctggtaagaacctcagtgaaaaggtgtcttagcaatgaaagggctgaatccgagattcctctagatgaaaaataaggggaatggtcaagtaaattcctggtactggttctttgctgccctgtaatcaatatggcatctcacccccgacaaccaagccagccacagagagaagtggggttcccagggaaaggggtcggctgaccaccctgacggagctggtgagcacaggtgagctctacctcatttgtctctcattcctcaaagtcttctgtggtttggcttcagtgagggcaaaagaggggagactggagtgaaagtgaactctgcttttaaaatgttctttttatctaaggtgtgcagggtgtgtg

SEQ ID NO: 477257 - DNA, 1000 bp, Homo Sapiens
tttttttttttttttttttttttatgtgagaactcagtaacttgactgtttttactgaaaagcgaaatgcaagtataaagcgagggtatcttcagcaaagggcaggctgtggggcaggccgtctgtctgagtgggagctgcagctgatgtggacacgggcctccgtggagcctcaattttattacatttgagtaggaatgactttgtgttataacatcaaagaaagaatctgaatatgagggaactgcagaaattaaactttcagtctaattctcagaatgccagagtaagatgaaccctttacagtaatagtgaaataattcgggctcattttcagtagaaactcaagctgcttcaatatggaaatacaattttgacaatacaaaaaaagaaagaaaagcaggggtgaggccccacacttaagaggaagaggccatcgcagcatctgtgccctgggcttgcctggcaggggtgacgttcccgcactgagagggaggggccatcccggcatctgtgccctgggcttgcctagcatgggtgaagcctcacactgagagggagaggccgtcccggcctctgtgccctgggcttgcctggcaggggtgacgtccctgcactgagagggagaggctgtctcagcatctatgccctgggcttgcctggcaggggtgaagcctcgcactgagagggagaagccatcctggcatctgtgccctgggcttgcctggcaggggtgacgtccctgcactgagaaggagaggctgtctcagcatctgtgccctgggctcgcctggcgtaccctccctttcttgtggtgcttgcttggtagcaatggcaaaccctgcgttcactggcaagggcacaaggtgctgggaagggcagaaggtgctggggccagcccgctgggggtgcacagccccttaggaggccagcttgcagtagctgggaggagagagcttgcgcctcaggtacttgaggacatacagcgggaggcagctga

SEQ ID NO: 477258 - DNA, 1000 bp, Homo Sapiens; identical to SEQ ID NO: 345452

SEQ ID NO: 477259 - DNA, 1000 bp, Homo Sapiens; identical to SEQ ID NO: 161177

SEQ ID NO: 477260 - DNA, 1000 bp, Homo Sapiens
ggtgggagggctgtttattggcgagggtccctgcggtgtggccgcgggtggcggtcacagtgccgcgacgcagtcggtgcccgtgtatcccggcaggcgcagagcgaacttgcggcgcacgtcatcgggcacgaacctgccggccacgaagtggtggcgcccggagaagcggccagcgcagcgcttgggcgccgcgagagacaccagcacgtcaggccgcagcccgtcctccgaatcgctgccggtctctgcgtcccagcctgaggggatgtccaggctcacgagggggatggacagcagcttgagcgtggccagcgcgcgggtgcaggggcccccgacctcgcccggctccacgccggggcccagtacggcatccaccaccagcccataggcttcgttaatgagctgcacctcagtgggcaggtagctcaggaaggggatgtccatcttctcgcactgggtggtcaggtcccgatgcagcaggtccagcgagcgtgtggggtagaagatggtgggttcatactcaaacacccgcaggtgccgggcacagaccagccccactgccccgttctgctccgggccacacacgaccagcaccgtcctctgcttccgggagagagcgggcaacgggaacgcctggtggtaggggacacagcaaaggcacaggcacagtccagattcctccttgcctggagaggaaactgaggcccggagtaggggaagggatggggcttgggcctggaggcaacaggataggacaggaggtgagctgttctggatgaggggttgggcctcttggggcctcagtttccccgctggagatgcagaggcccggtctcaggctctgccaggtcggtgcaggaaaaacgtgcatccagccactgcccgtcgcccggagtgcggtttgtttattctccgcctgagttgcagacattcttccacctttctcaccgcgggcccacccccgcccatgtttccagacctcagcccctcctggagg

SEQ ID NO: 477261 - DNA, 1000 bp, Homo Sapiens; identical to SEQ ID NO: 345453

SEQ ID NO: 477262 - DNA, 1000 bp, Homo Sapiens
tttttttttttttttttttttcagagtggggagtgcatgtttttcaaaaacaaaaagtaggcaaaaacagtccaccaccccatctttcctgcccaggcccctggctgggggaggccaaggagtggcttaagttgtccagcttctgggccctcctccctcccatcaagacctggaaggaggggctgagccaggggccggccccagaggcccaggccaggtcagcacctccgccctccccaatgagagtcagcactggagccttgggtcttgcagttgtttccagagccgaatgctggcctgggggcccaggggccgtaccagcagcaggttgcggaaagcacagtggtccgcagtgcggtctgctggccaggctgtgaggaagcctgggtgggcctggggcaccaggcccagggctcggatgcaaaggccagtgtagacgtcctcaaaggggaagggtgccacacgggctgccgcccgcagcagccagggtgccaggcgcccggcaatgacgtagccacccccgcttgcataggctgggtagccaccttcgaagaaggactcgggcacatagaagggtcctcctggcttccggagaggcatggcctgggtaaagacctcacccaggtagaggcttcgggccgaggcaggtggcagggcccgcaggtgagccagcagggcaggggtgtgtacaaaggcatcgtcctgagctcgcaagacaaaactcacggtggggcagtggcggcccagccaggccagcagcagcaggtctttgagcgtctggttgaatgggacgtcgaggaagtcccagagcagcaggtcactgtagcgacggctctcccaggccactagtgagtctaggtcaggccccgcctcacccaccggagaccctagcaggaagagcagccggatccctggagctggactgccccacgtctctctcacggcctgtcgttctgcaaagcgccctggttctgacttgacggccaacagcaggtagggg

SEQ ID NO: 477263 - DNA, 1000 bp, Homo Sapiens; identical to SEQ ID NO: 345454

SEQ ID NO: 477264 - DNA, 1000 bp, Homo Sapiens
ttgcaacccattaagctactaattaaaactggtacataacagcaagttcgagtatcagtttcacaggcatgtcagcaggttttctgtttaatatgttttaaaattaatttcagctaaaacatgaggaataatcattttgctcttcgagcctgatgttaaaaatttgcttttaatgtgagggaaatattttttaaattagacaattcatatcaattcataaactgaaataagatgttattctgaactcttaattgtgtagcctttagctattttattttaaatcaaagacagagcttcccagcaccataatgaacatcagaagaaaagcccagtgcccgcactcagcacagtccagtcgaaccacaaaaaaatctttatcaaagatcttcactttgggttccaaattactcaagacacgtcagtattgggcattattggaatttaaataacaaacacttttcaaatgacttgggaaggaggagaggaaagatcactgctgcttaatacattttattcaggtctgtcattacacttgcgtgagcattcatgggtgaggttttatttgcaggaggagaaggtcttccagaagaagttcctgcagggcattctgtcccggcgcgcagattgctgggggggtgcgccttcctgccgcctggccacctcccgggcttcctctcctatgaggggcccggcactggcctgggaggtccactcaaaccaccaagcgaggaaagtcaggaggctgcttttccttattcctgccgcttcctgcatatgcagtgaattactcctcctggctaagagcttcacatcttcagtgttaattgtggttcttttcgcatgtcttgcaaacatttcaaggtctttggcaaaattttcacactgtcggaaagtcagctccgaaatggccgcaatggtctgtttgctgaactgcatctctttgtccaatgcaacttcctcgcaaagacaacccacagtatagtgaactgctgcctttagc

SEQ ID NO: 477265 - DNA, 1000 bp, Homo Sapiens; identical to SEQ ID NO: 345455

SEQ ID NO: 477266 - DNA, 1000 bp, Homo Sapiens; identical to SEQ ID NO: 345457

SEQ ID NO: 477267 - DNA, 1000 bp, Homo Sapiens; identical to SEQ ID NO: 345458

SEQ ID NO: 477268 - DNA, 1000 bp, Homo Sapiens; identical to SEQ ID NO: 345459

SEQ ID NO: 477269 - DNA, 1000 bp, Homo Sapiens; identical to SEQ ID NO: 345460

SEQ ID NO: 477270 - DNA, 1000 bp, Homo Sapiens
gagacggagtctcgctctgtcacccaggctggagtgcagtagtgcagtcttggctcactgcaagctccacctcccgggttcacgccattctcctgcctcagcctctagcctcccgagtaggtgggactacaggcgcccaccaccacgcccggccaatttttgtatttttagtagagatggggtttcaccatgccagccaggatggtctcaatctcctgaccctgtgatccacccgcctcggcctcccaaagtgctgggattacaggtatgagtcaccacgcccggccaacttgtgatcttaagagaaagttcattggtattagtaaagccctggggagctggcaagctccaactggtgggcaatggccataggtaaaattagtcctagagttacagcaagttatctcagcagctatagacaaaactggtctcaggttacagcaagcagtttcagtagccaggctcacagagaattacattcttggagcaatattatgtgtcccaagtactttttccccctagcttcttgagtctgttttagttggatgtgacaagaatgactcaattaatattatcaacttgcacaattataaaagaatcaccattttatgtaagcacttaggctaaaaaaatagtaaaaacatcctatgtggccagcagccttgaaacaatagaatttagtcaaataatgattacctgcataagatatgctttccatctaagtagtttccccagtgatttttgccagtatcctaattctacacggagtaaacacaaactgtaaatgttaagaaattgcccatggcataataatcacctttcaaatttctcatatgttaaggctacttcttaataattattattctctaataatttggagttacagagaaagtaagattccttcaaagtttggtgagtttgctgggcgcagtggctcacgcctgtaatcccagcactttgggaggccgaggcgggtggatcacaaggtcaggagatggag

SEQ ID NO: 477271 - DNA, 1000 bp, Homo Sapiens; identical to SEQ ID NO: 161178

SEQ ID NO: 477272 - DNA, 1000 bp, Homo Sapiens; identical to SEQ ID NO: 161179

SEQ ID NO: 477273 - DNA, 1000 bp, Homo Sapiens
ttttttttttttttttttttttttttaatttaaaaaatatttatgagacacgttgccttttatttctgaaaaagtcacttaataaatattttaccaagataataaggatgaattataatgatggaaaaagaacttgggcggtggtgggggcgggggtggggtgggcgatgaggaatggaaacatattaaattttaattgaaacttcaattcgtcagacttggcctctgcatcacatcttgaaagctggcagagaaagtgtcctgttgtgtgcggaccgaatttcgagtcttggcacacagccaggtcagtaaacggaggaccagtggcagcggctcttgatgacctgaagcagaggcttcttaaaagtgaggacgatgacagtgcaggccaccagcagggtgaggcagctggggaggatgagcacgaggtagagcaggcccaggtccagccgctcccacttgcagtcccgaggcacacctccgggcagctccgtcacgcggatgatcttggaggagaggttgcaggtgaccatggcccagtcggccaccgtctgcccatgctgcagggccccccagccatccaccccacagcagtcatatggattctgactgaggtagatggtccgcagacctctcgagagctgctcagacacagccttctggggaagggctgtgagcgagtttctacggagatccagggtctccagggccaggctgcccccaaaccttgggaaggtggtcaagcaattccccgacagatctaagtccctgagattcccaaacccagagaagtccaacgccataaagctggagtggaggcccatgttcctgagagacaggacctgtaacatgggggcaacatcctggagtggggcgaggctcccattcagaaccccccagttgcttgagaggtctaagtaggtcagggaggtcccttggaatgggcagtctggcaatgcccccaggccacagccctccagagacaggctccttaaagatg

SEQ ID NO: 477274 - DNA, 1000 bp, Homo Sapiens; identical to SEQ ID NO: 345464

SEQ ID NO: 477275 - DNA, 1000 bp, Homo Sapiens; identical to SEQ ID NO: 345465

SEQ ID NO: 477276 - DNA, 1000 bp, Homo Sapiens; identical to SEQ ID NO: 161180

SEQ ID NO: 477277 - DNA, 1000 bp, Homo Sapiens
tttttttttttttttttttttttttttgacggttgacaacacagcatttttaatctgcatctatagaaaacacttatataagctctctaatggagggattatagaaatacatttgatatataatagtgtacttttgtgtacttactgtgaaaatagcacatttatttagagaaggattttatgcccaaagttcttgttgatgttttgaaatatatccatttccttctgttgtagtaactgttatcaagaaaaggaaaagtaccaacaattttccattattcctcatcaaaagtcttctttgactgatagttcccagagtcatctagaatgttcacatcagtaaaatgttctagaaaaagtcagagtttgtgttctgggaagcgtctacatttgcctgcattcatgtctcgtgcacatggcctgccgctcgattctccatgtgccttcctcataagtacagtggcatatggtgcactcgtcagtcttcacttctctgccagcagggatcaccgcggtttctgcaaagcagtttggaccatttttgcagatgggacagcactgatcaggctcgtacacagggtccacacactccgtctggggacacgctgacactgtgcatagcacctcaccgttggcttcacagcgacacctctcgcatggagacaccacgaactcctccaaagtctgataggtcttgccccggaactcgcagtagttcttcctctccttgcactgcgggcagcactggctcgtgtcgacgtggatgcagcgcgggtgcagcctcgggcactcgggctgcgcgcacagcggcccctcctcggtgcacaggcacgggcaggccgaggggcccggcgcgaacttctccccgatcgcgtacacgaagccgctctcgtccacgcagcccttgccacggtagtccgggtacacgtactcctcgggtggctcgggcgtgggcgcgagttccgggccaatcgcgtcctgggcggctgcggccagggct

SEQ ID NO: 477278 - DNA, 1000 bp, Homo Sapiens
ggccaaaaggtccattttattgtcatacaatcgtggtcaccgtgacaaggagggtggcagcgtggccaggcacaggatgcacccaaggagagcagcacagtagcaaaaccagagctgcggaaagtggcgaagcggcggctgcccctaccccccaccttgtccacattcttccacctgctggtgtccacctctgcccacatctcggatcccatcccagcgaaccccaaactcactgtcaacattctcctagcacctacgcattgcccaacaagaagttcaagctaacatcatcccacagagtgaagttctaggtcatgctctaggcttgggacacccgggttctattcgctgggaggctcctagctactttgaatgacttagaagtcactttgatctttcccagccttctgttttctccctctgcctttgatgtggggaaccagtattggagacagcgctgtgcagatgcagctgttactacttgcaattaaatagaagactctcaaagttctaaaagcataaatgatccagagaaagggagtggtgtccagaaataccaggaggtgggaattccagttgcactagaaggcggcctggttggaaccaggagacagcccctatgccaggctgagggacccgccctccactgtaccaaactcttcagctagaaccacaccacacacacaccaccaccaccaccaccaccccgcccggctcgggtgagctggggcacgggggagcctgcgaaatagcaaagttgtgcaaagcaggaggaaaccccagtgagagaggcaggctcagaaagtgcatcaccagatgaacaaggacccaaatgggggagcattctaaatacatttcattttacagtatcactctctctctctctggattgcacactgggctggtgatgggaaggaaaacagggacagaaaaatgggcactgcggtgttaagcgtcgtagagatccagagaggatgaggatgaggggctagagagaagt

SEQ ID NO: 477279 - DNA, 1000 bp, Homo Sapiens; identical to SEQ ID NO: 345468

SEQ ID NO: 477280 - DNA, 1000 bp, Homo Sapiens; identical to SEQ ID NO: 161181

SEQ ID NO: 477281 - DNA, 1000 bp, Homo Sapiens
aaaatattcttgcagaaatggtttacatggaggctttgtttttaaacagccctttggctgacctccttccatcactgtctagaaaacatttcagatttccacatggaaacagagcccagggccccagaaaccctcacccttgcttcatccaatccatctgccaccgaaggtctcctcagctctgggctcttgttcctttggtagcacccagaggccccactctgtctggccctccagggtcaactcacttctcccacaccttgtaatcccagcactttgggaggctgaggcgggcggatcacctgaggtcaggagttcaagaccagcctggtcaacatggtgaaaccctgtttctactaaaaatacaaaaattagtcaggcgtggtggcgagtgcctgtaatcccagctacttgagaggctaaggcaggagaatctcttgaacccgggaggtggaggttgcagtgagccaagatctcagcattgcaccccagcctggacgacaagagcgagactccgtctcaaaaaaaaaaaaaaaaaaaaaaaagctatgagaggcaggtctgggagcaaagcagatccctacctacagaagctcaagaggctcaggggtttccgtcctcagaacccaaggatgtcagaggcccctctggtccccaggggcggggggtgttaaggaggaacccaggggctggtcctggagaggaagcctggatccggcgggagaccggagctgcccagggcctctggggcaacaccagggcctgtgcctggccgggcccgactcctgacttctagccccatgtcccagggcggagcctgtgacaggagggacacgccattgggcacccagggagagtccttcattgtctccttagctgcaaaggtgggtgcctcattcaggatgagggagaagccactcggagcctgagccagccggagtcgggctgcatgctggcaggggcccatcggatgctacccctcaccctcaggaggctgcca

SEQ ID NO: 477282 - DNA, 1000 bp, Homo Sapiens; identical to SEQ ID NO: 345471

SEQ ID NO: 477283 - DNA, 1000 bp, Homo Sapiens; identical to SEQ ID NO: 161183

SEQ ID NO: 477284 - DNA, 1000 bp, Homo Sapiens; identical to SEQ ID NO: 157817

SEQ ID NO: 477285 - DNA, 1000 bp, Homo Sapiens; identical to SEQ ID NO: 345474

SEQ ID NO: 477286 - DNA, 1000 bp, Homo Sapiens; identical to SEQ ID NO: 161186

SEQ ID NO: 477287 - DNA, 1000 bp, Homo Sapiens; identical to SEQ ID NO: 345476

SEQ ID NO: 477288 - DNA, 1000 bp, Homo Sapiens; identical to SEQ ID NO: 161188

SEQ ID NO: 477289 - DNA, 1000 bp, Homo Sapiens
taagacaaagagcctgccccatcttctgagggtgtcaaagccagagagggcagagcttgctggggcagctgggaggtcagcccctggtgggaagggactccggatcacatccagggctgtcagcagctggacttctggccagagcagaggctgtagcaggcagggcgggagcacatggggcggcagaggagggaaacacaggaggccgtgcggcagcagctgggctggcaggaggaggcagaggcaccacaggaggggacgggcacgcagcaggtggacttgcacacagggtggcagaggagggacacggaggaggaggatctgcagcaggaggcggtgcagcaagccggctggcagctagactgctggcagcatgatgtggaagccccagagcagacgggcacacagcaggcgtgctggcagggggaggaggtgcagcaagctggctggcagctagactgctggcagcatgaagaggaatcctcagagcaggtgggcacacagcacacaggcacgcagcagacgggcacgcagcaggcctgctggcagggggaggaggtgcagcaagttggctggcagctagactgctggcagcatgagggtgtgcaggagctggtgcagcctgattggcaggggctgggctcacagaccgcctggcagcaggggctggacacacagctcacacagctagactgctggcagcacgaagaggaaatcccagagcagacaggcttgcagcagacgggcacacagcaggcctgctggcagggggaggaggtgcagcaagctgactggcagctagactgctggcagcatgaagaatccccacagcagacggacacacagcacacaggcttgcagcagacagtcttgcagcagacgggcacgcagcaggcctgctggcagggggaggaggcacagcaagccagctggcagctagactgctggcagcacgagggcgtgcaggagctggtgcagcctgattggcaggggctgggct

SEQ ID NO: 477290 - DNA, 1000 bp, Homo Sapiens; identical to SEQ ID NO: 345477

SEQ ID NO: 477291 - DNA, 1000 bp, Homo Sapiens
cgtccccaaccagcgaccagcgaccagcggagggttgtggtctgcagccaggaagcacagtgaggagcagccagggctcgcccgcccgggggggaggtcagggaggagccagtgagcatctgagaccccggggctgggcggctgtggctggggctgctccttctgcgttgaggtgtgctgaggctgggtgggctgggaggtccaaggactggcagggaggtggggcctgagcccggctggccctgggggacatggccgtcagcagctggacttctggcctgaggagaagctgtagcaggcagggcgggagcacacagggcggcagagaagggacacacaggaggcctggcggcaatagctgggctggcgggaggaggtgggggcacagcaggaggagacgggcacgcagcaggcgggcctgcacacagggcggcagaggagggacacagaggaggagggtctgcagcaggaggtggtgcagcaagccggctggcagccagactgctggcagcacaaagaggaagccccagagcagacaggcacacagcagatgggtttgcagcagacaggcttacagcagacaggcacacagcaggactgctggcagggggaggaagtgcagcaagctggctggcagctagactgttggcagcatgaataggaatcctcagagcaggtgggcgcacagcacacaggtttgcagcagacgggcacacagcaggccggctggcaggaggaagaggcacagcaagctggctggtagctagactgttggcagcacgaagaagccccacagcagacgggcacacagcacacaggcttgcagcagacgggcacgcagcaggcctgctggcagggggaggaggtgcagtaagccggctggcagctagactgctggcagcacgagggcgtgcaggagctggtgcagcctgattggcaggggctgggctcacaggtcacctggcagcaggggctggatacacggctcactggggtgcag

SEQ ID NO: 477292 - DNA, 1000 bp, Homo Sapiens; identical to SEQ ID NO: 161189

SEQ ID NO: 477293 - DNA, 1000 bp, Homo Sapiens; identical to SEQ ID NO: 161189

SEQ ID NO: 477294 - DNA, 1000 bp, Homo Sapiens
ttaaacatgtatgaatgtaatttttatttttatttttgcagtgctccttgtcatgatgagtgtggaaataattttcccttggcgggagattgtacaaacaaattatgctttattcaaattatggaatactctatagcggttaaaattaacgatttagagctccatgtttcaatgtggataaatctcaagaaacataattttcaataaaaaaatgcaaattttacatatgataatgtatacgcaaatataaattcacaaaacaataggacataagtttaattgatgtatgtagatatagtaaaagtacaaaaacatgtatggaaacaggacataacagcttctggataacagttatatttgggggtgggcttgggggaagaagtaaaagagaatagtttgggaggtgggtgtttctgtgatttttttttcttttacaaaaagagagtcatggagcttccagtgatgtgatcctggcagaaaggcaggttttaatttccccaaaattcctcatctgctgtcaaaatagttcacagatacttcatcccagggttaggcagatttatcttcaagtcatcagcttagctggacactgcagggttctcgagaactgcaccaagtcctggggacctgcctccatgcatgacaaaaacaccttccatcaggccccatctcttgctctctgagtcttctttttctcatctggcaaaactttcgaagaaggatctttcttaacagcaggtaaacccaaggatccaagatctggttcagtgaagccaggcgaacagctattaagaagaagttgcattctttctgcttctccgtgtgtgtcttgcagtgctcaactgatgtctgattgaagatcattttcaacatcattatcaggagcggagaccagcagaccgacagcacgcacatgatccccataagctgaatggccgtctcggtcgtgatgcggccccactgggcactggactgagatgccgtggccttggcccggcag

SEQ ID NO: 477295 - DNA, 1000 bp, Homo Sapiens; identical to SEQ ID NO: 246612

SEQ ID NO: 477296 - DNA, 1000 bp, Homo Sapiens
ctttgacattttcatgctctataatactaaatgttgctatcattaaacgatcagaacatggccaggcacgttggctcatgcctgtaatcccagctctttgggaggccaaggtgggtgggttacttgaggtcaggtgttcaagaccagcctggcaaacatggtgaaacctcatctctactaaaaatgcaaaaattagccaggcttgtggcgcatgcctgcaattccagctacttgggaggctgaggcaggagaatcacttgaacccaggaggcgaagattgcagtgagtggaggaggtgaaggttgcagtgagcggaaatcactccactgcactccagtcagacaccgaatctgctggcaccctgatcctgaacttgccggcctccagaattgctctctgagtcttctttttctcatctttccaaatggtcgctccacatcaaggttgaggaacactggcagggtaaggaggtggagctggatgcatagttgtttgtgtggtacctgatctggcaaaactttcgaagaaggatctttcttaacagcaggtaaacccaaggatccaagatctggttcagtgaagccaggcgaacagctattaagaagaagttgcattctttctgcttctccgtgtgtgtcttgcagtgctcaactgatgtctgattgaagatcattttcaacatcattatcaggagcggagaccagcagaccgacagcacgcacatgatccccataagctgaatggccgtctcggtcgtgatgcggccccactgggcactggactgagatgccgtggccttggcccggcagcgggacaccagggccttaatggtggccaggttgcaggaaaaggtgactgtcagcgccaagagccccaggaaggcaaaggcagaggcgaagaaaaggttgccccagttatgcgaagagctagtcccgttgccccctcgcccggtgctgatgaagcaccacgtcccgggccactggacggtgtactggcccac

SEQ ID NO: 477297 - DNA, 1000 bp, Homo Sapiens
agctgcctcagcccctgagggtggacgggaggctctgctacaggggttcttccacaggctgtagaagaacacagccacttccacagctgtgctgtgttgaaagccacaggggcctgggtctctcagcctcacagggcatttgggcactaggaagtccgcgggaaagcaggaactagcacaccttgcagggcctggggcctttgggtcctgtgcaggggcagagcagaaggcaggttggggaccacaacccctgtctctaccagtgagcgagaaggcccattgtgtttcgaggcccatacaggaagctggggggccaggcacagtgcttcccaccagtatctgccagttctctggaccgaagcagggagcagggcgagcagcaagagggtgggggcctgggtgggggagccctgggcagtctaggttgtcatgggaccctcggagcctatggagctggcggactcagagccagccttcagctgcaggcctccagggttgtagagatcgaattcctcagctactgccagctgcacgcggccattgaggcccctccggcctggctccagaaagactacgtgcttgtggacgctggccttgcggctgggtgcgtctggcggtgtggtgctgagtactgaggactgtgcgctcagctcttggagcgggctgggtgtttggggccagcggcggcagcggcaggcacggcggcagcagcggcagggtggggcgaacaggtagagcagcacgagcacaaggcccacggcacagcccagcagtgtggtgaagcctgtgttgaaagcctcgggctctgggcgcggaaagtgcacgctcacgttgtactcgtgcgtctggttgtggtgcaggcggggcccagtggccaggcacacgaagagtcccgcatgctgctcctgtacgttgcctatggccaagctgccgtcggccagcaccgcgatgctgccatcgcgggatcctggcgccctgagaagctcctgctgcggcgaaa

SEQ ID NO: 477298 - DNA, 1000 bp, Homo Sapiens; identical to SEQ ID NO: 345481

SEQ ID NO: 477299 - DNA, 1000 bp, Homo Sapiens; identical to SEQ ID NO: 345482

SEQ ID NO: 477300 - DNA, 1000 bp, Homo Sapiens; identical to SEQ ID NO: 345483

SEQ ID NO: 477301 - DNA, 1000 bp, Homo Sapiens; identical to SEQ ID NO: 161190

SEQ ID NO: 477302 - DNA, 1000 bp, Homo Sapiens
ctggcctggttggcagcctcccggctcacacggctgacaggtcgacgcggtgggcagagtggctgctcttgtcccaagggctgagcttggtggaggccatgcctggccgggtcccattcatgaggtccgagtggaagggcttcgcgttggaggtgcgggcggagctgctcgtgagcgaccagaccttggttttgtgcttgaaggcggctctcacctctgaattcaggagacaatgaaagaggaatatgaacagtccctgcagggagttgagcgtggcaaacatgtactggaaaaccacagcacaaccgttgacagcaagcacgccaaagacccacgaggtacccaggatgggcagcagcacggccactgccttggccgtcaacttgaaggcactggggtctccatggatcttgtagttgtcggcgctgatctgtgagatgactctggtcacagcgatgaggatgccaatgttgaccacgatgacaaacagggcaggggctacaaaggcccagatggcgccactcgccaacgacagccagcaattgttgcttgttccgtaactgtccatggcaaatgacagtgaaatgatgcagatcagaagaggaaaaccccatcccatcccatagtagtaacggtgcttgctgtcctccgacccaaagaccttgatcaccatgctgtagaggtgcagcccctccaccagcatccatgcgaaggcactcaggaagaagtagtgtaggagcacggccatcacttggcagggggtcgtgcccggctcgaggcggaaactaatgagcagcaggacctgggccaccagcacggcgaaggacaggttggcgtggatgtggtagcgctggttccggatggtgctcacggaggacagcacggcgaaggtgaccagcgtggccaccaggcagagcacggagagggagcagcccacatagctgatagacgacagcgccacctggtgtccgcgtgcaagctccagcgggaccacctgcat

SEQ ID NO: 477303 - DNA, 1000 bp, Homo Sapiens
ttttttttttttttttttttttttttttttttttttttttgagctttggatatgttttatttaatgtggtggcaattcatccaaggggtgatgttctcccagcatttggacacacagggcgtttgaccaagcaattccacttctgggaatctatcaaacttcctcttctggggagactcagctccttcaggctggcggtgagcgagggcgccgactggcccagggcctggctgcgcatgcgcacgaggttggacgtctctgcagaggccggccaggcctgtcccgccaccgggtttggaagaaggtacctcccagtcagggctcctcccaggctccctcgccttagctgtcttccatcctcactcagctgtcttttatacttcagtgattttccagggccagaagccacatctgggttgctgcatttccgaaacggcatgggtggaggggataatatgtggtcaagctcctcgtcctgctcctcctgggacgcgctgctgccccggggcgcgggcggcacagctcctccgggaagcggcggcggcagcgcaaggactccgcgctccagcagcacgcttgccggagcccacgcggcgggcgcccgggcgcccagggtgcctcccaacggcggcggcggcggcggctgatgctctctggagaagccgccgggctccccttcctccgacagagtttctgagcccgaggaggactcggccgaggaagcacccggagaggacgcggcgaccagcgcagaggctggagtccggctgccgtggccactgcagccgcggggcaccggctctggcgcctccgaaactttctcccccatttccctgtctggcccaaagtgcctcccgagcggcgggggcgcggcgcgcactcagcgcctcccggggaagacgcgggctcctgggctcaggctcactggcactgccgctcccgggctgcagggagccccgccagcgactacatggcagtgacggggccgcaggagcccgct

SEQ ID NO: 477304 - DNA, 1000 bp, Homo Sapiens; identical to SEQ ID NO: 345485

SEQ ID NO: 477305 - DNA, 1000 bp, Homo Sapiens; identical to SEQ ID NO: 161191

SEQ ID NO: 477306 - DNA, 1000 bp, Homo Sapiens
ttttttttttttttttttatatatataaatattcataaaaactttattttcaatagcaaaaatcttggtaacaacgtaaatgttcatcaacaggtaaatttgttcatcaacaaatcatggtatacctatacaaaaaaatgttacttaccaataaaagggatgaactattgatacatacaataacataaatgaatctcaaaataattgtactgagtgacaggagtcatactacaaagcatagatgatgtatggttccatgtatgtaaatttctttaaaaatgcaaattaatctatagtgacagaaagaagattggtagttgcctgagcagatcagtggttgggatgggacggggagagggagaaggaagagtgagaaattacaaagatgcaagaaggaatttgggagtatgatagataggttcattatcttgaatatagcgatggtttgtttcatggaaaatgtgtcagaacttattgtagaggttaaatatgtgaaatgtattctgtgtcaattaaagtgttcttcaaattagaggtggaagtgagaacaaaactcacagatgtatacctttcagtcctgtggattaattttgcccaaacctgctttggaaaacatgatccctaaatgaatgtggcctaacagatatatcctggcttggtcaaatttaagtaagagctgtaatatgaatggttcatgtaactgttaactgtcagtcaaaaacagagtcaggattaaccactgttcagtccaactcattaaagaaataataaagcaggcagcagtcagtggtggtataaacagtgacataagtgagagtacaaaccagtgtaactttctagggaccaatttggaagaagtctcaaaatgtgctcaacttttatctcaacagtactattgttaggaattttaaaaaatatattaaggatgtgagcaaatatttagtatatccaaaacagcataatatatattattagcaatctattatttgttaatagaaat

SEQ ID NO: 477307 - DNA, 1000 bp, Homo Sapiens; identical to SEQ ID NO: 345487

SEQ ID NO: 477308 - DNA, 1000 bp, Homo Sapiens; identical to SEQ ID NO: 345487

SEQ ID NO: 477309 - DNA, 1000 bp, Homo Sapiens
cacattgtaaaatatagtttacttcaaaagatgatcctgaagatcccatcacagagtgtttaagggatgattataaacttttagcccttaagagagaatatatatactcaactgagtactgtctttcaaagcagtccctgtcagtttgtccattgattccatagcagctctcactgcccaccctgcttgagaagcctcttggagttgcctagagagtctatagcactcatctgaaggccctccatgagaacaactcttctcttccacatagatatttttgcatcagcccaaagctatttggacacaagtttggtgaacacggtaagaaaaaaacaaaccaagcaacaaaaacaaaaagcaggcagtgctgtgttagactgaaagtaaaagataaaaactctaagaacctatgaagcgccagggcagtgctggttgctttcacccatatggtctcctttggtgttctgctggtgcttatgaagcagtatccctactgacaatgaccctagcttaagagggctgagaactgctgaaagtgaagctgtttataaatggtacagtcaggaccgacagacacatgggtgtggtatgactgcaaagtacctgtggaattcagatgggattaccatccccactataaagggcaatatgatctgttgcaggagggtttatagggtacttagttacacaggtcacactgatccccttttcctctttttttctatgcaagtatctatttgtctatatgtctgtctaccttggtaggttgggctccttgaagaagggttatgttttcttcatctccatatccccagtagctggccaatgcccagtatacaccaggggctcagtcgctgtttgtcttattttcttgttgactctactctgacttaggacatatcactttcctctcttgaccttcacattcagatgtgttaataaaagtggataaagaccactctagctttaaaacaccctccaatatagagagaactctgaa

SEQ ID NO: 477310 - DNA, 1000 bp, Homo Sapiens
tttttttttttttttgtttatagcggctttatttttaatcactgaaaactggaagcaatcaagatttcctttaatgggcgaatggataaacatactatgctatatccatacaatgaacattattcagcaataaaaaatgagctatcaagtcacaaaaagacatggaggaaccttaaatgcatattgctaagtgaaagaagccagtctaaaaagtctacatactgcataactccaaccaactacatgacattttggaaaaggcaaaactgtagagacagtaaaaagatcagtggttgccagggcacggcgggagggataaataagtgaagcacaggattttgagggtggtgaaactattctgtatgagactgcaatggtgcacacatgccattatgaatttgtcaaaacccacataaccttacaacacaatgaatcttaatgtgaactatgggctataattaataataaattaatattggttcatcatttgtaacaaatgtgccacactaatgcaccatcttaataataggagaaattgtgtaaggaggaatgagggtatggggtgcagtgggtgtatggaactctatatattatctgctctattattctgtaaacctaaacctatactttaaaaaatacagtatattaatttatcttaaaaaataaaatcatagggaccaaaataaataacttttttggttctaatacaaagataatatacacgcctttatatcacacaagagtgattccaaacaaataaatatatggagagtatacaatttttattttattatactttgatactcttcttgaccttactatactcttaggtacacagcaacataccgtttgtaaacaataaaacatttcattaaaaataatccattaaaacttcaagtttcctttgtacactagagatactggattaaatgccttcttagaaatgccatgttaaccatttattttaaagtttccaaaatgcatgttttccagtggtttg

SEQ ID NO: 477311 - DNA, 1000 bp, Homo Sapiens; identical to SEQ ID NO: 161193

SEQ ID NO: 477312 - DNA, 1000 bp, Homo Sapiens; identical to SEQ ID NO: 345491

SEQ ID NO: 477313 - DNA, 1000 bp, Homo Sapiens; identical to SEQ ID NO: 161194

SEQ ID NO: 477314 - DNA, 1000 bp, Homo Sapiens
cctttattatcatgtatttgacaagtaaaaatatgtattcgaggtgcatgacccagtgaatatgccgacatacacgtgctttgtggaagggtcaccacaatcaagctaattatcgcagcctcacctccgccagtcacctttcgagtgactttgcaggagaaagcaaagaaacagcaaaagaactcaggacctgactttgtttttgtgtaaggggccttcacccattcctgcacggagcctaggatcttctagaggacggagaaaatacacagaggcagtcgtggtgcaggttttgaaactcactccgggatgaaaggggaagctgtgaacagctgttctgctgtggattcacaggtgctcgtgacctgaccaaggacgaaggcatcgccagcctcctcggaccctcgctggcacccacatgtgtgcggtcacctgtcacctcttgatcccaaccccctccccgtccccctgcccttaacataaaagagcctggaattcgtgcagacttgagatggtctctgtgacactctcagtctgccgtctccaaaggctgctgactcgaacccgcttttcctcctgccagctctcctctgccgcgtgtggctttccagcagggagcacctgggtttattttagctcccatgcacaaattagaacgtggtatttgtctttctgtgtctggcttttgtcacgagcgcaatcgcctccaggctgtggcgaatctcaggacgtcctcctcttccgagctgggcaggatgcaggtcgcctgtccattcgacattttcttcgccccttcctctgtggacacgcctgctggcatcatggagattttcctgctgagagagggaagggacgtccatggtcctgcagggctgagagccgtcaagggagacaggcacagcacataagcaatgccagtgacgcaggagagcgagagcccagctcagcccacgccggggaccaaaggccctgagaagtgaccgtgctggtaggcgtggtg

SEQ ID NO: 477315 - DNA, 1000 bp, Homo Sapiens
tttttttttttttttagcttaaataataatgcttttattattgtaaaaaacaaagcaacgtgagacaagcagttcccaagttggtgacttagaggctggaaaaaaatccatggaggtgtcacatgaaaccagtatgtcttgaaaaagacagtccttcttggcaagctgccaacaacactcatattgggttctctggcacaaagctgggtcaagtccatgccctaacttgtcagagaggaagactcagactattcatgatttcttctagcaaatggggagaagcagaggtctgcttccttgagcaggttcaggaggtaaatgatacacactgtgtggacctcacaggtggtagacatgatacggcttctgcctcagaaactgtcagtgacataaacggcaagagccataaatggcaggtgagaaagtctaacactttctaaatggcatgttagaaagtgtaacacatacctggaacttaaggggaatccgcccactgtatatccttagatgttggggcttccaaatcaggtacttgtctctctcacaggtgtactccttcagtataattacactcaaaggaaattgcatattctcagtacagctaaggcttttctccaatgtgaactctctggtgttgaatgaggacagatttgcagccaaaggatttcccacattgactgcactgataaggcctttttcccgtgtgaactctgcggtgttgaatgaggctagaactttggctaaaggatttcccacattcactgcactcataaggcctttctccagtgtgaactctcaggtgtttaatgaggttagatttacagctaaaggatttgctacattcactgcactcaacaggtctttctccagtgtgaactctctggtggttcttaaggttggagctatggctaaaggatttcccacattccccacacacataaggcctttcccctgtgtggactttccgatgtgaactgaagctggagctttgcttaaatga

SEQ ID NO: 477316 - DNA, 1000 bp, Homo Sapiens; identical to SEQ ID NO: 345493

SEQ ID NO: 477317 - DNA, 1000 bp, Homo Sapiens; identical to SEQ ID NO: 161195

SEQ ID NO: 477318 - DNA, 1000 bp, Homo Sapiens; identical to SEQ ID NO: 345496

SEQ ID NO: 477319 - DNA, 1000 bp, Homo Sapiens; identical to SEQ ID NO: 161196

SEQ ID NO: 477320 - DNA, 1000 bp, Homo Sapiens; identical to SEQ ID NO: 340894

SEQ ID NO: 477321 - DNA, 1000 bp, Homo Sapiens; identical to SEQ ID NO: 345499

SEQ ID NO: 477322 - DNA, 1000 bp, Homo Sapiens; identical to SEQ ID NO: 345500

SEQ ID NO: 477323 - DNA, 1000 bp, Homo Sapiens; identical to SEQ ID NO: 345501

SEQ ID NO: 477324 - DNA, 1000 bp, Homo Sapiens; identical to SEQ ID NO: 345502

SEQ ID NO: 477325 - DNA, 1000 bp, Homo Sapiens
ttttttttttttttttttattttaaagcagtatttattaattgtagaaatttcagaaacacaaataatctaaaaaataaaagcaccaaatattcttccaggtcgtttcctgtgtgagagtatgtgtgtgtgtgtgtgtttgcttgccaaaatacaatcgtgttgtatgaaatgttttataatctgttttttgttgttgttaataattgccatctttacatgtcaataaatttttatttaatatccagtccagggcatactccggtttctccagttgttccagaaatgtgtttttacagctggttcatcaaaccagggtccagtctagatcttcacgttgcatctggttatctgtttggttgtactaggagaagacataaggccctgccccagcctctcccatcaagccgtccctgagcgcagtgtctctccagcctgggtgtgtgaagggagcaccttccttcaagggtctggggcgaagacaaagtcgagggcctggcgctcagcccctgccacgttggggtgccagaggtccacgatgaagaccactcgaggcccatcttcgggggagccattgtgagccactgtgtgtagaaaagagtcgtccaccagtagacagtgcccctcagcccagcactggggctcaccgccgaccaccagctcacagccaggagggatctttaggcccagatggcatctgacccgggcattggtgggcccacagcggccctcgagccgggccccaggcaggagaacggaaaagccggcattgccgaaggtgttggcactcataaagcttcgaagccccctcagtgcccgataggcccccgggcaccggcggcagttgctgggttggcaccggcctgcttggtacagcaggagctggtagcacccgggggccagaggtggggaccagccccgaggcggaggggtagtccctgagaagtcccagctcacagccccgaagtcccgcaaaatggcagggaagctgctctccagga

SEQ ID NO: 477326 - DNA, 1000 bp, Homo Sapiens
tttttttttttttttttttgcataaataggaaatcctttaatttgataatcattcattcaacaaacatctattgagcatctcctctgaataaagtataaaatgttttctacttttcttttttaaaatttgttttaaatcatcctgagaaactctttaaaagtttatttcctaggatttacagcagttaacattcagttccaccaataaaattcctcactggattccacacaggacagatggatctctattaggtaataaccttccaggtggtgctgacactgcacatatgtgaatattcctctctgtgggaaatagagatgtaacttctacacttgcctcaacctgctactatgactttcttcacagtcctgggttttcaaagatctaaagttaactcttctcttagagaatacatgcaaacaagtaaacttaaaacttcaatgcaatgctcttatcccatagctctggttcttgtctttgtaattgatgcctcctgagctgactgctggcctcggtgtgctcctgcttgagagctgtctgccgggggaggagaatgcccagctctaatagttacatcttcaaaaaggccacctgaaaggaattcacacggcgaagggatgaaggcagattggcattactctttgacaatatcaacagcagctccaagcaggttgcagagggcagggttagcgggtggacgctgatgtcactttcccacaagctgacaagtttttcattcctgcttttgatgcatggctggtagaggaccttgacagcactccaggcagaactagaatcggctttgaatgtgttttccaacaaggggaattttttgatatatttggaatttctcaaagattcaatcaccaaactgtctgaatttaaaagccatagcaagatatacactttgtcatcctgaccttgaatcgtgaatctaaaagtgcttctagcagaggagagctgcaccagacactgggcgatcacgctctggacaaacca

SEQ ID NO: 477327 - DNA, 1000 bp, Homo Sapiens; identical to SEQ ID NO: 345505

SEQ ID NO: 477328 - DNA, 1000 bp, Homo Sapiens; identical to SEQ ID NO: 345506

SEQ ID NO: 477329 - DNA, 1000 bp, Homo Sapiens; identical to SEQ ID NO: 345507

SEQ ID NO: 477330 - DNA, 1000 bp, Homo Sapiens; identical to SEQ ID NO: 340240

SEQ ID NO: 477331 - DNA, 1000 bp, Homo Sapiens; identical to SEQ ID NO: 345509

SEQ ID NO: 477332 - DNA, 1000 bp, Homo Sapiens; identical to SEQ ID NO: 161198

SEQ ID NO: 477333 - DNA, 1000 bp, Homo Sapiens
ttttttttttttttttttttttttttttttctgctcagttctttattgattggtgtgccattttctctggaagcctctttagagaagaacacagtggcgcaggctgggtggagccgtccccccatggagcacaggcagacagaagtccccaccccagctgtgtggcctcaggccagccttccgctccttgaagctggtctccgcacagtgctggttccatcacccccacccagggaagcaggtctgagcagcttgtcctggctgtgtccatgtcagagcaatggcccaagtctgggtctgggggggaaggtgtcatggagccccctacgattcccagtcgtcctcgtcctcctctgcctgtggctgctgcggtggcggcagaggagggatggagtctgacacgcgggcaaaggctcctccgggcccctcaccagccccaggtcctttcccagagatgcccttgcgcctcatgaccagcttgttgaagagatccgacatcaagtccccaccttggctcgtggctctcacttgctcctgctccttctgcttcttcttctccagctttcgctccttcacgctgcgcagcttggccttgccgatgcccccagcttggcggatggactctagcagagtggcccggccaccggaggggtcgaccacttccctgggagctccctggactgaaggagacgcgctgctgctgctgtcgtcctgcctggcgccttggcctacaggggccgcggttgagggtgggagtggggatgcactggccagcacctcaggagctgggggaggtggtgggggcggtgggggtggtggtggtgctgttagtaccccatcttgtaggtctgccttgagaggctcggctacctcagtgtggaaggtgggcagttccggaatggtgccaggggcagagggggcaatgccggggcccaggtcggcactgtacatgaggtcgttggcaatgccgggcaggtcaggcaggtaggacggaacatca

SEQ ID NO: 477334 - DNA, 963 bp, Homo Sapiens
ttatgaaagtcctgcagtgatgtcaccattaaaaaatgttgccctactgaggagtctccccagggccctcttcatgtccgtgttcctcaggctgtagatgaaggggttcagcatgggggtgaccatggtgtacatcactgaggccaccagacttgtcctagaagatggtgtggctgcagaactgagatagaccccaaagcccgtgccatagaacaaggtgaccactgagaggtgggaaccacaggtggaaaacgctttgtgctttctcccagctgaggaaatcctcagtatagagaaaacaattttatagtaagagaaaaatattccagtgaaggaaatcacacccaggacgccagttgcaaagtatatcaccacgttattaatgaaggtgtcagaacaggcgagcttcaggacttcaagtagatcacaaaaaaagtgtggaatttccatttcggtgcagaaggacagcctcaaaacagtcaaggtctcgagcagggaacccatgacactgatgcaccaggaccccagaaccagcagtccacagagctgggggttcatgatgaccgtatagtgcagggggtgacagacggccacgaagcggtcataggccatcacggtcaagagtaaattgtccaggcatccaaatgaagtgaaaaaaaaaatctgactgagacagcctgcatatgttatgaatttgttctgtgtcagtatattcagtaacatctttgggacagtcgtggaggtaaaacagaggtcagcaaaagacaggttggagaggaagaagtacatgggggtgtggaggtgggagtctgagcatatggccaggatgatgagcaggttcccggtgaaagtgactaggtacatggagaggaacagcccaaagagaatgaactgaatctctgacgttgctgaaaatcccaggaggagaaattcttgggcatgtgtttgatttcctgtttccat

SEQ ID NO: 477335 - DNA, 1000 bp, Homo Sapiens; identical to SEQ ID NO: 345513

SEQ ID NO: 477336 - DNA, 1000 bp, Homo Sapiens
ttaagtgggttgatatttataaagtgcttaggacagggcctgccccagagtcagcgccatgtaagtgtctgtggggtgaaatcacacatgctaagtggttaggtcactacctagcatgttgtcagttggcggtcaacaaatgctccaggaacacagggctttaccagagaaaggctccaggttgaggttgagcaggtacttggtgccacactcgggccccaagatcccattgtagctgacggtgcgggcacagagcaggaggcggcagacgtactcctcagcggtgttgttggtgatgtgggcaaagacgtcaaagtcactgcccatgttcatgctctggcccacacggatccgcatggccatccctgtctcctccttctcggccagtttgttcaggtggttcgcccttgtgaaggcctccctctcctctgaggacccctctgggtatttgtaggtgtgggtgatatcctcccgctcgtctcggcccacgctcttagtgctgatcttcagcccaacgatcagggaacggttgatggatttgtgcacagacccatcgtcctgctggatccagtctaccacgtcggcattgacctccgcaaagacaaagggcgcatcgtacttggtgctcaggtcgccctccttgatggcacgaactggaactgggccacagcagtacgtcccttcgctcttctcctggggcgttgggtccagggcctgccagccctcgtaccccggctgcaggtccggcctggtcatccacgactccacccagcagtggaagttccagatcatctcgctcttgtcaccctggatctccccaaactcattgcggaagtactcgatgagaaggttgctgttctggtcatgggccgagttgtagttggtcacgacgcgggtagggatgcccaggcacctcagcactgtgcaggccacggcggcgaagacccagcactggccatacttgacgcgctggcagccgtggttcttccagcgccgcagg

SEQ ID NO: 477337 - DNA, 1000 bp, Homo Sapiens; identical to SEQ ID NO: 345515

SEQ ID NO: 477338 - DNA, 1000 bp, Homo Sapiens; identical to SEQ ID NO: 345517

SEQ ID NO: 477339 - DNA, 1000 bp, Homo Sapiens
tcatgatgtaattagattatattttattagacattctttacaaatttaaaatactgttatttttacatgcacaaaggaaaatcaatttggataattatatttaggcattcattaaaatcaaccacaaaatagagacacttcattgtgtcatttatcaacatacttgatatgtatatctaaagtgcattatgttacaaaaaatatagaaattcagcagcaccaagatacatttacaaaataaatacatcaatggacaaaataaattatggtaaatgtgataataataattggattagccttggcaaaaaaaaaatattcacaatgaccaatgtgcagtttcatagagcaatgggggagacagttttattccaatgcatttacagtatttacagacaataaatatttctaatactttccatatgttcactattacagaatcctgcaatatgtccttggaaggtctctgctgaaaatttcaatgcctccgtgaatcgagctccagcgacgttgtggaggtgtcagacaggtggtccccttctagcccactcccagtcactccagagtctaaccaggcagagcgagttcgccgttttttcttttcctgctccttgcgtttcccgggcttgcctttctttttcttcccaggtgtcttgagcggctgctctttgtacgtctccaccttgttagtttcctgagttaggtatctgccctcatcatcagacccaaatcggacggggtggttctttgtgttgggagagggcttggagttaggggacacctccgaggtagctctgatttcagctgtgtggatttctgcgatcagatggtgaaggaagaatcgtcgccgtaaatcttggatggacttccccttgtcatggaggagctgatgttcagacacagctcttttgaggcggcggctgagaccctccaccgagcgcccgcaggagggcaccgcgtagctcagcaggaacaccgcgacgctccactgctgaaccagtct

SEQ ID NO: 477340 - DNA, 1000 bp, Homo Sapiens; identical to SEQ ID NO: 345518

SEQ ID NO: 477341 - DNA, 1000 bp, Homo Sapiens; identical to SEQ ID NO: 345519

SEQ ID NO: 477342 - DNA, 1000 bp, Homo Sapiens
gcgtaagaaaaatattggggaaaggagaagagaaatccattgtaaacttaggtaatccaaaattaaatttcagggaccatttatgaaactatctctttgaatcgtaattccagttacacattaaatttaactgtagggagacctgagtacaaacattcattgattagccttacagtaaatttgtgagatcaaaacttcctaaatcctattgcagatggtactagccactgactttgactttcagctgttagactgatcattagcaaacaacttctgggccaagtgcccacatcagttttgagggaactttgggatttttctttgctttgatttgtaacaatctatgtacgccttctttggtaaccctgatgagagctcaaagtaggactttaagcagatatcctaaggccaatatcccaattctgcgtttgtttttttccttgaggtttaaacagtatgttgaatcaacattctatcaagagcttttttagtgcttttaccaagaagttgttagtgagagctgcattcagttcaactttctttctcggttcctttccctaccctggtttagtgtgttgaaaaatccttttgcatcagcatttatgcagcatataatttttttactctcatccaacaggcacatttggatttactatttcacttgaacagttggtgtttactggcagcaacaagaacaaaatttatagcagcaaatggaagctgaactcgcatgctggctttgcactgaagaactttgtgtttgccatttcctaattgtgaaaacaatatgtccaagattttgcagtcatcagcattctgatgtaacgacttccatctggtcaaaggaagaaattcagaacctctatctccttttgaattctacttcagtgcaaaggtaactggcttaggagaatgttggaagacaagaaattcagacaatacattctgaaaagcgactataacatccacttttccaggggataattttcctgaagagcaa

SEQ ID NO: 477343 - DNA, 1000 bp, Homo Sapiens; identical to SEQ ID NO: 345521

SEQ ID NO: 477344 - DNA, 1000 bp, Homo Sapiens; identical to SEQ ID NO: 161201

SEQ ID NO: 477345 - DNA, 1000 bp, Homo Sapiens
gcctctttttttaaaaaaaccaccaattttgaaataagcttgaaatatatactatctataccacacatcttaaaagtaaggttggggtaattcagtatagataccttccaacagggcctgaaaatgggacaaaatatgttgacctgacttaaaagaaagttctgtcttgtaaaaacacttgcatagtttttacatgtagtggcctgaaccttgatccttatgaaggcaaatgcctttcatgcaaggactggaggcctgggcctttagaattaatttgtttattattattaagcattgaagttgtattattaatatttatagtatatttctatatgttgctgaaaataaatcatcctttctttaagaaaatactgaattccaatgatgagcttctgactgggtttaagagtcaccattgctgtgtacaatctaaacggtgatgaacacagacagtgttgttgttcctttggtgtctgttagtatggtctatcagaaatacaggatctatatgatagcttcaagtcacaaaaaatacacgtcacaaaaaaatacatgtcacagtacttgagaaccttacaaacacttaaaaattaacttctgattctgttcacttagaaatactaatgctacatttgagatgaagattattagaattttaaaaatatcagttgaacagtgcaacagatatttgagctaatgttacagtaaaacagtgtaaaatggtagccacaatggctcagcctccgtttttcagccaataagtattacttcttaaatttatattcaaaatgattctttaaatttacagctttgtctgtgtattttgaagaacaagcttgagagacaagttttgagtttagcagagccaaacctcaccaagaaagtaattttctgagaatgaaagaaaagtattatcagataagtaacattaatttgattgcgcaaggatttaatgttgtgtaagttaagttcaaaatctccttttaagtttatacagaac

SEQ ID NO: 477346 - DNA, 1000 bp, Homo Sapiens; identical to SEQ ID NO: 345522

SEQ ID NO: 477347 - DNA, 1000 bp, Homo Sapiens; identical to SEQ ID NO: 345523

SEQ ID NO: 477348 - DNA, 1000 bp, Homo Sapiens
ttttttttttttttcttagaaatggtttattgacaaatggcttctggggagggggccaggattccctcttagctacagaaggttccagggtccagctacaagcagggccctcgcacggggctcacacagagcaaggccactcagctggaatgtggcccctcaacaccactgcgcccaggctcccggacactggacccctttgcaggggtctgggtgtcccctgaggccggggccggcttccctcggggtgctcggtacttgttcttctggccgtagaacaggttcctctggaaaaggtggggaaggcggccctggtgcagcagcacagccaggaccatccctgtcagagggcccagccagtacacctgcacgtactccagtaaggtgtgtcccgagcaggcaaaggtcacagaggcggccagggcagggttgaagaaggcagacgtgaagggcccggccgtgtaggccgtgacggtgaccaacagagccacagcgggcccgctgtaggcgggaggactgtgccgcaggtgcaggagggtcagatggaaacaaaaggcgcaggcggcctccacaagcgccccgtggggcacggatgtgcgcagggccgagctgcagctctgggccatgaggctctgcagcaggtgcaggtcactgagctcccaggcccagcagaggcgcatcagggtgcaggcggcctgcatgcccagcccctgtgccgccagcttcaacagcgtgccaggcagagactgctcggccatgaggaactcctgcagggacacagtggggttggccgaggccccgtccaaggtgaccccgtgcgccaggaagagcaggaagagcagggtgagcagcaggtcaggcccaaagtccccagcccagggcccgagctcgaccagcgtcctcatcgcctcccgggcgaagacttcataggcgcccactgggagcagggccttggaggcccgcctggccgcctcacagagggcgaaggtggcaaagaaga

SEQ ID NO: 477349 - DNA, 1000 bp, Homo Sapiens
tgagtgcccatcagtaagggaaatagaagacatggatttctgataacatgtatggcaaagaaataggaaaaaagtaggagacattttagatacttatttataaagtatattaaattcctatgcatatactagggagaattagaaaaaaagtgtttatttgatagtagcctataatattacacgtgagcttccaaggtgaaaatgaactttttctatatttttcagagttccttgatgctgtttcctgaaagatagggaaatctatgttgcttgggaacctatgatgtaaagatgtacttcctgtaatatacagcttgatggagtaatagtatatggcataaacactttctcagtaataacttgtatggacagattaaacagaacacagacttggtaaaaagtttgaagcgttacgtctcttaataactgagtggttgtaactaattacacagtgaagtaaatgaatggtagagatgaagaaccaaaggtcacggctcctatgaaaacattcagaggcattttctaagatgcttcctcaataaatgacgcttgatcagcctcttggctattgagataggaataatttagaactaactgcctttttaaaaattctgttgaaaggttaaagctttttgttttcagtttgatttaaaaaggacagtttacaaacctcagtacgtatatattttacatgttaactctagagcatttatattcctcttccttatttcctgaatatgatttttcatgaacgttttctgatctcatccaatgagtttccaatgagctggtgtttaatccatgatcacatctctttccagaaaatcactcccatctctgctgatctagatttagaaagtgcgttgacaagtgaatgttccattcttgttcatattcatctatatactctgatctctctcaggcgtattccttcttgatgttgatgtacaaaagctgttattcgattcgtttagctgttattcgatttgtttagctgtta

SEQ ID NO: 477350 - DNA, 1000 bp, Homo Sapiens; identical to SEQ ID NO: 158420

SEQ ID NO: 477351 - DNA, 1000 bp, Homo Sapiens; identical to SEQ ID NO: 161202

SEQ ID NO: 477352 - DNA, 1000 bp, Homo Sapiens
aggttaccgtcctttcctttattggatttctgaattttttaaaaagtaaaagtaaagcaatcattaagtagttcagataaaagaaaagcatctttacctgagttacccatcaggtctactctgacccgccctagcttctcccagaacaagcttctgggtatctaaaaaactattttcatactgatttcatgtaaagtcctctctaccatatgagtcaactaactatgagaacagtcttctcatacatatgtacatagattctcacccacaattaaatctctcactgcagaacaggttttttggggcctgataagacaggagcttctaccaaaggttttctcagactcaaggtaagtatgggttttttcacctatgtgagttccctgatgtaccacaagagttgatcattgacaagcactcttcattcagacacttgcagtctttcctcagattgggtttttttttttgggtgcaaacccaagtaaggctctccaatgaatgcttttgccatacgtaagacaaatatacaatttttcaccagtatggcttctctgatgggtaagtcagagttttgttagaagcttttttcacacttgctggggcttctccccagggtgggttttctgaggtccaatgagatgttcatactgtctgcagcacaactgacactgaaggcatttaaaaagttgttctccggtgtgaattctcttacaacgagaagggctgagcattagtagaaagctctctcacactcagtgcatttctaaggtttcccacttgtatgaatcctcttgtgagtgatcaaatttgagctcagacggtaagttttcaaaacctctgggcatctgtagatttctcgttggagtgaggatgaagtgttctgttagggcagctctctgggcaaagaatttctcatatttccaattgcaggctctctggtccccactgaattctgagctctgagcaaagtctgagatttgtcctcatcttaatgagttct

SEQ ID NO: 477353 - DNA, 1000 bp, Homo Sapiens; identical to SEQ ID NO: 161203

SEQ ID NO: 477354 - DNA, 1000 bp, Homo Sapiens; identical to SEQ ID NO: 161204

SEQ ID NO: 477355 - DNA, 1000 bp, Homo Sapiens
tttttagtgttctgtgtgcacatttatttctttcaaagattgtttgtgttccagccacatcttctccaaaggaacccacccaagcccgtgtgcaggcttgctgcagggctgtcttcggcgtttaaagtgctactgaggaatacaatcattgtcacgtaagttcatcaccgcactccagcgtcaggccaaacctttccgtggacctggaaaacctgccactttcttctctttttacaatgcagtttcgacataacattggtagagtaaacaacaaaccacaagcctaaatgatgaatggtgcgctgctgcccagctgctaactgagagaacgaggcagtgtattgtgtttcgaatgcaaacggtcatggacccaagttaacctgagtttgctctgcaggattccgcgggggccttgccctgtgcaggctgctttggtcttcgtgtctaggccggtttggggcagtggggagagggcctggcagcagggtttacgccagccccgaggtctgttttccgtcagacagagatacgtgtcctgccttccaccatccaccaatttgtactctgaagtttccagatcaagagccgtgagattactacccaggaaacacctgccttcggtggccagcagtgtaaattaatctttccctctctgctcaaagcaactttgcaactctcgtctatagaggtggccagtaaaacccaagcaaaaatctaaacgggcaccaggtggccactgagtggcgactggtcgagtagcagttggtcataagggatcagggctggttttgaactcagacttgaaacttgacgaaaataaagtgctctgtcaaaactctcacagcaggttttcagctggaacaaggagatggctactttttgttattgctacaataacacacgcgtgtgtgcaaacacacataacacacacacacacttaaagctccatttcactcctccacaaagaacagaggcacctccttaaacaaagcaaacgggg

SEQ ID NO: 477356 - DNA, 1000 bp, Homo Sapiens; identical to SEQ ID NO: 161205

SEQ ID NO: 477357 - DNA, 1000 bp, Homo Sapiens; identical to SEQ ID NO: 161206

SEQ ID NO: 477358 - DNA, 1000 bp, Homo Sapiens; identical to SEQ ID NO: 345530

SEQ ID NO: 477359 - DNA, 1000 bp, Homo Sapiens
ttttttttttttttttttttttcaatgtactgtcattcttttaatgatgtttcagaacaaagaaaatgtcacagagttatatgcggtttttatctggtatggggaacaagaaacagttaccaacagaaaatatttccacagccccaaaatagcttacttacaaatatttgcaaaattcattcttatagtactcatgtagttttgtacttgaattgacagtctagagatgaaaaattaaaattgagcttttttattagaaagacaacagtacataatttaccccttgctaaaggtattcaataaaaaagtggagatatttttattcccaggtaattgtcacatacagtctttcttctctacttctgcttcattctctttgtgtcactttagtatgtgtacctcctgggtgctctctgtacattttttctcctctatacaagtctgtgccatggcttctgctgtcatttcttctgctttgctcttcaccaggatttcgctgtgcccgtttccttgtctccctttgcttgtaactaccaggacttctgctccggcttctccggctcctttcctccctgccgtggcttctgctgctcccctcctttctttcagagcctctcttctctgggctatgtttatgggttctggactttttgtcagaatcagaatggctccatttgctgtcctccctagaactctcgtgttttaagaacctgggcttttccttggctttttcccggttatggtgactgctagaaagttcttcatgaagctttctcttcttagacttgtccttctcttcagaatcactgttgttatgccctgaacacttgtttttctttcttttcttcctttgtatttttttttctttattgttactctcactctcactactgctttctgaagtctcagtagaggaagaggaggaggaggaggaagatgaggaagaagaggacttatgttttttgtgtttacttctgctcttctgaaactttttcttttt

SEQ ID NO: 477360 - DNA, 1000 bp, Homo Sapiens; identical to SEQ ID NO: 345531

SEQ ID NO: 477361 - DNA, 1000 bp, Homo Sapiens; identical to SEQ ID NO: 161207

SEQ ID NO: 477362 - DNA, 1000 bp, Homo Sapiens; identical to SEQ ID NO: 161208

SEQ ID NO: 477363 - DNA, 1000 bp, Homo Sapiens; identical to SEQ ID NO: 161210

SEQ ID NO: 477364 - DNA, 1000 bp, Homo Sapiens; identical to SEQ ID NO: 161211

SEQ ID NO: 477365 - DNA, 1000 bp, Homo Sapiens; identical to SEQ ID NO: 345534

SEQ ID NO: 477366 - DNA, 1000 bp, Homo Sapiens
atattttacacatatatatgatgtgatttatttttaagaatgggtacaacactaccacataaagcacaatatttattttctgtttcagggtaagaagataggcaaatgtgtttctagaaagaaaattattttcatattagctagaaatcagagaatacccaagtaattttcagcttccatgtccattgcatgccaggttctctggacctggtggccttgctccttccagaactcatgtctcttcaaacagaagctttcagttccaaccaagaagggtgtgcatctgaatgcttttcagcaaacctgaagggctctcctcctcctttccccaaactaccaggtctgtaagggagcagcctctccaggaaggtggtccccattgagtttataaaagaccttccctgagacctgagaaaccaccaaagtagatctctcttttctctcctgctccattaaaatgaaacctccatgaaaatgaaaaagactgaaatgtaaagatttcccgacgtagaaatggtgttaaattacaatagcataatgtggtccaagaaattctaaactgtgtcagaaactgtggattaatttgtttaacaaacattcattgtattcctaccaaatgccaggccctgggccagatgcaggaggctgcagtgttttgggagtttgccatttaatacagtacttctcaaatattagtctggataagaatcactttggaaaagtgtttaaaatgcacgttcctaagccccaacctagtttctgattcatcagatgggactagggcttaggaacctggaattttagccagtccccagatgattctgaagcagctggtcctcagttgtatcttgaaaaacattgacctagtgtgtttttaagttttgatcagccatttaatcaagccacttaaactcaggatttcagggggttagaagagatatatgatttctaaaatccttcaagaaatcttaaaaagacttcttaaaaaaggctttctatg

SEQ ID NO: 477367 - DNA, 1000 bp, Homo Sapiens
ttttttttttttttttttttttttttttttgttttttttttttttttttttttttttttttggttgtaaaattttgagatagtttttatttgaaaacataacattacaaagtttgaaaaataaaaaaattaatgattttaactatttttttcttttgttctcttgtttttaacttactattttgaatgacaaaaaaatggctcatatgtttgtccaaaacccttgataatatctttaattttttaaatacctgaaacagttaaattattatgtactaaaacatttactgtactctcagacagactcatataaaataacctcatttgtcaggagaaagaaaggtacatacaaagtagtaaattatgagttttgacaaaagtaatagacatttttagttatttaaataaattaaggaaacatcccaaaagacatttatacagtaaaaaaaaaaagtaaataatttcaggaaaaataaactgtattattacatttaaataaacatgaaaaagatacttggatgatggttttaatttctccaatagtcttcatgaaggttttgtagctgatggcaatggagcttttcctttccacttagcagccttttccattttcatcctttcctggtatcgtctttcaaagaaagccatatcatcctcttcaggtctccttaatgaagaaacttgactacttgtacctacatctgttaacgtttctggagaagaactagatgatgcttgaaatgcttttaggaatgggctgtctactgccgtaatgggagattctaaaaattcaactgaaggtacaccaatcccactgtcatctaaccgcatgtagccttccgccagcgagctgaaaccagttaatcctcccatggctgcataaggaatgtcctgtcccactggtttttcctgagccaatctttcttgcttagtttccactactgtgtcatgggcatatgcaggctgaccacaagcacaagtgaagcagctatggaatcctg

SEQ ID NO: 477368 - DNA, 1000 bp, Homo Sapiens; identical to SEQ ID NO: 345537

SEQ ID NO: 477369 - DNA, 1000 bp, Homo Sapiens; identical to SEQ ID NO: 345538

SEQ ID NO: 477370 - DNA, 1000 bp, Homo Sapiens; identical to SEQ ID NO: 345539

SEQ ID NO: 477371 - DNA, 1000 bp, Homo Sapiens; identical to SEQ ID NO: 345540

SEQ ID NO: 477372 - DNA, 1000 bp, Homo Sapiens
tttttttttttttttttttttttttttttttttttttttttttttatcagtcaactgctgttttattcacaccagatgctgcatggaaaaatcacgtccaaatttattttaaacaagagcaagtggtctcttttccaagactctctgagagagaacctcatcacagggacagcgcttcctcgtcagcgagcccgatggggcaggcgcggaagggaaaggccttctctgcatttggacttggcccactaaggcagaccacagagagacgccggagctggcaggaggccatttatgttctggttttctccgtgagttgtttcaaaaagggattgatcttaaaatctagtgtgattaaaaaggtgggtggggttaagagcaaaatatgctgctatatgtgtcccgcaggccccagtgtggactgtttctctgtccaggaacacacgacccactgtggacatgggagggtggggggtggggggaggtgcattggccctcacggggaaacgcatgcctggaggcagaggcaggacagagggtctgcagcgggggggcctgctggaggccaccaccgcagttagtgttgttgaagtgagtgagtaaacagcattagctctgcgacagaataaaatacagcgcctgtccaggagactgcgggtgagtgccacgcatggaggtccaagtgcggcaaatctacgcagtgtcaatgttgatggtggaggacggaaaatattctcgcaggacaaacaatgtattttatgcaacagttaggattctgaaattggaaacagagagttagatgtggccagtcaggcacagaccgcagtggagcctcacagagacaccctcacccaggggctgcgagagggccctacgggccccggggtggaatcggctctctagggggaaagtggcagaaatggctttacttctcctctgtggacaggcggtagagagccgcgcccaggtcctccagcttctccttgtcctccaggtcctggta

SEQ ID NO: 477373 - DNA, 1000 bp, Homo Sapiens
caccatttaagcaagaatttatttccaggactatgtttttactatagattaaaatttaatataacttaattcacatataaagacaactctgaagaccatctggatatgataatggcctggggttaagtgaaataattgaggtcatgctcaggcctgagcagataccaacttgctcaagcctgagaaataggacttctctctttcactcatcacttcaaaatgcagtggcctcctgcagaagttgcactcagctgaggaatgaggcttcagttccagccccacttgcttccatgtgactagcagattctcaaggaagtagttcatcatctggggtgtgtggtgaggggtgggggcaatccgtaggagctcttctccccggggcaccgtagggtaattgattgcttgcacgtagatgttatgtctgctcattagttcatcacagacttctgtgtttttagcagcatctgcaacccgcacagggatgatgtggctggggcagtggacaacagggaggccggcatccattagcatctgtctcatgagtttgacgttgcgctggtgctggcggcgaagcacccgtccctcagcgctcttcaggatccgcacagactccagggctccagccagcagcatgggtggcagagaggtggtgaagatgaagccagcagcataggaccgtacggtgtcaatcagagaactcgtgctggcgatgtaccctccaacacaaccaaaggctttgccaagtgttccagaaatgatgtccatttttggcatgactccatcccgatccccaatccctccgcctcgagccccataaagccccactgcgtggacctcatccacgaaggtgattgctccaaactcatgggccacatcacacagctcttccagtgggcacaccgccccatccattgaatggacagtttcaaatgccacaatcttggggactgaggggtcagatctttgcagcagttctctgaggtggctgacatcattgtgg

SEQ ID NO: 477374 - DNA, 1000 bp, Homo Sapiens; identical to SEQ ID NO: 345547

SEQ ID NO: 477375 - DNA, 1000 bp, Homo Sapiens; identical to SEQ ID NO: 345548

SEQ ID NO: 477376 - DNA, 783 bp, Homo Sapiens; identical to SEQ ID NO: 345549

SEQ ID NO: 477377 - DNA, 1000 bp, Homo Sapiens
tttttttttttttttttttttttttttttttttttttttttttttttttttactttattaaaatactgagttttatttcacatgtatatttttgtctccccaccatttccatgtctgaccaccgctactactatgtcctatcataacattccatacatacttaaaaccaagcaaagggtggagttccatctttaaaaactaaacaggcattttggacaacacattcttggcaatagaacctggacaacatttatcaaacacggtagggaaagttctcactctgcattataaaaaggacagccagatatcaactgttacagaaatgaaataagacggaaaattttttaacaaattgtttaaactattttcttaaagagacttcctccactgccagagatcttgaatagcctcttggtcagtcatccggaagcaattcttcacataattgatgaatttggcttccactttgggaagagaaccacctttttctatacttgcttgcatttttgctttaatgtcttctacagaactaggtccttttggtgttttaggagttttttcctgtttcttgaaggattcttgtcctttcttcactggcgctttttcttcagcttcctcatcatcaaaatcatcatcatcatcatcttcatcatcatcctcttcatcatcatcgtcatcatcttcatcagcagcaagttttacttttttctgtggaaccttgctaccacctccaggggcagaccgctttccagatatacttaagagtttcacatcctcctcctcttcatcttctgactctgcatcttcctccacagctactaagtgctgtccactaatatgcactggccctgaaccacacttcaaccttaagaccactggtggtgttatttcaaagcccccaagggaaaccgttggctgtacagacattttcaaagttgccagtgttactttaattggactgccttcgtaattcattgcctctgcttcaacaatgtgcaac

SEQ ID NO: 477378 - DNA, 1000 bp, Homo Sapiens
tttttttttttttttttgccattttcagtcactttattatcaggaactttatttttaaactaattacaggtacccaaagttcaaaaaattaaaacaaaccaaaatgagaacctcaacagccatagttgtttatttgctgcttattcttgtggccaaagaggaattctactaaatgtcaaatgaaggatgtctctaaactagaagacaagttaaagggccttgttgtcatttctgtcattgtggtggtggttgttggctttcttggagaaatatatctgtgactttctcaactaatgggcctctggccttaattatcaaagtatcccttttcctagaggaaaagactagtaataaatacatacggtatattatctaatatcccttactgttatcccagaaaatcttattaaatattaaagtgaactactgattagaatagtgcctgtcaatggtgactcaataatgatttcttgaatgataaatacctttaacttcatctctacttgttgctctcccatctcagaaacttatgaccttcattaagccccactagttactagtttggtgaccgactagggggctagcaagaaagctaactcataaggctatgacataagcactgaggcatcctaaagccttatctgggccacaataagttacctagttacctatacaaactctactccacagcctagctctggaaaatcggggaaaaagagagagagttcagcacccataacacactcctatgccacttcttttgcatttcttcttagccaacagttgagaaagactattttttagcttgtttcacttttccttgatcttctactttcttaatggctgcttggatcgcctcttggtcacccaggaactgatgaggcccaacagcacgcaggttttcatccaattccagaagaatggggactccagtaggaagagtaatgttgatgatgtcttcatctgagataccttccaggtgttttaggagtgccctact

SEQ ID NO: 477379 - DNA, 1000 bp, Homo Sapiens; identical to SEQ ID NO: 157266

SEQ ID NO: 477380 - DNA, 1000 bp, Homo Sapiens; identical to SEQ ID NO: 161216

SEQ ID NO: 477381 - DNA, 1000 bp, Homo Sapiens; identical to SEQ ID NO: 345552

SEQ ID NO: 477382 - DNA, 1000 bp, Homo Sapiens; identical to SEQ ID NO: 468658

SEQ ID NO: 477383 - DNA, 1000 bp, Homo Sapiens
ttttttttttttttttttttttttttttttttttttttttttttttttttttttgtttttgactttggtttatttaaaaaacaagccaaaaaaaaaaaaaaaaaaccccaactttatatacaaagtcaaactgaaaccacggattatggaaagaggcaagaattatgggtaacaggggagaaggctgggccagagccaataccacattctgaacacaggagccacgggaaagaggtgctggtttcttctggcaagaccggggtgactggaacgcagtgttctactggcaaacccagcccaacactgagctctttctagcatggactccattcccgtgatggccaagggagacccttcccccagaagcctgtgtccggaacctagcagagcctgtgccatccggaggagggggctgcttagccccagccaggctccatgtcttgctcttcagttccgttcactgacatcagaccttgtcccacactcgaaaagcctttttctcccctgtcttattctaaactggaagaggacaggagaaagtcagcacaagactaaaagggccccaggagaaataccaaggttgagggcaaaatgacattctaggggtgcaaaagatgttgtatttagttgttaagtggaaccggggttcctcacacatccatcccacatagcacagcccccagcctgatggcctgccgtcccctagaggctgagcatggggtcagccacccctgccctggctcccaggtctcgctctcgctgctttctggtaccgcaagggctccaactttgccgggcgccaccgctgccctcacaggatggcagttccgtgcgaggccgtcagttgctaggtgccggctcctccttctccacccagctgtcagccttttccaccacccgctggatctccagctgcaggggggtcagacgcctgcggagctcctgcagcagccgctggagctggctcttctgtcgctccgccgtccgggcggtctcctcg

SEQ ID NO: 477384 - DNA, 1000 bp, Homo Sapiens; identical to SEQ ID NO: 345558

SEQ ID NO: 477385 - DNA, 1000 bp, Homo Sapiens; identical to SEQ ID NO: 345559

SEQ ID NO: 477386 - DNA, 1000 bp, Homo Sapiens; identical to SEQ ID NO: 161217

SEQ ID NO: 477387 - DNA, 1000 bp, Homo Sapiens
ctagaaggcactttcgcaggagcaaggcaggggtctggggcgcggagggggtgggcgcaagccgccctcgtccagcggttcccgccgagcatggtgataatgagggtggggccagcgttggcggtagagcgcctggtggccccggggcccctcctcgtcctccgcgcctccctgcggcgcgcagcacagagagcccagccgcttccgcagctgtcgccggagccggcagtcgcccgcctggaagaagaggtagacgaagggattgagagcgctgttggccatcgccaccacgcgcagcgccgccgacaggccctctccctcccagtctcccgcgggcccggacgaccacgcggccgccagccgggcggcaaagtagggcagctcgcagcccacgaacagcagcgccagcagcaggctcatcttcaggctctgcaccttggcgcggggcagcgcgctgggcgcaggggctcgacctgggctcgccgaccagggcgctgcagccgcgggggcctgcggccggtgccgccaccagacggagagtaggtggccgcaagcgacgcccaggaccgtaacaggcgcgacgaagcccgcgacggcctcgtagaacgcgtagacctgcaggtgccagcgcggcaggggcgcgaagatcccgtggcagcgacgctcccccggccaggcgcgggcggccgggggcgcgcctggctgcagggacgttggcggcggcggcggcggcagcggcgagggggagtccccgcgcaccacgaaggccgggggcagcgccagcagcagtgccagcagccagcccagggcggcgagggcacgcgcgggcagcggccggccgtgcggaagacgcaccgcgcgccggcgctcgagggcgatgagcaccacgaggtgggccgaggcgccccgcccggatgcctgcagcagctgcaggaagcggcacgccaggtcccccgtggccgcgcggggctcgcccagcagttcccaggccagctgtgac

SEQ ID NO: 477388 - DNA, 1000 bp, Homo Sapiens; identical to SEQ ID NO: 159116

SEQ ID NO: 477389 - DNA, 1000 bp, Homo Sapiens; identical to SEQ ID NO: 161218

SEQ ID NO: 477390 - DNA, 1000 bp, Homo Sapiens; identical to SEQ ID NO: 161218

SEQ ID NO: 477391 - DNA, 1000 bp, Homo Sapiens; identical to SEQ ID NO: 345567

SEQ ID NO: 477392 - DNA, 1000 bp, Homo Sapiens
tttttttttttttttttttttgctcatttacattttattatcattgttattactaataaatcaatagaaattgaataacaaaggaaaaagctcaagataaataatttcttccttgtgaattcaaacacatgcatacacacacatcctcctctgtgtgttacttcctcctcacattctgtcctacggtacaaatagttacacaaaagtctacaaaacgcgagtagcagaccccagctgtgtaaagctcaggctgattctcagtctagatcaccagcttctccacgctaagtgtacttgtggtttcatcctcttcatttgacccaaaatatcctgggaggtccagcatcctctgctcagcctcagtgaggccaaacgacgtattgtcatagaaggcaaactcagggtgagtggggaagctttgacacttgtcttttctacactgagaagggctcagagaactgaccctctggtagttatctttgggggatatgggagaagactgcttccttgagacactcttgtgactgggggacggtccccgacgagctctgtggggctctgttctctcaattccggccactaatcctgcctggtgatccccaaggtctggtttcctcaagggctgccccaaagtgtaggatttagggagagggtttaatggaccacgggttccacttgcctcttggaaatgctccagtttttcaggaaacaggtgggcacctcgactctgaggcctaaatctgtcctctgcctgctcgcaggtccgcgtcctagagctgtaggcaggggcctgccgtggagtcagagtggacatgctcctctctcggaacggccgggcctgcctggcttcatggaaactcgctgtcctcctgaaatgggcgttcctggcatggctcctttcggacgggccccctctgctgcccacgtgccttgcctgtgacttgcggatcagagtctggctggggcttatggcacaactggcctgagtcacatttagatc

SEQ ID NO: 477393 - DNA, 1000 bp, Homo Sapiens; identical to SEQ ID NO: 345568

SEQ ID NO: 477394 - DNA, 1000 bp, Homo Sapiens
aggagaatagaacatattttatttaacagttgttagcttgattgataacttttaaatatttagacatatggtatgaggcccctgtgtgtactcttgccctggccctgttggcaatggggtgggcttgggtcagcctcacccatcagaccacaagctccaccagggcaggcagcccatgcagtgcccctgcccagagcacagcacctggcacagaggagcagacaataaataccggctgtgagaaacaaatgggataatccaagccgaatgcttggcatggtgcaaatgtccaataaatatcagctgtcattgtctgttgaataaatgaacaggtgggttggtggggctgggggccaagagccacaagctgaggtggcttgtgtctgaggagggaagggacccgctgttccctggggttcacgcttcctttcttgaggttgtgtcctccctccccacaccctgcaggcctgcccagctcttcgtggcaaagcgggccccagatgggtgtacttgtgtgtcagagtgccaagaggggctgggagctcctgctagggctatgtccccctcccctaggacagaacagctgggacagtttccctctttgccttcaggggcctccccaggtccagacagaacacacccagcttagttcctttcttttcacataggcccaaaggttggatgggtggtagctgaaagaactgattttccccctacccaggctgtactctggtgtgggaggagccttttctggggaatgaggtcactcactggaccttaagcaagtcacactgctgctgcaggcctcagcgtccttgtctgtaaaatgggatggtgtgtggaactggtgcatgccgagcggcagatgcaaggtgtgcacttggtgaatgggaagaagccttgcacagaacaccagtgggtcaaggacagcagaggcccgggacccccaacaggaaagcagatgaaactggcccacagccagcctgtgagaggctcaggc

SEQ ID NO: 477395 - DNA, 1000 bp, Homo Sapiens
tttttaaaaggtactcaaatgtcaactttattgtttctatataaacacttttgtactgaaaactgtaaaaataacaaagtttgctgtgattgcaatccaaatttttgaaagccagaaaatctaattatgctatagcccaactacctaatgctttctttatccataagtaactttgcttcaatttcttgatgttgggtttcatctcactgactttgggcttctaagacacatgggaatacttatatcatcttggcttctttgggtcaaatcaaacagtagagctaaagttattcaaatacattcagattacacagatcccttatgaattactagtatcatagtaggaagaaaaagatacaagaaaaatacatcctagaactcattatcaaaattattggtgtatagtctatactagcatagagtagctttctcaacctgctatataaaattactagcaagaaaaaaaggtgcaagaataagatttatggctgaagtggcttggtgtcttgattccctattctagcattctcagaaggatcccatccattagacacgcagaaactgcagggacatttgaatggtcttgattccttcttaactcccttaggctccttgtttgttggtcttctttcatgcgtacgaactccgccgagtaacatgtatctcaatcttgccatcttttctctctgcacagacagcaatgttcttactcctctcctgctgtaaagccactcatcttcgatttccctgaggactgctgctcctacagactctcgacggagtaaagcttccgatagaggggaaacagattcgctactagcgttgatagtcaagttactaaggttctttatcaacgtctcggaggagatttgagaggcccctgaatcgtcccgggaattttcttcggtgagcatttgtggagaccctgggatgtaggttggattaaactgtgatgggtccatcggcgtcttgacacaacactaggcttctccaggatctt

SEQ ID NO: 477396 - DNA, 1000 bp, Homo Sapiens
ttttttgaaaataaagtgctttattgctgaggagcccagagagcttcagggcggccatctgggggctaggactgaagtcccctaacttttggtggctcttgtgaacagagacagttgagacttcaatatttcaaccccatagaaggcaaggaagtgcagccaggggaatggggaggcagggaagaggcatgaggtgtgccgggagagcgattatgtgcatctcttcccaactctgagttcagtgcattcagtgatgctggcagcatgacatgggacactgctgggagaatttacaccacagaagctgcccaaatgcaataaatcagggcttttttcccctcccagagaactggtttactatagacgtgtgacacaccgtcccgagctagtgctgaacccacccaagcctggctactgtgacaagctgtcacctccccactcggggggagtgccaactcccagccctgcacatccctacaatcagcagaacagagggggctgagcaaaggaaagggaccagaattgggcaacccattccctgcctggagtccacttcgcctcagctgggctggcttgcagcccaagactaaagttggtgtccaacagaaaggcagcttggggctacagatagcctcctgtgcagtggctcgtggcagggagtggggaaagaagggcatgtgcaccacccagagataaggaggggtggccacccgggctggatgcccccccggcaaaggatggctgtgcccatgagaagagtggcccttcctctgctggccatcagggtggagtaggagtgactcgtggcagatcccgggaatcgggatttttctggagctgctggctaacacttatgtgcagagccagggcagaagagcccagctcccaaggaggagaaaaatgagtggccagggtcccagcaggcagcagagggaggccccggcagacacatgcacatatgcacatttccagggctcccagggacacccaccctgggccc

SEQ ID NO: 477397 - DNA, 1000 bp, Homo Sapiens
aggtacacagcaacataccgtttgtaaacaataaaacatttcattaaaaataatccattaaaacttcaagtttcctttgtacactagagatactggattaaatgccttcttagaaatgccatgttaaccatttattttaaagtttccaaaatgcatgttttccagtggtttggtcttactgattttacttaatggaactatctatgatgctctgggatgtgaaaatcatcttatgtccccgacttccacaagtaagtaacaatgctttcacctctaatcttcatattgctgatttttgtttgaagtttgtgggcaagatttagctccataggtaaggacggaaacgcaggtctgacaagttacattaacatcaggactaaaagtcgcaggactacaaaccacacaacagctagcgcaattactgtgtagacgttcattttttccaaagcctggtcgacagctatccagacgtactacttgcaaactgtggtccacaaaatgcattgctggtagagttttattaaagttatggtagaaaatatatgcttggctccgaaaaaagtcttctattcgatctcttgcctggaggatattatgattagtggtatcttcacagtcaacagatccattgcaagcacctttccaccccggcgcaaaaggattaacttgaaatgctataaatagctcatgtatgaggccatgttctggaatttcaacagaatggcatttatatgatggctctatgacatggcatgacaaatcagaaattagactatccaagattttcttcagcactctaaagaatacatcattgtatctccctatacaagaccttgtggtaaaacgtacagccatctgatatgaataatcaggttcccgataggcaaagaccataaagtcatatctctttttgactgttttttcttcttgagtttctgctttaacagtcttataagaaagagtacatgtgtaaagtccagacaaaggctccaaaaaatct

SEQ ID NO: 477398 - DNA, 1000 bp, Homo Sapiens; identical to SEQ ID NO: 345572

SEQ ID NO: 477399 - DNA, 1000 bp, Homo Sapiens; identical to SEQ ID NO: 345573

SEQ ID NO: 477400 - DNA, 1000 bp, Homo Sapiens; identical to SEQ ID NO: 345575

SEQ ID NO: 477401 - DNA, 1000 bp, Homo Sapiens; identical to SEQ ID NO: 345576

SEQ ID NO: 477402 - DNA, 1000 bp, Homo Sapiens
ttttttttttttctctgtctagtttttcttcatttgtcttctccccttgcttggtttccaaagtgcagttagaatgactataaattttaacctccagaggaggagccaagccaagccgttctttgcacccaggcatctggggaagtagagaggccctcagcctggaggggagacctaggccaaggaactgggtgggggctctctctcatgtgtgtgtagggggtgagttgagggcatcttcccccagcccacattcctccttcccctacggtcaaggtggcttgtcccttctcaatcctcccgcccttcccctaccttctgagaggatggggtcctgggaactgcaggacacagctcccccagcctcccacactgtcctttccatagcaagttcagttgtttgccctgtcccagggctggaggtctgaggagggacctgggcagtgcgggtgtgtgtgtgggagctgaatctatccaaggacgagaggaaggagagaaggggtgtgggggggtctccctcagcccccagctctgccccttctctccaggctcctccccaccagctccgcacaccctctggccgcctgaggctttagacttcctgatcctcaaagacctcgaggaagagtggggggaagagttcggtggggcactcgactttcatgtggaggaagcggctggcgtggcaggccccgatcatgcggaggtcagtcaccttcatcagcagcttgggccagaagtgcggaatgttgtgtttgcggtggttgacgtagtgctcgaacgccagcaggtacgcctcctgactcttctcgatcttgtccacacacagcaggcccgagcggtctgttgacattagcagcacagcctgcagcagagccacttccgtgtcatccaggttaaaggcagagagtgacttgcccagttcaaagatggcgtcggagactacgcccaggccgccattcttgagctgctcccgcttgacagccatctccccactcag

SEQ ID NO: 477403 - DNA, 1000 bp, Homo Sapiens; identical to SEQ ID NO: 161221

SEQ ID NO: 477404 - DNA, 1000 bp, Homo Sapiens
gaaattaacaaagcacaaaatacatgtaattgttaatataccaaaaagagtgtttgacttaaaacaggtgcatcactggggtctgtggtgccctggagactgcaagccatttgtttacacagtgaaccactcagcagaaagaaaggccagtgatcatatcccatccagcctccaaacacagagtagatgcagagtagattcagattccactgaatggaatccattgaaaatgatcagtaacgttagttgaatgagagaagtagggccatttgtaaacggtccgtctgctcacattccaggaatctgtctagagtggaaggtgaagtccagctccctcagcctgggctcacgcacacagctgcttgttctcaagtggtatgtgtgtgcatgtgcatatgatcccaattgtgtagcagaaaggcagggcctgagtttctctgtttctcagtttctgagttcacatggtgaactggggaaggtgggaggttctggtgggtcaggctggctctgcagcaatgggatggagcatctgaggccatgagcttgatcctcagtgtctgtgtaaccatgagcaagacccttagcttctctgaacttagtctcctcactggtgacatggtgagttaatcaaaggagtgaggtcacagagagctgtgatgttacagtgaggtacctcttgaggggggccccaatatttctcttcttttttttttttttttttttttgagatggagtctcgctctgttgcccaggctggaagcggatggtctggggaggggactctggggcatcctgagaccagggaacccaggtcccctgagtgtgttggaagccttcccagtcctcagggacatcccagtggtaggagcagatggctgggtactgatgaggcttctcgtcatcagtgtcaggagcccaagctactgggcagtgagcacagcgtgtgggagagcctcgacggcgatggcggtgagctgggggcggggacacagtcatcatc

SEQ ID NO: 477405 - DNA, 1000 bp, Homo Sapiens
accaaaaacaatgttatttaattgtaaaatctccaccccctgagcatatgttttcaggtctgggtgactaattagactgggaaacaagggcaggaacgatggccctgtgcttgctctgcccgctgcctctgtggatgtgtgggccgctggcttcagtcctgcttttttgatggccgttgtttacgctatgtatttttgcaggaggcctgaggtgggctgggttctcctcctatggcagggcttcactctcctcctccgttggggcttcgctgtcccttgagaatccttcttcatcttcttgtaatgaccttcggtgacaacagatctcaatgaggcagagaagtataatcaaaatcgttagtattccagtcacaattaacgccaagatgagttttttggtatagccatatcctggaagttcttttgtgaactcaagcgacttctctttctgttcactctgggcttctgtgctctcattaatgtagttctcagtcttccattggtccgtatcccattctatcttggatgcctttacttcctgctgcccactgagaagcttcatcaggtggcctgtcctggagacgagcttggcacaggtcacttgcacatgggccccagagcagtccatcttcaaggtccggataacatgagcaatgagccttctcacattgttgttggggataacggactgcagctgctgggttagctgaatttcaaactgatcacctggggacgagagcaatgggtaattgaagcttttgggctcgggggacaggtcagtgcccacgttgttgtattcccattttgtctcagtttgtttaacagttggccctaagttgaatgcagtcccagcggaatctgcctcaggaggatgattgtagtttgtgttttcagagatggttccttctggcatgttagtgttttccataaaaacattttcttcaaaggcatttcttgcagttgtgtcttttgtattattgttttctataaaatgttctga

SEQ ID NO: 477406 - DNA, 1000 bp, Homo Sapiens
tttttttttttttttccaaaataagattgttttattccaatcctgaagaacaatagtccaaacaattcccctcccctgctggagactctcctgacccccagtgcccgccctccctctctcttcagaaggcgatgggggtcgatgtctccaggtcttggagaaaaaccaaaaccacgccccttgcatttcgtctctacccgtctcccacacatttcttttgtctcatctccgatttttcttccccctcctacatcccgtcccttcctctcctgcttcccccagcttttcctcatgtcttcatttctgtctctttgcttgtcctctctcctccatttccggctcccctttccattttttctcgcttacctcctctccttcatctgtcttctgtactttctccctttcccctctcatagtcaaactgggtccccctcaggtcggtggtactcctgcgatcttccagctgggccaccctccaggtatacccttccaatcctcttagcgcctggtcctccaactgggaccccctccagacataaccttccagtccccaatctttctcaccctccaactggggccccctccagtctctaatctctggccctctcaggtgccctttctctaacttcgaccctctcaagacacccccttccagtcccctcggcttctgattctccaaccgaccccctctccaatctctgatctgcagtgccctccccttctcaccttcgaactgagccccgccccagtctctggtttccagtgcccttgcccactccttctccatctgggctcccctccaaatacttccttctttcggagcccctccccagtcgcctgtctccaggcccctcaccctctcgttctccccctgggctcccctccctggctcatcctccagccaaggccccccgccatcgggcccctcgggcaccgcctccccggccgcgtcggcccactgcatggccaccaggtcgcgaaggcactgcgccacgccacg

SEQ ID NO: 477407 - DNA, 1000 bp, Homo Sapiens; identical to SEQ ID NO: 345580

SEQ ID NO: 477408 - DNA, 792 bp, Homo Sapiens
tttttttttttttttgtcgatgaccaacacttattaaaaaacagttgatcaagtaattccagtgaaagaagaggatctctggaagtaataaaaattgctcccttaattcattcttcttttttagtgccttctgtctagtgttttttcaaccataaaatattttttctttaggctcttcaattttcttctaaaataataaaattgtctttcatgggcctctgatgacttaacttcctttttttcttaggtagtctcccaggctctctgtggcttccacacagatgctaggatacatgccctcagtgtaagttgctaccagaagatacagatgggtcttcacgacaaccacaccagtgttctcatttttggcataaagagaatattcatctgcccggacacatctgtaatcttttcccttgaaatacagtccttctcttcgggcttgcaaagggttcttggcaaatccattcaccagtgttcggacatcactgggcgttacattgaaacctggtgatgctacacacaagctccgctcctggattttgatgagggctgcactgtccacatgcttggttcccaagagggtgtctaacaataagctctgcaaatggctcatgttccctcaactctccggcacaggcgcccgtttcccgccactgccttccagtgatttggtccccgagcaggacccaaggcggggcagggggtggtgagcggtgaattccctggcaccgaggactcgagggagcggacgccaccccgctctgtggtgcccgcaaggacccggcgacc

SEQ ID NO: 477409 - DNA, 1000 bp, Homo Sapiens; identical to SEQ ID NO: 345583

SEQ ID NO: 477410 - DNA, 1000 bp, Homo Sapiens
agtgaagtcatttctgtgattgtcccagaggtcactgtcactgagctcaccaaaggccttttgattttagtgtaacaacagtcattgactagtgactgtaaagtgatggggataaaaggtatattttgacttgaagctatcttcccttgtcagaagaaggccttctaatagtagtaataaattcttctgtctctaagtatagcacaggaggtatagaaaagcatattgtaggcataggcaatttctggagtttagcagtccagagctaactctctttcagaattgcaaatggagtcctggttctgttaagggaggaggctgggcaggataaacgctatagttgagaaactctgtatgtaggaatgttctcacacattcttgctttcttggtaagcttctcaaactagttagatgggcacagaggtttgaaatcagcctcccttaaaggctgcctgccatcccttgccaaagcagagatcagcaaatcttccaaggtgatggccagagaaggtcctgggcctgctggttcttagatttgtgtcttgtccccgtagtccatgtctgatttctcattatccagagaaatgttgacaacatcagaccacaagggacatcctggttggaaagtcattggttttcttggcgggctcctttttcctcttcttctccgagttgctgtggtagggcaggtcgcggccgcggtaggacgggccgcgggtcagctccagctcgctgtagggcggcagcgcgtcgtcggacgcgtcctcctggtcgtcctgcgacgagccggccttgtaggtgccgggcggcgaccaagcgtagtaggaggcgctgcgcgggccgagctgcgcgctccgcttggatggcgtctccaggctgccaccgcggctggcgccctcgggccgcgcctggcgctcccgcgcgctgcccaggtacgagtggtcgtatttgggtgcggtgcctggcgtgcggctcaccagccgcggcaggtgcgcgtcct

SEQ ID NO: 477411 - DNA, 1000 bp, Homo Sapiens
ctatagcacagagctcctctgaggggcagctaggctatttactccctcattttccacatcctggatgctgtcaagaagaggctggttcctggtttcaggaaggaggaggacaacaaggccagagaggatggcaaagactccatagatgatccagggcaggggtcgagaatatatgcttaggatcatcacgagggaagccagggctcccccaatattagcaaagtttccagtgattccagtagctcttcccctgattatggaaggaattagttcattttcttgggcagtagaacaggtaatgccaagagaagcagctcccacacccagggttgccaaaaccacacgcagggtctgcatttcttgaggcacaaatatgatggccagaaggcaggttgccagtaggaacatgagaagcatctggcttagtcgacggctcatgtgattcagtgcccaaggtgcaacacaattggccaggagggtgactgcaccaaagagagtctgcaacaggaaaacattgtttcccagatgctggaggtgcaaagtaaggccccaaaaagggatggtacttgcaaatctcacaaaggacaggaaacagattcttttacatatgttgggtatgcggagcaattcacaaagagaatgctttttctgtgctgcctccagttcttgcttcatggtggatttcaaaacctccatggttaggatgtcttcagcattcttcattccattcctgtgtgcagcttttctaagttcctttaagccctcttctggtttgttgttgataatgagccaccgagcagactctgccagccaccttgagaacagaaagaagacaaagcatggtgcagacatcaccaactggaggatgcactggtctcgaatgacaaaagccaggcttcccagggttatatgtccaatactagcagcacaaagtgtcaatgtcaatgccatggcacagaattggtgagttatccactctacaattaacaaaacagtattt

SEQ ID NO: 477412 - DNA, 1000 bp, Homo Sapiens; identical to SEQ ID NO: 161223

SEQ ID NO: 477413 - DNA, 1000 bp, Homo Sapiens; identical to SEQ ID NO: 345585

SEQ ID NO: 477414 - DNA, 1000 bp, Homo Sapiens; identical to SEQ ID NO: 345585

SEQ ID NO: 477415 - DNA, 1000 bp, Homo Sapiens; identical to SEQ ID NO: 345586

SEQ ID NO: 477416 - DNA, 1000 bp, Homo Sapiens; identical to SEQ ID NO: 345587

SEQ ID NO: 477417 - DNA, 1000 bp, Homo Sapiens; identical to SEQ ID NO: 345588

SEQ ID NO: 477418 - DNA, 1000 bp, Homo Sapiens; identical to SEQ ID NO: 345589

SEQ ID NO: 477419 - DNA, 1000 bp, Homo Sapiens; identical to SEQ ID NO: 161224

SEQ ID NO: 477420 - DNA, 1000 bp, Homo Sapiens; identical to SEQ ID NO: 345592

SEQ ID NO: 477421 - DNA, 1000 bp, Homo Sapiens; identical to SEQ ID NO: 345593

SEQ ID NO: 477422 - DNA, 1000 bp, Homo Sapiens; identical to SEQ ID NO: 345594

SEQ ID NO: 477423 - DNA, 1000 bp, Homo Sapiens; identical to SEQ ID NO: 345595

SEQ ID NO: 477424 - DNA, 1000 bp, Homo Sapiens; identical to SEQ ID NO: 345596

SEQ ID NO: 477425 - DNA, 1000 bp, Homo Sapiens
ttttttttttttttttttttaactttaaacaaatttttattacacaaaggttgtcacataattggatacttctctactttgtacacaattattctcactctccacagaaaggctgcttaacttctcatctggtggtggcaagcactaaaatcctgattttaacagaatagtagtaaaaatgcctcagtgatttaagttgaaagcagtacactggtacatggctcttgtacccagtatcaggaatgtacaaatgttttttattcaaaaatacaaaataaattatctgtaggcatggacaatgacagcagtaaaccattatatattttgtcaactgaaaccagtaactgatggttatagtgattttcagccagcctttttcttcattttctccaactgacttctctgaagttattggtgaggaacactgccttgggcttcctgtcacagttcattaataaaggtaaagcactagtctaggagttagaacatgccacctcccataccacctcccattccacccattgcacccattccagggtccttctcttctttaggaatttctgtgactacaacttctgctgtagttaacagagaggccacaccagcagcatccaataaagcagttctcacaacctttgttgggtcaatgattcctttttccaccatattcacaaaatctccagccatagcatcataaccaacttctgaggaactttgcataattttctcaactatcaaagatccttcaacacctgcattcttagcaatggtcattgctggaattttgagtgttcttttaataatttctataccaattttttgatcttcattagctggagtcaatgagtccaaggctggaatgcatcgaaggagggcacaaccccctcccaaaacaatgccttcttcaacagcagctcttgtagcattaagggcatctgtaactctgtctttcttttcattcacttcaacatcacttgtcccaccaaccttcagcacagcc

SEQ ID NO: 477426 - DNA, 1000 bp, Homo Sapiens
ttttttttttttttgctgttgaatattttcatagttcacaatgaataatacatttattaaacaaattatttctttcctacatgatttctctgatgttacattgagggttgacttatggcagaaaaattttccatattcattacatttataagattttactcctctatacatactcacagtttagcattgtgtaagttatttgatttgttgctttgttggaatttattactttgttggaacttattccttgtgggatttctgatgtaaaagaaagtttgatttgtggcgaaatgttttctcacatttgttacattcataaggtttctctcctgtgtgtattttctgatgttcagtgagagtccacaggcgacggtaggttttcccacattgattacattcatatggtttctctcctgtgtgaattcttctatggactctgaaggctgacttatggcagaaggatttcccacattcattacattcatatggtttctccccagtgtgagttcgctgatgttcaacaaaggagaacttctgacagaaggttttcccacattcattacactcatagggtctctgtcctgtgtgtgttctctgatggtgagtcagggctgacttcctgcagtaggttctcccacattcattgcattcatatggtctctcccatatagttctctgatgtacaatgaggtgtgagtttttgctgacggcatgcccatgttcactacactcataaagattctcctttgtgttcattctcttacactgactgcagtttgacttcacaatggagattctaccacatttattaaacacaccatgtttctctcctgtgtgtgttctctgatgtatagtgagtgttgacttatggcagaaaaatttcccacattcattacattcataagacttctttcctctatgagttatctgatgtgcaatgagggctgatttcgtacataaaaattttccacattgactgcattcatagggcttctctcct

SEQ ID NO: 477427 - DNA, 1000 bp, Homo Sapiens
aaattactcaataactattttttatttaacaactgagtacctgccatgtcccaagctaaatagaatatgactctatctcatagggacaaatgttctgaagcatcttctacttgctatgatgggttatatgagaaactcaaagcatgaggggtgggctgtgccctcaggaagtctgcagtcttgttagggaggacctggagctcatccatcaggagtctgaacccactcctggtgagtaaagtcaccaagtagcccaagtttcttgtaaagttcctggagtgtaaaacatgcttaataaatatttgttgaatgaatgaaagcttctctggcacaattaatttgcgattctcttgatccaagtcctcatccagaatcacatcattcgaagttcattattccacaatcgcagactcctccaattccaggtcattttggcacaccaggcgagcttcgccagcacctttccagctcacgtgcccgctgagatcacggacaaagccagaggcctgctggctctgatagtactcaagctgcttctccgccagttctacccgctgtaacagattctcaataaagtcctggagccgggctttcccttgaacctccttctcagctgccgcttccaggaaatggttgaatgtgacaacttcttcttctttcctaagaagctcctcctcagattccgtcaggcgttgcctcagtacagctatcatttccacggccacgtccacctgtctgtttaaggcccgctctcgtctctgaacttcctgctttttctgagtcagctgcacaaaagctgcccgaacttccaacagttccgcagttttctgggccaactctttggtgagtttatcaattctcttctcaatggtcctatccacagcctcaaccattcgattgaatttttctctgacatgtgcctcgaaagaagctttggtgtctgaggtgggcagtccaggacccgaccgtgtcccatccagcgagtctgcatggaggtcca

SEQ ID NO: 477428 - DNA, 1000 bp, Homo Sapiens; identical to SEQ ID NO: 345598

SEQ ID NO: 477429 - DNA, 1000 bp, Homo Sapiens; identical to SEQ ID NO: 161226

SEQ ID NO: 477430 - DNA, 1000 bp, Homo Sapiens
aaccgtatctgcaaacttgtttcactttttaaaaagtgggccttttcttgatcagaaaatagctttcagaggcaagtttctccctgtgaaggaaacccattctgtgcaaatgatcatttctgcaaaattgccctgggctggtccttagccagtctgcctgagttgacctgaatgcctgctgagtctgagctgggggccttaggggtttgctcatcaaggagcttacaagtgagtgggtgggtgtgggtacagagggacacttgggaccaggcggtgcccttgccacacccacctaatttgcagggcgagggaagagcagggtgggccaggagagggaggaagggagggagggagaagggctggagtagagtgcgcctgggaactggcacggaggggaccgggccaagcaagcagtgcccctccatcagaggagagccagggagccctttgggtgaggtcgtcttgggatccctactgccttctggactttatggatctaaaaaggctaagtatgtgttgatgatcgtgtgtgtgtgtgtgtgtgtgtgtgtgtgtgtgtgtgttctgaagtcctgcttccctctcaggttctgtctcttgggacacagatctggagagcccattctctagctggtgggtcttcattttctctgtagcccctccaggctcaggatccctattgcaaagcctcagggagaggtgtttcctggggcggtgttccctggagtctggacaccagctggatccggcaggacccatctccaactctccttccacctccttgttctcataactgcttctctcagcagcctccccattgacatagaagggggctttggcgatagtcggagctgtgctaagagttagatagctgtctgcagagggctcactggggtcagctgtagggtccttctggggattgatgtgtgatgcagtggggtcatcagcgggtctctccttagaaagctcatttggagggctttcctcaagcccattgggg

SEQ ID NO: 477431 - DNA, 1000 bp, Homo Sapiens; identical to SEQ ID NO: 157511

SEQ ID NO: 477432 - DNA, 1000 bp, Homo Sapiens
taagtgggaaaatacggaaggcccaactatttatttacatataatatttctacatatttatggggtacacgtggcattttgttgcatgcatagaaggtgtaatgatcaagtcagggtacttagggtatccatcagtttgatcaatttttttttttttgagacagtcttcctctgtcacccaagctagtgtgcagtggcgcaatctcggctcataagcattcatgaagaagagaaagggaaagatgtattgaaggtagaacatataccaaagcaccaagtacatggagttgtctagagagcagcaggcattatggcttaagcacagttggggcctggttgcccagagacggcatggcagcagatgaagccaagagttaggctgagtgtagatttggctaacatgtatgccctaaatacgtaatgaaacaagaaaaatggcaatttctctttaaaagaggatagacaacttcatttctttatctgagattgctctggtatgatgatagtctctggttttggtgtttcattcgtgatgagcacttcagggctttttatcctttcaaagctatagcattcagttttgtcttcagaagatactgttctagtgctgaccaaatgaaagccttcctttaataaagtgtcaatcagtaagccgaggacatttgttccgttggccaattttcggttatcaggttttatagaaacatacctgtaatcccagctactcgggaggctgaggcaggagaatcacttgaaccccagaggcggaggttgtggtgagccgagatcacgccattgcataccagcctgactccagtttggttatcagtagtgctgtcagaaccacactggaaaaccaggtcatggtaagaaggtctttgtggaggcagtggaagtaaggtcatctgaggagggaaaaagttaccattccaggtcggcgctgaaggttgttctgtaaacactgtaatcctccctgttagcatctcaattgttttgctgc

SEQ ID NO: 477433 - DNA, 1000 bp, Homo Sapiens
tttttttttctcaattaaagatttgatttattcaagtatgtgaaaacattctacaatggaaactcttattagatgctgcatgtactgtgctatggaccacgcacatacagccatgctgtttcagaagacttgaaatgccattgatagtttaaaaactctacacccgatggagaatcgaggaagacaatttaatgtttcatctgaatccagaggtgcatcaaattaaatgacagctccacttggcaaataatagctgttacttgatggtatccaagaagaaatggttggtgatggataaattcagaaatgcttccccaaaggtgggtggtttttaaaaagtttcaggtcacaacccttgcagaaaacactgatgcccaacacactgattcgcggtccaggaaacacgggtcttccaagttccaaggggctggggttccccaacgatcaagttcctgtgctgtaatcaagagggtcctttggactggatagggagcacttgggagctgtacaccatcagtcataatggatggcagtgtaaaagatgatccaaatgaccatgaacaaggcaaaagaggtcataaacccttccttcgtgagctcccacgtgccaccatattcttcctcatcaatctgtaggtaattgctgaagtagaggtacaggactcctgcattgatcaggcagaatctgagatgctcctgaggagtggtgcaccagacccaggagtgccactgtagggctgcttctttgctttagtcatcacacacacacacagctccagagcagcaatggcctttccctgctattcccaagaaccctcgtaatggcaaaactccccaaatgacacccaggaccacagcaatgatctgtcggaaccagtagatcacatctaaaaattcatccttatcctcccaggccgcgtcgctccgcagcaccttactccagacggagactttgagggccccgttggccagctgcggctgaggcggctcctccttccgc

SEQ ID NO: 477434 - DNA, 1000 bp, Homo Sapiens; identical to SEQ ID NO: 161227

SEQ ID NO: 477435 - DNA, 1000 bp, Homo Sapiens; identical to SEQ ID NO: 345601

SEQ ID NO: 477436 - DNA, 1000 bp, Homo Sapiens
tttttttttttttttttttgcatttcaatttttatttgttgccattgggtcacttttttggaccataagtcattcccagagctttctctgaatccatgaatgaaggacaaaagtatacatcccatcgctggtatacaacaataactttgaccacatgataggagaagtgagaaatgtagccaattttttcctgtagtttccatgtaaacatatggcagtttacacagaaactacagaaagtacagaaacctaaaatgaaaactaaaatttgttcccaggttgaaaagaggaaagagtttcagtgatagccactaaagccacagaagactttattctctggaagatgtttttgctaattataaggctgaaattactggcacagactttttttgcaattggctgatataatataataaaacaatggtgtcgagcggaaccactgtgaaagtttttaaggtggtcaaaggaatcattcctgtagttccagtgtaatcccagttgcagattaacattgtcaggtatgtcagagatacctgaagtacagtcatcacattcacagtgtgtggatccccatctcgaagggacacaatgctcctaaatcagtctctccattgcagggggtggcatcaagttccacatttccactcgggagccctccttctcctgacggctggggctgtaggttccctgagttgcccttttgttggaggtgacaacagaagcaacaatggccagcaagaggatcagtaacaaggcgacagtcactgagccaatagtggtgaaaatgtcggagatcaagtcatctgccaagtccacctcgcagcgctcgccagcaaaggcaacatcacagaggcactggaatttgttgagtaagtcctggcacagacctccattgacacacggatcagaggcacactcatcaatgtccttttcacaccattctccagtaaaacctggccggcacatacattttaattcagtctggaactctgtgcagttg

SEQ ID NO: 477437 - DNA, 1000 bp, Homo Sapiens; identical to SEQ ID NO: 345602

SEQ ID NO: 477438 - DNA, 1000 bp, Homo Sapiens; identical to SEQ ID NO: 345603

SEQ ID NO: 477439 - DNA, 1000 bp, Homo Sapiens; identical to SEQ ID NO: 345604

SEQ ID NO: 477440 - DNA, 1000 bp, Homo Sapiens; identical to SEQ ID NO: 345605

SEQ ID NO: 477441 - DNA, 1000 bp, Homo Sapiens; identical to SEQ ID NO: 345606

SEQ ID NO: 477442 - DNA, 1000 bp, Homo Sapiens; identical to SEQ ID NO: 161229

SEQ ID NO: 477443 - DNA, 1000 bp, Homo Sapiens; identical to SEQ ID NO: 345608

SEQ ID NO: 477444 - DNA, 1000 bp, Homo Sapiens; identical to SEQ ID NO: 161230

SEQ ID NO: 477445 - DNA, 1000 bp, Homo Sapiens; identical to SEQ ID NO: 345611

SEQ ID NO: 477446 - DNA, 1000 bp, Homo Sapiens
tttttttttttttttttttttttttaacggtaaaatttcagaagaaatgtttttattccaagggaacaggaaatatgtcgaaaagttctctctctaaaacactgatttcccatttatattcatgtgataattcagctcaaacctgtgatttcctttacggttttcagaatatccagttcctgtggatccagaggaggagtatgtgtgaaggagtcacccctaaatgccaccggcaggatgtggagatcgccactgatggaggtgcagtttttgaagtgtttaatattcgtagcatttatggagagtgagtctttaaattcaccaatacctattccgttacacactttgcggcaaggcccttcgcacttcttacacttgcggacgccgtcttcctccatctcatagctgtcggccccacaggctcggacgcacgagccgtgatctgtcaccacataattacggggacacttcttcacgcaggtggcaccaaagctgtatttgccctcggggttcacatccatctggtacgtggtggggttgtagagcatgagtggggggcaggtgtccttgcacgtggcttcgtctcggaatttgcggcagaccaggcagtcgctctcccgggggcctgtgcagcctgcagcacactggttgtggcagcagtcactgggggacttgccacggcagcgcccggagcactgctgggcacagatgattttggtcagtttctggcagttctcctctcctgcaccccagcagctcccattgggacagcttggatcacacttttggcagctgcccaggtggttctggaagtccatcgacatgttgctgagaaagtcactgctgactatgtcccgccactggatgctctccacgttgcacagggcagggttgttgctgaaccgcacggcgccatgcaggatttcctgtaaatttctcatgggcagctccttcagtccggttttatttgcatcatagttagataagactgctaaggcat

SEQ ID NO: 477447 - DNA, 1000 bp, Homo Sapiens
tctggatgttggattggtggttaattatttattatgcatttattcatttgttcattcactcagcaaatatttttgagtttctactctgtgacaggcgttgttctagcattgaacaaagcagccagtttgttattgagatgttttcacatctggcttttgacacagataattgtcccacagctggctctagaatttcaaacagaggggcagaaggaaccaaggctagaagcatggactggggccatgctaattacggagaaggctggcagcatggagtccctgcaggtttctgacaaattctgtgctttgaacaatcatctggcagcgaggaggaagaggtcagtcctgggggtgatggttagctactagttggggtgagaggcactggcaaagggagtggaaggaaggaaatgggtaggatactcttgggaacctggcggcccacgtgcaggggtggcagaaaggaaaagcggggggaacagacacgtgaaggcatgaggctcagtggcaggaggaggccgtgatgatcacagatgcagaaggccaggcatggaggtggctgcatccaccccaacccagctgaaactctgacggcagaagagaagggatccatcctaagcatgactcctgagcagctgggctcccgctctggtgggacacgctgccatcattactttgattacaggatgatagtttaaaaaggcagaataacatggctttgagactctcatttcctggcccgtaggtgcagtttggatggcacaggtggcacacatggccggcgtctgcgtacttccagaccagggtgttgttttctcccatgactcctgccgggcaggtcttgacgcagtgggggccgtcaatgtagtgggcacactggatacagttgtctggtccccgtcctgtgcaggtgatgttcatggcctgaggcaggcactctgggtggcactgtatgcactcagagttctccacaaactcccttggctcaccctccagaagg

SEQ ID NO: 477448 - DNA, 1000 bp, Homo Sapiens; identical to SEQ ID NO: 345613

SEQ ID NO: 477449 - DNA, 1000 bp, Homo Sapiens; identical to SEQ ID NO: 161231

SEQ ID NO: 477450 - DNA, 1000 bp, Homo Sapiens; identical to SEQ ID NO: 161232

SEQ ID NO: 477451 - DNA, 756 bp, Homo Sapiens; identical to SEQ ID NO: 345615

SEQ ID NO: 477452 - DNA, 1000 bp, Homo Sapiens; identical to SEQ ID NO: 161233

SEQ ID NO: 477453 - DNA, 1000 bp, Homo Sapiens
tttttttttttttttttttctgctgacacccggcactttattagtggggaaactcgccttggtctggcagagactgggatcaacaggaccagcacccatctcgaggtggtattttctgtaagatcaggtgttcctccctcgtaggtttagaggaaacaccctcatagatgaaaacccccccgagacagcagcactgcaactgccaagcagccggggtaggaggggcgccctaggcacagctgggcccttgagacagcagggcttcgatgtcaggctcgatgtcaatggtctggaagcggcggctgtacctgcgtaggggcacaccgtcagggcccaccaggaacttctcaaagttccaggcaacatcgttgcgacacaccggagaccaggtgatgagcttggggtcggtcataagcgcggtggcgtcgtcgctgggagctggcagggcctcccgcaggaaggcgaagagagggtgcgcccccgcaccgttcacctcgcacttctcgaagagcatgaagttgggctcgaacccaccaccaggccggacgtacttgagggaattcagaatctcttcgttcttggcgttctcctacaggagagaagggcagctagaacccggggtcaagaggaggagagaaacgttctaaccacaaacaagggagattttctatgagtcaccgggattttgccctccatgcgcaatcccaagggcggagaggaatttcagcagctacgagcaacagaaaggaaacgagagagtagccagactctccgcgcatggagccgacggcacccaccagcacaccgccggcgcccccagccactactgcacgtccgcccccgccccgccccgctccgcccggcgcacctgatgcccaaactggttgcacgggaagccgagcaccaccaggccccggggtccgaggcgccgctgcagctcgttcatctgggtgtagtcccggaccgtggtgcctcagagggacgccacattctcgataag

SEQ ID NO: 477454 - DNA, 1000 bp, Homo Sapiens; identical to SEQ ID NO: 345617

SEQ ID NO: 477455 - DNA, 1000 bp, Homo Sapiens; identical to SEQ ID NO: 345618

SEQ ID NO: 477456 - DNA, 1000 bp, Homo Sapiens
ctgtcttgaaaaaagcacctgctgcaccgtaagcccagggatgtggcagctgcagtgggcttggctttgtgaggaactgagtgtgtccacgttgggggaacatcatacttgatacacacgtttttatttgcacaaagaaaatgctatttttggagccagaattttcatgtctgatttatggtgattttcttaagaaccagaactgctggcagaaagggggcacccacacgcttagatagccgatgtcttattagagggcagtttgtggttcctgatttggaaattaacattctccaaacattccagtccaatgaaagttttatccgctttcccatataaaaattcttcccatgagagtgacttgattctcacaatcccgttggagtcgtgtgtgagtcctacagggtgagattcagcattgccatctccaagtgctcttcgtagggaaacagtttctgctcatgacgaggttccacttcccatctgatcccggcccggcctagctcggtggtgaacagctggcacgtctctgggttgcggacggtaaaggccacgtagacctcaggagcccgctggtgctcccggcaggcagccagcctccgcaggacgccgaccagcgacatgatggcttctgggcaatacagcacatctgctgcaatgacaacatctggctggaaggcagagagctgatggaccgtcgcgacgtcccagtccagctgggccactgtcaccctggggctgtctaacttggcagtgatgtctgcctctaatgagaggccattgagaaggacattccctcggagctgctcaaggacccggctgtgacagtcgctgaagatgtatgcccgggggcggcacatcttgcagatggccaggcctgtgaggccagcaccactgccaagctctaggacagtcctgttagtgaagactgccgggttctcgatggcccattctgcaaggtagagggcggcgtcccatgtgaccaggcctgtggtaccgt

SEQ ID NO: 477457 - DNA, 1000 bp, Homo Sapiens
tcactggcacacaagcagagccctcttgctgtgtttgttcttccctttggatctcctggccctccctcgcagggaagcgagtgtgccagtgttcatggactcctgatgtgtcggggtcgtcgaagagaggtttagcagggagctttgctgttcaggatgatggttcttcatcccacacttgtattttgattgatgaatcacaagtacgtcgggaggcagggtaccttcgacttttctgacgttgaactcaggcttcgttttgttttgctcttgaaggaatttccagtggtctaaggtgctttcctgagtggctctttccaccaagtgctcgtccaactcgggggcctggaggcaggggtggtctctcttgagctctccttgcgttgctcgcctgtctgtgtcttctgcgccaagggctcttggttccctgcctcttgacacactctcactgtgtctttcccattcactcttctggatgtaaaagaggacgtaggcctgttgactcaggacagaagtgatgctagaggcggtgacctcggcatcatccattttataccactggccttcttgagctttgacataagagaagtaatgtccgttgtgacaactccacccagcgtggaccagcacagcatagaggacatagacaagaggtcctgtgttctgctgagacatgtatggctgcatgtcaaggcactcaggatattgcacattcttggcaagtttgttgcctgtgacatcggagaatctcttcaakacaaggatgaggaccttggcagaagtgtgtaaagttaacgtcttggaggccggcgccctctggagacaaagaccacaatgataggcattctctccattgagttcttcgggcttcaccaactgttccaaagcttgcttgacactctgagctgcctggatatccagggcgatgtccaggtaagggtcaaaagtgtctggaatcccgtggcagtggagacacttgatttgagatctccagcagcct

SEQ ID NO: 477458 - DNA, 1000 bp, Homo Sapiens; identical to SEQ ID NO: 345619

SEQ ID NO: 477459 - DNA, 1000 bp, Homo Sapiens; identical to SEQ ID NO: 345620

SEQ ID NO: 477460 - DNA, 1000 bp, Homo Sapiens; identical to SEQ ID NO: 345621

SEQ ID NO: 477461 - DNA, 1000 bp, Homo Sapiens; identical to SEQ ID NO: 344892

SEQ ID NO: 477462 - DNA, 1000 bp, Homo Sapiens; identical to SEQ ID NO: 158216

SEQ ID NO: 477463 - DNA, 1000 bp, Homo Sapiens
ttttttttttttttttctttaatattaaaaatatcttttatggactgaagttgatctattcttttagagaagacacagaggcatatagtataatctttaaaaaattaaattactttacaagttaaaatggaagtgttttagtctttaagatttttaaaaatgcgtctaaaactcgatcttccagcaagcttttgtttgtgtcagtaggtgggactaatatagacccagaaagatggggctctgctcagcttgggacagaaggacctcgagctattttccagttacattttatattttatatcaaagcaccttatgtctatttacacagcaaagtcaaaagctaaaaccatgagagaatactgtttctcatatattttgagctgactctgataagctattgtttagaatttaaatgtatgcacagattttttaaaaatcagatagttaaaacagcactttctatgcaggggttctttctctatttgacattcacatttttaaagagcttctctagcatttaactgtagtccgtatctttacagagaagtctttttcattcttagcataattccaactttctatatgtacaataaggtctactttcttacacatgaaaatatttcttcagcacaaaaatggttaacttgaaaatgaagtgtagatgtttaaaaattaactttctagttctgctcccagctggaattaagtgccgtttatgaagaactagaatcctctttcagttttacggttaagtattcattcagtattggtgtctgctttctgccttccacatagatgagaaattcgtgatcacgatgaatactgaagttgccttttgtttccttcaataactgacaaaggtatttttttgagctgactcttctgggacctctgacttatttgtggcactgccagtgagattctcatggctgatgggcagcagtgtgctcagctccaggtccgtcaccatctgacgagattccgccagcaaacgctggag

SEQ ID NO: 477464 - DNA, 1000 bp, Homo Sapiens; identical to SEQ ID NO: 161235

SEQ ID NO: 477465 - DNA, 1000 bp, Homo Sapiens; identical to SEQ ID NO: 161236

SEQ ID NO: 477466 - DNA, 1000 bp, Homo Sapiens; identical to SEQ ID NO: 345628

SEQ ID NO: 477467 - DNA, 1000 bp, Homo Sapiens; identical to SEQ ID NO: 161237

SEQ ID NO: 477468 - DNA, 1000 bp, Homo Sapiens; identical to SEQ ID NO: 345629

SEQ ID NO: 477469 - DNA, 1000 bp, Homo Sapiens; identical to SEQ ID NO: 345631

SEQ ID NO: 477470 - DNA, 1000 bp, Homo Sapiens
tttttttttttttttttttttaacggtactcagattcctctacagtttattgttatagcagaagttgtgggagacgggagggcaccctccacacatactacagtgtggtcagagccccagggtagccctttccaccctatgccaagccccaagcagcccagcccaagcttagctccctccccagtcccactctagatgcacactgagctaccaaagttagtgcagccaaacggccccaggccccttcctgttgccccagcaccaatccttccccacactcgttcactgcccgccaactcccattccaacttcctttttacactggatgtttctatcacatcctgaggaccactaacccaccagcaagtctccccctgacacacattcacgtaggtccatacccttcagagtcctaaagggttaatgagaagccacctcagctttggtgaatggagccccagccccaaatcccctccccttgcaaatatgggacaagtagggagagtctgatggaggcaccaggacaactacaacaacctcttacccctcagctatagacacctagatcaggacagaggatgcatatgccctctccaccttaacatcaaaatgggggaggaggagaatttaggggtctgggtccctaagagatattaggacatctcttccaggagctggggggaatcacgggttaaaggtcaaggttagggtagcaatcaaagatcaaggtcatctccccgcatgatctgccctttttcccttgcttacggtggcccaatgccccttcagcacctcccaggttagctctgggggaggtgagggctgggtcccactctagggcaacaagggccattcaacaggagacctccatggtgtgccccgggggccccgaagaaagagttccagactcgctgctctgggacagggtgcgagagcgggaccggttgccatcaacggatgctgcactggtcagagaggctgtacgagaccgggacaggcg

SEQ ID NO: 477471 - DNA, 1000 bp, Homo Sapiens; identical to SEQ ID NO: 477470

SEQ ID NO: 477472 - DNA, 1000 bp, Homo Sapiens; identical to SEQ ID NO: 345632

SEQ ID NO: 477473 - DNA, 1000 bp, Homo Sapiens; identical to SEQ ID NO: 338797

SEQ ID NO: 477474 - DNA, 1000 bp, Homo Sapiens; identical to SEQ ID NO: 345634

SEQ ID NO: 477475 - DNA, 1000 bp, Homo Sapiens
tttttttttttttttttttttttttttttttttttttttttttttttttttttctttaaagtttatatatttgtgggaaggtcacaatttacatacttccaaaaaacaaaataccttggtttatacattgtcaaaacagtctgtaaaaatcaaaacaaattgaaacaaaggcagagatactaggcgaaagaggcagagacttcctatatacactacaacttcctattcaaatttcaaagtgcttgtttcaagagaacacatttctcacctactacctttaaactaacatgcttctggaaatgtggttttcctccaaggacagggattcaatttagctcagctctggctcattagtgtgaataaacagaagggctttgcttcagggaggtagacaggaatcacaacaaggcttgactttaatgagaccacattaccacagaggttctcttttccagatgacttccaacattgtcagtgacagtcaactgttgggagcagatcttgggacaaaccttttagggaaaatgaactaaatcagcatgagccactgtcaagtttaaggtgacagctgaaggctgggtgtggtggctcatgcctgtaaccccagcactttgggaggctgaagcaggagcatcgcttgagcccaggagtttgaaactagcttgggcaacatagcaagacctcatctctacgaaaaaattaaagacttagccaggtgtgcacatctgtagtaccagttactgggcaggctgaggcgggaggaaggcttgagcccagtagttcggggctgcagtgagccatgattgtgccactgcactccagcctagcaacagagtgagaccttgtctctaataataataaaaggggcagctggagtccaccaagaagtattgtccatcagggatcttttcagcaggcactaaactgctggggaaagagtttcatcttgagcctttacaacaacaaacaacttttttctgtgaatctgactgattgccta

SEQ ID NO: 477476 - DNA, 1000 bp, Homo Sapiens; identical to SEQ ID NO: 343531

SEQ ID NO: 477477 - DNA, 1000 bp, Homo Sapiens; identical to SEQ ID NO: 345640

SEQ ID NO: 477478 - DNA, 1000 bp, Homo Sapiens; identical to SEQ ID NO: 345641

SEQ ID NO: 477479 - DNA, 1000 bp, Homo Sapiens
ttttttgggcggcaggatgctggtttatttactgtaggatctccagggccatcaaagccccctcgtgggatagggagactatttacacagccagggaggagggcagccaggaggcagagaccgggtcccgtatttccctctgcccgaatgaggaggggaggggcgtcctgggtcctgcagctgtagtcttggggttcagatggaaacttcatactcccgcgtatccccagcttcatacagcgggttgctgaagtccgactccacggtgatggggctgtaggagtgggagcccgagaagccgaaaagggactttccctgaagcttggtgtagtagatgtaaacgccactgccgaggacaatgaccaagcctagaggcagcaggatggccagggccaggttccccccttccagctgccgtgatggatctgtggtctgggtcactttgcagagtgggggctggctggtccactgggaggggtggccgggcacacaggtgatggtgacctcgccgataagctcaaagccctcatagcagaagaagcgcagagactcgcccgcctggtagtggtgcttgtacagcgtctggtagccattctcgggaacccccgggttcaggcacggctcgtacttcaaggcgcatttggggaccctatcgctccacttgggtgtgcctgtgtcccggctgtagcaggtgagcatggctgccccctcgaggctgtaccctggcaggcagcggtactggacgtgggagccaacggggaagccggcgtccgaggcggtgcggtgcccgttggcaatctcgccagggtcagcacaagtcatgatcttttggcaggcgggcggcgcggcgctccaagacaggtcccactggcaagtgagaatgtcggagcctagcagctcgtagccaggctcgcactggtaggtgagcaccgtgccccggatcaggtccccgtgggatgccgttctccagccccactccggaggtggcagctcggggcac

SEQ ID NO: 477480 - DNA, 1000 bp, Homo Sapiens
ttttttaataataagtacacaaagtacacaagtgtatttattacattttgcaagcactctgttctacatttcaaaaacgccaccatcaagctgttggcacatttatgtacaaaacagattaattgtaatgcctgctacaaagcactctgtgaaaatacaaactctaataccagaaataaaagccaaaagtgtcaacatcattacataagttgaaaagacagttttagaaattatcacaaactgttaagacacggaactgaaatactataatatagaatttaaagaagcccattaatacttttgctgaatatctgtaatactgcatatatcagaaaaatgttgaaccagtaagataatctaagcataaagaaaaggaagcaaaatgaaccccaaattaattaaataatactacggaatgcataatcatgccacagatatccctagtagtaccccctacctactacaagaacttgtaaaattactgatgatgcatgactagtcattgtacaaagattgtttcactcaataaatttttattagaaatgcagttacactgagaaaggatttcacaatggtcaaatcagtgcacaatactacctagttttatacactgaaaaaaatgtcttgtcaggctacatcattttagaagacactttacagcattcttgtagcattagaaataatgaaaagaagagcgtcaaggtgaaaacaaacaccaaatttggtccaataatactgattgctctttgttaaaattcctttgatacaggtactttttataaatgaatatgaatgaacattcggttaaaatgacttacttgaaataaaaacacaaatatatcactacactttcaaacaatacattctataggggcctctgaccacactttataaaacactacaggtaaaccaacatagattggaaggctgcaagcaaagctattatattaatggaagccttttcaaatatatcatacacattttaggaatagtttacaga

SEQ ID NO: 477481 - DNA, 1000 bp, Homo Sapiens
tttttttttttttttttttttttttttcattcaacaaatgtttattgaatgtgaacttgtgcaaggtaggccagtccctctcagggtgccctaggcccacaagtagatgtgagaggatcctttgctgttccagcagtgcctgtgctgtcccctgactggtctaggccaccacggttccttcatccaggacctagtgaactgggcagacacctgcattcctggaggccaggaagagggtgtcagcttcgctgtggcctcaaggcttggtggggaagagcaggcaggtgagttcccggctgccgctgtgtctgtccacaaggggcagagggtgccacatgaagtgctggaccatggccgccacggaggagaagagctcctcacggttcctgccctcccggcccagggcatagtggcgtccgccatccagccgccggatgggagtgttgaagacccggcctcggagaagcactgccagggtgaagggctgggagccatgaggccctgagctggggcgcacggtataggccccatcctcagcagctgaggcactcccagtgggggctacagagggaagagacgatttccttccttctttagaggcagcatctgctgttccattccgagtttcctggggggctgtggtaggcctgggcaccactgatgtcctgggcagagggcctgagggcatcaggacttggaagctgagagtctgagtcaaagccaggactggatccggctcacattccaagtagaggtcctcatcaggtttctttggagggcctggcaccactctggacgatgcaccctgctcatggtgggctgaggcaggggtggcgatggctttgatggacccagggggccagagtgatccaggtacaaggagtcctcctcagtgccaggaaggtgggcaggggctagactgaggggcagagcctcacgggggggcagctcatacttattttcctcctcgtcctcctcctgggccttgtgtctccaagtc

SEQ ID NO: 477482 - DNA, 1000 bp, Homo Sapiens; identical to SEQ ID NO: 477456

SEQ ID NO: 477483 - DNA, 1000 bp, Homo Sapiens; identical to SEQ ID NO: 345643

SEQ ID NO: 477484 - DNA, 1000 bp, Homo Sapiens; identical to SEQ ID NO: 339954

SEQ ID NO: 477485 - DNA, 1000 bp, Homo Sapiens; identical to SEQ ID NO: 345646

SEQ ID NO: 477486 - DNA, 1000 bp, Homo Sapiens
tttttttttttttttttagagaagcaaataaacattttatttccacagcacgccttcccttttcccaaagaacatgagttcacctcagccatcaaagcagagggcgaaagctgcaagtgacaaggcaagaggctcctagaaaaatagattatacccaaggctctcctcctggggacccaaacccgtccccaggctccccctcagagcttgccaaatggagtgaaaggcatggaaaggggctgggagaaaagccagctccactgaacaaaggggagaggagcctggcagtgagcagacctgggaggggtgtggggtgggatgagctttgctccttggttgagtgctggaaaagggaagggggaagaaataatttatgttgatgtaattaatgtaatgatgatgtaatggtgcgtggtttcaatcatggcgaccattccagatctctctcaagtgaagctaaattctggccggtctgttggacagacatagtaggtgagagaaggctgagctggaggccaggagggttctttaggctcctcccagtagtgccggccggagcggaagccctgggcccccagtacgcagcagtcggccgagaagcgcttgggatggtcagcaacctcctgccgccgctctgccaggcggaccccccggcggtcaggggacagcatcagggccgggtgagccgtgtcagggtccagcgtcaggtccactctcgcagcctgacagaacatccggctcattttcctcacgatggcatctgtcaggaagtcatggctatggggttggcacgggtcaggggaccagacctctgggggctgcagctgtacctcttcacacctattgaaagtctccttgatgtcctggagcagccggagacccccctgctggctccgctcctgggcctctgccagcaggcggctgagctgggcggcctgttctgcaaggcgactagccgcggctcccgcacgccccagctgggcttcatgcatctctctga

SEQ ID NO: 477487 - DNA, 1000 bp, Homo Sapiens; identical to SEQ ID NO: 345648

SEQ ID NO: 477488 - DNA, 1000 bp, Homo Sapiens
tttttttttttttttttacggattgcaatgtattcctttttattaaattataaaactgttgtcaatacatgtgcttttggaaatagtgttttcctcaagtatctgcttttgtgcagcacttgggtttaaacaaacaacaaatttcgataccaacttcttgggcttcaagctattgagcacttatagccaaactatcaagtatagttatgatatagacagtccaaatttatggaaaatattacaaagacaaatgccttgaaaagatgacacagtgcagggaaaactacagctattaagctggtataaaaacttagtcaaaatgttttagtccattatggctctgcctaaagcttcaaaggaagaaaatttaagacacttctcatccaaggcacttaaaagagttgcaataaagtacttctttgaatttagtttgagcccaacagtattttttattcctttttcacattctgactcacactgaaacagtccttgaaggcagctattaatgaggaaaaatagttattgcttcttaatatacatattacaagtacgcaaacagaatacagatttcggtccactgaagcaagtaacaggatctgactgcagtgttctgcttaattctgaacaaaaagccacagactcctctaacccagtcccacaaacagagccctcagttctgaatttgcaccagctgtcccctgggttctccatgaggacacacgagctggagtcccaccacgtctccatggtgcattctaactggagaagaaccatcccggcggcctggcaggagtggctagtctgatgccatgcaggcaggcctgggagagtccgtgctcagacatctataattctgtgtcccggtatcgggcagactggccatagtaaccgcgcttggagtgttctgacagctgctggcggtactcctcctcctcggcatcactgccataacttcctctggtatcctgataaggtctggaaggagctttctgtggctcag

SEQ ID NO: 477489 - DNA, 1000 bp, Homo Sapiens
tttttttttttttttcctttcgttcctttcccccgtattattgttattatttatttttattttttacaaaacaggagaaaagagtgaatcgggttgggggaggtgacacatttctccacaaaggtacaaaattgcctatagaaagtcagcttcggaatgccgagcccaggctgctgagatgaggcgttcctgggcatccctctcccaaatgtccttcagatctggctggggtcactcccacattgagggcagccccccgaggtgagatggagtggcctccttcagcccttgcccaggaggcacaagagcaagcaactgagactgtacagagaaagagaagaggaaggggtgcagcccggggacacaggtaggggacagccaagccaggcccaggagcctctgggcagagagaagatggggaggcaggaggctctagccaaagtccctcctgttccttggagatgttcctcagaatggcagcagaggtgaccctaggaggtaagggcaactttttcgaggctgcagaagcacccccagggccacaaagccccatctgtcttggcccagctgccaggcctcaagcacgtgggtccatgtccctttcctggcagggcatctggcccagactgcttctcttttggtaaaaagtagtcctagtgatttctctactgctgagaacaggctgagcttcaagaattttgagacaatggtggcaacagtgtctccccttctgaggatctgggcagcttcctccctggattccagggcaggacgaggggagcagacacaacccggacagaaggggcactccagccccagaaagcccaggctggagggagaggccgcctcccacccacacccttcctgggttggcctgtgccaaggtgggccgctagcccagctgccaggagaaggacagcgagagccaggatggcaatgagcccaggacggtcccctaaggctctgtggcaagaagtggcctctttggtcctggcccata

SEQ ID NO: 477490 - DNA, 1000 bp, Homo Sapiens; identical to SEQ ID NO: 345649

SEQ ID NO: 477491 - DNA, 1000 bp, Homo Sapiens; identical to SEQ ID NO: 161239

SEQ ID NO: 477492 - DNA, 1000 bp, Homo Sapiens; identical to SEQ ID NO: 345651

SEQ ID NO: 477493 - DNA, 1000 bp, Homo Sapiens; identical to SEQ ID NO: 345652

SEQ ID NO: 477494 - DNA, 1000 bp, Homo Sapiens
ttttttttttttcagaaagtacctataaaaagtaaaagaccacattttagggggagaaatataaaattatggtgaaaggccacgctgtgaaaagtacttggtttacagtacctgcggtgttctccactggggcctgtccagagaggcagatgacactcacctcatcaactggcaatgaacagcagctgaaaagggtggctgctggactggggactgttcttactcctaagtgaaaccctaccttcctgatactcatggagaacactgcagttacgaacagaccaaaacaaggagctgcaaatgcagaactcactgggcaaaaactgacagatgataccaaagtcgtgaaagtatctcatctcaaaaaagataactacaatctcaaactttcaaaaaatgcagatcttgctcagaataaatcgtaacaatctcaaagtgcatttggatgcagaacgtatatttacctatataagctctttcttgttctcgagtaagtccagggggaataactgtaggcattcctggaatcactgtcttctgttccattgtgtcttggttccagcggctcctcttccgcttcttacttgggaagtccaacggcgtggcgttcgctccggtcgccatggcgcccccggggacaggcaccggcacctgcttttcctctgcggcggcttctccttcgcaagcctcccggggggaggggacccgaatgcgctgccggagcgcgcggagcccgtcctctcacgcggcgggcggcggcggcgcgagacgcacaaagagggaggagagagggcaccgcgggggcgggccgggggcggcggggccggggcctggattgggccgggccgaggcgaagggtcgaaatcggcggcctccgattggcggagcctcagtccttcttgatgcgcgctgggattggccgaaccgttaggccaagcgaggaaatggcggcggagttcggtgggctgggaggtgtcgcagcgcgcacttcatttgttac

SEQ ID NO: 477495 - DNA, 1000 bp, Homo Sapiens; identical to SEQ ID NO: 161241

SEQ ID NO: 477496 - DNA, 1000 bp, Homo Sapiens; identical to SEQ ID NO: 345654

SEQ ID NO: 477497 - DNA, 1000 bp, Homo Sapiens; identical to SEQ ID NO: 345656

SEQ ID NO: 477498 - DNA, 1000 bp, Homo Sapiens; identical to SEQ ID NO: 338426

SEQ ID NO: 477499 - DNA, 1000 bp, Homo Sapiens; identical to SEQ ID NO: 345658

SEQ ID NO: 477500 - DNA, 1000 bp, Homo Sapiens
ttttttttttttttttttttttttttttttttttttttttttttttttttttttttttttttttttaaaaaataaataatgagcttttattattctcaacaacagagaagactccagcctgatgtctatgggacctgagtccacactgtggagggcacaagctgtgggagggcctggaagacacgcctcagagattctcccagtcctgccaccctgtgggagacacttcaaaggaatcgtaaactcatgtgaccagcagggaggacaacgatgaagaaactttcctgcctaaaatcagctgctgtccagagctagcacctggaaggagacactccctctcctggggtcacatcttcactgcaaggcgggtgggagctcactgctgtgacccacatatactcctctctcggcgtctctatcctgctgctttctctgactgcatcttcctctgttccttggtcagtgtttgagaagagaatgttgaacaagtcacatccttgtcactctgagtcagaaccctcatttgacttggaagatttgtgcttccgttttttcttctttttcttttctttcttccttttcttatgcttttctttcttcttctttttcttgtgtttctctttaccttcagaggaactggagctgctcctatcttcatctgaggtagaatcctccagtaactgttttaactgctgtatccttacgtccttttcatgtcgtttattgtctcgtatgatgtcatacatgggatcttcatgtgccactctgaactgctctaacttttggttgcctttgataaagaaagggcattctttgtcacccgttcggtgaccatagcgtttgcaacgccaacactgcataactttgacttctttccccagtggcatccaaagtcctttagttggtgcatgagccagaaattccctggcgtgttcattgcctggtacatctggtatgcaatcttctggcttagtctcatcttccttgataagcccaggag

SEQ ID NO: 477501 - DNA, 1000 bp, Homo Sapiens; identical to SEQ ID NO: 158065

SEQ ID NO: 477502 - DNA, 1000 bp, Homo Sapiens; identical to SEQ ID NO: 345661

SEQ ID NO: 477503 - DNA, 566 bp, Homo Sapiens; identical to SEQ ID NO: 345663

SEQ ID NO: 477504 - DNA, 1000 bp, Homo Sapiens; identical to SEQ ID NO: 345664

SEQ ID NO: 477505 - DNA, 1000 bp, Homo Sapiens; identical to SEQ ID NO: 161246

SEQ ID NO: 477506 - DNA, 1000 bp, Homo Sapiens; identical to SEQ ID NO: 345666

SEQ ID NO: 477507 - DNA, 1000 bp, Homo Sapiens; identical to SEQ ID NO: 345667

SEQ ID NO: 477508 - DNA, 1000 bp, Homo Sapiens; identical to SEQ ID NO: 345668

SEQ ID NO: 477509 - DNA, 1000 bp, Homo Sapiens; identical to SEQ ID NO: 161248

SEQ ID NO: 477510 - DNA, 1000 bp, Homo Sapiens; identical to SEQ ID NO: 345669

SEQ ID NO: 477511 - DNA, 1000 bp, Homo Sapiens; identical to SEQ ID NO: 161249

SEQ ID NO: 477512 - DNA, 1000 bp, Homo Sapiens; identical to SEQ ID NO: 157840

SEQ ID NO: 477513 - DNA, 1000 bp, Homo Sapiens; identical to SEQ ID NO: 345672

SEQ ID NO: 477514 - DNA, 1000 bp, Homo Sapiens; identical to SEQ ID NO: 345672

SEQ ID NO: 477515 - DNA, 1000 bp, Homo Sapiens; identical to SEQ ID NO: 161250

SEQ ID NO: 477516 - DNA, 1000 bp, Homo Sapiens; identical to SEQ ID NO: 345674

SEQ ID NO: 477517 - DNA, 1000 bp, Homo Sapiens; identical to SEQ ID NO: 161251

SEQ ID NO: 477518 - DNA, 1000 bp, Homo Sapiens; identical to SEQ ID NO: 338300

SEQ ID NO: 477519 - DNA, 1000 bp, Homo Sapiens; identical to SEQ ID NO: 345676

SEQ ID NO: 477520 - DNA, 1000 bp, Homo Sapiens; identical to SEQ ID NO: 161252

SEQ ID NO: 477521 - DNA, 1000 bp, Homo Sapiens; identical to SEQ ID NO: 161253

SEQ ID NO: 477522 - DNA, 1000 bp, Homo Sapiens
tttttttttttttttttttttagtaccaaatatgattttatttgccactgttgttattttttcctcattttttcagaataaagaaggaaactactttaagtgatcattaatcttctttctacacacaagtctagaaagcaacaaaaagtggggccctgagtaacaaaaagaagttataattgattttaagtacagtaagttaagcaaaatttcaggcattcgaccactctctctcatttttcagtatccttaaaaaaattagttcgggaagtcccgtgtttaaatttaagaagaccaggggctgttataactgatggaggataagtcatttagcctttcccagcctcagtttccccttctgtaatagaaagatattagacagttcataggaatggaaaacttattttcttattcaagggagaggagaaaataaatgtctgttgaacagaagaatatgaacatttatttattttcgtgtgtgtgtgtgtgtgtatctgtgcatatatgcaacaagaaagcatatttaaggtgagagtaagaattagctagggaaagacattaaataaagtgcatctccaccttttgaagccattaattaaataatgtagacctggcttcaaaattaaacatcactgtagtttataacttaggatggaatgcttgctctgcataagggtacagggtatgagccttgtcagaaacttttgcaattgaatttatgagagaaactggagaaaatttgagtctttaagcagacctatagagatcaaatttaaagtttgggcaatggctagatttgttttcttgtgaggatgtcagggtgactacagagaggagaattgccaaatatgtagctattcctctgccttctttatcatatactctaagtaaactggcttaaatccagtccttctctctccttttgcattggccccttttagaaatatgaaagttacagatgtaaattacaaagtaagccagtattacatgaaaacatgtt

SEQ ID NO: 477523 - DNA, 1000 bp, Homo Sapiens; identical to SEQ ID NO: 161254

SEQ ID NO: 477524 - DNA, 1000 bp, Homo Sapiens
tttttttttttttttttttttttttttttttttttttttttttttttttttttagtacagacgggggtttcaccttgttagccaggatggtctcgatctcctgacctcgtgaatcgcccatcttggcctcctaaagtgctgggattacaggcattgagccaccgcacctggcccttctaccctcttatataccagttacctgttgtctcttcccccactagaaggtaagcttcatgagaacagaatttgtctttttccttgctgtttccctctttgagcaatgaattaaggaacctgtgagtagggatcaagctcctctttcacacagaagaaacacctggcctgggaggggtaaagggctttgtcgcagctggcgctgggtggagccggagtgtgaacagcgcccatcacagtgctcctcgcctcttccacccacccagaattctccccagtgacccaggaccaggcggctgccggggggccgagagccttcactaaatgtgacacatcagtgactacagccctgaaattcaaattggaagcctaggcttgtgctcatgtccagcaaatccaacaggtgaaaaatctagcttgtcagcttataatggttccattatcaaaagcttagccagggctgctggttttgtttttgtttagtttgaggctttttttttcttccaaatcatttctttttcccttatgagaacagtagaaaatatgggtaactatgcagtttatgtaagcattcaacaattgggagcgaattttctacaatcgcgagtgcggtcactgcgggaacgcatccgccccaggaaaggtgggcgggcagacgcgcgtgcgggcaaaaccgcaaggaggagcggctcggtggctccttctgcccgtgcgcccctgcttcccctcctcctgcttcaccgagatcaccaccggggctcctggaggtggcggtccccaggacactccgggagccggcggggtctcgctgggtcgctccgcccgg

SEQ ID NO: 477525 - DNA, 1000 bp, Homo Sapiens; identical to SEQ ID NO: 345680

SEQ ID NO: 477526 - DNA, 1000 bp, Homo Sapiens
ttttttttttttttttttttcctgccaagaaagtgctttaatgattataaagtgtccaaaatatactggcagaaataagcggatctgagcgtttctcttcaaacctaggatatgcagggtgagagcatggcaggggctggtgggccccagggttgcctcgaggccggtcgtccagggagagcagcagcaggaagagcctcaggagatgaccctcagggatggcttgtccttctccagggcctgcagccggtcctccatctcctcagaccagtaaatgtcgtacaggaccagctgctccaggaggcagcccggctgccggacgctctccaccagctgcaggatgccggcgtcccccaggcagttgttgctgaggtccagctcacgcaggctgtggttggccaacagggttgcggcgaggctgctgcagctgctgtcactcacatcgcagtcggccaaccagagcacccgcagcacagagccaggctggcccaggccctggcacagctcccgcacgcccgcatcctccagcctgttgttgcttatctgtagctccaggagaaacctgttctgggccagcactgagctgaagtgggagcagcaggcggctgtgaagctgcaggacttcacccacagcgactccagctggcagccaggttccagcagggtctcacacagcagtcgggcaccctcatcccccagctcgttgccggccaggctgagctccttcaggctctccttggccctgaggacacggcacagatccccgcagcccttggcagtgatgccacactcccagatccacagggtcctgagcctggagctggggtggagcagccctgggcacagctccgccatgcccacatcacccagcttgttgctgcccagggccagctcccgcagcgaggccttggaggccacaatgccgcacaggtcccggcagttgtctgatgtcacaccgcagctctccagcttgagcgcctccagctggcagggggagtcc

SEQ ID NO: 477527 - DNA, 1000 bp, Homo Sapiens; identical to SEQ ID NO: 477526

SEQ ID NO: 477528 - DNA, 1000 bp, Homo Sapiens; identical to SEQ ID NO: 345681

SEQ ID NO: 477529 - DNA, 1000 bp, Homo Sapiens; identical to SEQ ID NO: 345682

SEQ ID NO: 477530 - DNA, 1000 bp, Homo Sapiens; identical to SEQ ID NO: 161255

SEQ ID NO: 477531 - DNA, 1000 bp, Homo Sapiens; identical to SEQ ID NO: 158602

SEQ ID NO: 477532 - DNA, 1000 bp, Homo Sapiens
tttttttttttttttttttttttttttttaagccctgatatattttaattagaaattgaataatacatgccttggaaataaacaataataaattcaacatgtgtagtaaatatataataacaaaggaaatttgggtgaaacatttctcagttataagaaggaagattttttgatttgtattatagagtgtttagtccggaaacatttatcattacaaagaacagcatgaaatcttaattagattccctcactaggagttatcaagataaaagaaatgcagaggattaataacattatatttaaagtaaatatccactgtctatgtgcgttaaatattccatttcagaaaacttagagattatttatttatactaggatgaatgtatatcatattagacttcttaaatgaataacaattctgctttagggaagcagtagtaggatgctgatagtaggctatcgggatatttatctgtctttctatccatcggcttgtatgcatctaagtatttatacatcctatcagaatcacaaaatacatacaagtaaatgccaacaaaatctcaaaatgcaattaaatttaggacatttttgccttgaatggcctccatacttaatctcaattattccttgaaatttgggagaataatacattttattacacaaataaacatatgatttgagttagaatcactgatgacaaaatgttaatctaaagtaccaacacaagggtgagttggttgaacagaatgtgtatagttggggactttcagatgattgtcatgtgggcgtgtgtgactaacagtatggttgattatacactagaatgttgtggtctagaaataatgcttaattttgttccaagcattttgttcaacctgatatgcaaacagtaatatatctcaatatcttctggaagatgaaaccttaagtcatttaaggacgcaagcagcaacattaactgttatcagactttggtttattgtaaaatttagcaaag

SEQ ID NO: 477533 - DNA, 1000 bp, Homo Sapiens; identical to SEQ ID NO: 161256

SEQ ID NO: 477534 - DNA, 1000 bp, Homo Sapiens; identical to SEQ ID NO: 345686

SEQ ID NO: 477535 - DNA, 887 bp, Homo Sapiens
tttttttttttttttcagttcgttaaatctttattgatgcgtggacactccttcccctccagccccgccccccagccccagaaatactagagaagctgcaccataaaacgagggcacgagattgttgtcccattcacgacggagctgagggggaggtgtgcaggttccagcctagatgttcaggattgagatgtgggtcgtgaaaggaaagtgggttttccgggatgtgggggcttttctcagcactgggtccactgacgctgctgctcccaaggggatgctaggactccgctcaggcaggggtgggggcagggcaggtcggaagatgccgggcttcaagtccttgggccgaataagagggagggcagccgtcagggttgttcttgactcgagggtcattagacccagacctttcctgatgtgggaacggcctgggaccctggtgaggcccggatttgccgcggctgcggggcgcgccgacgccgataaagggctcggctgtagggcacgaggcaatcggctaggcggaggcgcaggcagaggcggcggtagctggccagagcaagcacgagcagcggcacgaggagcaggaatccggtgaccagtagggccgtgaaaccggggtcccgcaggtgcgcggtgcaagggggtgcctgggagcgcaggaactgagagtggcagaggaagccgaagcccagcatggtgacagcgggtagcaagatggtccctagcaccagcaccagcaggagaagattgaaggcagccaccagcagattctgggctgttacaagaacagcgcaggcccaacagtccagggggtcccggggctctgggccgtcaccaggaaccgctcgctgtgccccggggacatccgccatggcccgcct

SEQ ID NO: 477536 - DNA, 1000 bp, Homo Sapiens; identical to SEQ ID NO: 161257

SEQ ID NO: 477537 - DNA, 1000 bp, Homo Sapiens; identical to SEQ ID NO: 345687

SEQ ID NO: 477538 - DNA, 1000 bp, Homo Sapiens
ttttttttttttttttttttttttttacgtgcttccaaatgtttgctgaatgactacaagatgaacgagtgaatgggattacgtttcttcgagcggcaggcaatcctattccttggacctcagtttccctttctgtaaagcaagcctgtctctcgctctctgccctaaaagcctgagctctgggtttgagatgagcgcgtcctgtagagccgactccaggtagacgttgagctgggtattctaggaggcgatgatcgggccggctctttgaggcgggtcctcccgcgggaccccgcaagcccagtcccagcaccgccccgcccaacctccctttgttccctcaggccccgcccactccgcgcagctcgcttcccattggccggggggcgggccctgggcgcccggctccgctgggggcgggacggcgggcggcgggcggggccgtgtgcgcctgcgtggtgtctgtcccggccgcagccccacgccggctgcagctccgcgagccgagccggatctcgagcggggtacacgggctgaggcggcggcggcggccccgccccggggctccattgttaaggcggctgcggctctgtcggctgttcagctgcgctccagtcggcccaggggccgcggcgaggagcgagcgctgcgaggtggcggcctgaggtgagacggcgcgactggcggcagggtctccggacccggcgggggtctctgccccgggcgtggaagctccgagcggggctccgcagggtccggggtccgtgcgcctgggctttgtctcggcctcgggtggtaccgggggctccgcgcctgctgcgacgccgcgtgggcccgcgcgggggtcccggtcgtcctgcgggtgggggccggtccccactgctccccagctccccgcgtctgcccggaggggactgcgtggacccgggcgctggctcctgcccggtgcccccgcggcgtggctggtccccgtgtgcgtcagagggggccctgcgaagac

SEQ ID NO: 477539 - DNA, 1000 bp, Homo Sapiens
ttttttttttttttttgagcattggtggcttttaatccaagggcgagattctcaggctgacccctgggccctccccagtccccaccacctcccgctggaataacgcagcccaaagcctcccctatggaggcaggaacttaggtgagcagctccacagggcacatcctgccctcgaccctgaagaccccgccctgaagagccggatgagggtggtgaggagggcgggtcggagccgagggggccctctccgctggaggagcgctggatccccgccgatccttcccctatcccgcccgtaagtcctcaccgtcgagtgggccccgcgctcctagggccgtgcgccccgcgcgctgcggatgccagccacagcccccttcggaggggcccaggaggccggaggccggcggctcacttcccgcagaaagaacgcgagggcccagccccgcgggcgcgcagaagaggacaagctggggtctgcagcagcctggaaggtcgccgagctggcgctgccgggcggttctggcagcaggggagaaggccccaccccgagcctcaagccctccgctcagtgtgtccgcagccccggagtccctcggtccctcggcggcctgtgccgggctccggacccggctctgcctgtgtcggtggctgtgcctccgtgccccgcttgccggggtccgcagtctatctcccgctctcgcccgaggcgggctgtgaggccgcggcccgggccctggcctgcagcgccatctcgtggacctgtggggagttgccgaggcccgaggcctgggcgggctctgggttcgctcccactcgtgctcccggcggggagctgcgggagctgccaagaggactcgctgggaaaccaggcgcggccgtcagcgctggaaatcggtgcttccggagtgggtttggggtccccggccccatccaataggaggaacagatatgcgcctccggagagcccaaaaggaagtccaagtgcaaaaccgccccgggc

SEQ ID NO: 477540 - DNA, 698 bp, Homo Sapiens; identical to SEQ ID NO: 345689

SEQ ID NO: 477541 - DNA, 1000 bp, Homo Sapiens; identical to SEQ ID NO: 345690

SEQ ID NO: 477542 - DNA, 1000 bp, Homo Sapiens; identical to SEQ ID NO: 159628

SEQ ID NO: 477543 - DNA, 1000 bp, Homo Sapiens; identical to SEQ ID NO: 345692

SEQ ID NO: 477544 - DNA, 1000 bp, Homo Sapiens; identical to SEQ ID NO: 345694

SEQ ID NO: 477545 - DNA, 1000 bp, Homo Sapiens; identical to SEQ ID NO: 345695

SEQ ID NO: 477546 - DNA, 1000 bp, Homo Sapiens; identical to SEQ ID NO: 345696

SEQ ID NO: 477547 - DNA, 1000 bp, Homo Sapiens
ttttttttttttttttgtgtggcaaatttgtccttttatttaaaaaaaaaatcacttcatccatgtccttgtttctctctataacaaaaacagcataggattagtcaaagagcaaaagtgataatatagatgcctctgtaatcctgtgtagctttcacacgacttttaattgggagtatgtgagtttatatatatatatatatatatatttatgtgtgtgtgtgtgtgcgtatatatatgtatatatacatatattcagagaatgctaataatgctctaaaatagcagtttatctagtccagtttttatactacataatgacacccaacccactgccatgctttaaatggaagcagaggtaaatttttcactaattatacattttagggcagcaactctgtgctggtcttatggtgtttggggacgtttttgatatataaatagttaaatgtgttctgatttaagtgaggcttatgaattaaaagaagaagaagacttctgattttcattcccagacctccactcactcagcattttagtatgataaagataaaccctgtacaaatagtggattctttcccccattctaatcactggagagtgctgactgcacaatctaaccaaacggtgtgttgaagccccactgcttaagatgattaaatgttttgaacaaggaatgattcagttgccatgggaagaccgtggcgtgttgatgcagtggcctcctgtaggttgaataagttcagtgtttaccctgtgggccatttattttcaaaattaaattaaaattcttactcttaaggagctgcagtttgattgttttgtttttaggggcagcttgagttcctccacattccatgtctgagctcacatgtgtgcctaatttcacagacagcccctgccacccgcccgccgagttcagacatactctgctgcctgcagcacggcagctcctaggatccctaaagctcccagcagctacacaacttgagtgcctaca

SEQ ID NO: 477548 - DNA, 1000 bp, Homo Sapiens; identical to SEQ ID NO: 161259

SEQ ID NO: 477549 - DNA, 1000 bp, Homo Sapiens; identical to SEQ ID NO: 345699

SEQ ID NO: 477550 - DNA, 1000 bp, Homo Sapiens; identical to SEQ ID NO: 345700

SEQ ID NO: 477551 - DNA, 1000 bp, Homo Sapiens
ttttttttttttttttttttttttttttttttttttttttttttttttttttttttttttttttttttttttttactgaggaccaaactatgacctttaatccctccaaaataaaacacacaatcccattatatgtgaaccatatccacaataccagaatctaagattcccactctgaaagagtaactagaacaacttctttttgaggcaattctgcttacttagcacattactcccccctacagttttccttcttttgtttttgtactaaggatatttgtataaaaacaggatctttgtggcttagtaattcatctgattcagctgcttgtattctgttcccaatcaaaattcttggttttcagcctcctcatcatttttataaggagttgaatgaattggtcaagcttgttcctttctccctctccatggaacaccaggccccaagctccccgacactgctcctctttttatttctatctttgggttgtgtgtacactctagaacacttgtatcagtgaagagtgtaacaaagtattgtgccacgcatagtctctcatatatcatctatcagctcatcaaaaagtgctcactgattaacagaggatcccctcctcagtttcagaattctctagctttaagttaggggagggttaccccaaagtcagagagggtacatgggagagggttgtgaaggccagtagcccagagaaaatcaagggcagctgggtgcatttaggtggataagaaaacaatgaattactccatcaaaagcaaaagcacaagcacatagtaaagttgatcacccactgttaatgtcaattcagtttaaagcactttattaaccacacatacatattttccagtgtctaattctcatcgtgttcttttccattccagacttccctgtctctttcccagagctctgttcctcttctcactgtttctggaaggcagttgcactcaaaagtgaagtcaccagtctgccgacaggtgcctc

SEQ ID NO: 477552 - DNA, 1000 bp, Homo Sapiens; identical to SEQ ID NO: 345701

SEQ ID NO: 477553 - DNA, 1000 bp, Homo Sapiens; identical to SEQ ID NO: 161260

SEQ ID NO: 477554 - DNA, 1000 bp, Homo Sapiens; identical to SEQ ID NO: 345703

SEQ ID NO: 477555 - DNA, 1000 bp, Homo Sapiens; identical to SEQ ID NO: 345704

SEQ ID NO: 477556 - DNA, 1000 bp, Homo Sapiens; identical to SEQ ID NO: 345705

SEQ ID NO: 477557 - DNA, 1000 bp, Homo Sapiens
tgtacttaaacatacccctctactttttgtcgtttatttctatttataacaaactcttgtgttgagggctcttgatggacggcagcaagggagctgctctgctgcatatgaaaccccgacccagagcccctctactcatgcgatgtgtagttgacagccacttcacaaacattttcagctacagaaaatatattcaaggaagaatgttaaaaagtttccttataacctacaaggggttctctctagatgtaaacaaatctggatgaaatattttaatccaagtataccatttcccacgtcgtaaatcttctgggctggtgggagccaatccagttacacactggaaggggagtgagggtcccagggcttccccacacctcacaaggcccacccttgtttccactgaccctctctttgacctgaaacccccaattgcctccacaggcaaaacaaaactcaaatctctctagactcaaagacttaagactatgccaacctatttgtttgtaattacactgctcaaggctcctgtttcctctccttcagccattctccagagcgctcctcaagagattttaagtctctcacagccagactgtatttcccttggtcaagaagcaaccacggaatattctacaagattcttagcctcatccgccagatgacgggcctctgcgtccaggtctccaggagcaagctccgcctccttcaccagacaacgggttataacctcctccccgcaaaggctttctgtccgatttccgtttcaggacagatgaagtggaaggcccaggactgtcttcctcctggggcttctttgcatttcctttgtaactttttccttcttgcatgctgtcccacatttcaatcttctgtctccttttttcttcttcaagttgtttcagtttttccttatgcttttcaacttgcgcatttagttcttcttgcattttcagtcgagcagctgctaaagcttcttgtcgtttaacaacaacatcag

SEQ ID NO: 477558 - DNA, 1000 bp, Homo Sapiens
ttttttttttttttttgcatcatcagcggcttttactgaacttacaaccaacttgccgctcaatatgcagctcagatgtgagagacgcgtctctgtacaggagcccgtactgtcttcaatcctttgcatgcaggtgtttaccacaggcaaacagtttactccacattttctagtaatgtaatcttcctattagcaaaaagcagtaaccagtccctgtagactgaagggactcaagtcacaggatgcggatttcctcttcatggtttttattttgatatttgaactgctgatgcaacatataagcagggtgttcaggacctgctgtgcctaagagactgataaagggaaaagttctatttattctttgtgatttgatgcacagatgaaaaacttaacacacaataatagaagttggtcgttagtaaatcacaccctagtctttcagagcttccgtaagcagacgacattgtcagttttctagctcttgttttaacactgcaacaacaatgatgcatatgtccggaatcagctaaaaaggccgtcagattctttttctcttagattatctatttttcactgttcccaagtatatctgaataattaccttccggcattctctgctattgctcgttgggatgctctcgactgtccccgtgttttgtgggctgttgggagagggcccttgggaaggatgtaccactgttgggaggttgtcagtcactgggatgtctccagggatgatgtcttccctggccgcagaagtcctcctggagccacgcccaccatgcctggcagatatctgtaggtagcaccactgagctcaggatgaatttcttgctggtctattacggaccaaagcgctgatgtgacaaagaattccttgttcacacagtttcttaagcttcccgggatgcgacttatgatggcttggcggatctcagtggcaactgcctcgctcatctccagtgacacctgctggctgtagcaggcagtgagagga

SEQ ID NO: 477559 - DNA, 1000 bp, Homo Sapiens; identical to SEQ ID NO: 345708

SEQ ID NO: 477560 - DNA, 1000 bp, Homo Sapiens; identical to SEQ ID NO: 345709

SEQ ID NO: 477561 - DNA, 1000 bp, Homo Sapiens; identical to SEQ ID NO: 345710

SEQ ID NO: 477562 - DNA, 1000 bp, Homo Sapiens; identical to SEQ ID NO: 345711

SEQ ID NO: 477563 - DNA, 1000 bp, Homo Sapiens; identical to SEQ ID NO: 345712

SEQ ID NO: 477564 - DNA, 1000 bp, Homo Sapiens
ttttttttttttattttggaaattgaaagggtttttactgaaaggatccatggggggatgatgggtaagttctggaaggggtagaagcgtttgtgtgggagttggagcatggtgacagctgtgggaggctctccttgcaggaacacttggtcgttggtctccatcccacccactggactgaaactaccatagccaagactaaagacacccggagatgtccctcctgtctctaaaacacccaacccccgcttccccaggtagggctgactgggcacgtaaacagagtcctgggtcctgagtccacagctctctcaatgctgcttcttgtggagggctagggggtcggagggtggtggctggtggaagaatgcgggccactgaaggcaacggtaggccagcaggtgggggcccagcgcatacagcagattgcacacgaagaagcagccccaggtgtcctcaggcacacggtaggtgaagggtgtgcgcaggtgcatggaagcccccatgtgcgagaactgtgcctggccgatgcctccagcaaacaccaaggcccagtctggaagccaggagcaaccagggaaggtgagagcataggcagccaggccgcagaaaggcaggacataaaacatgtacatcagcatctgcaccttagggtaggccacagggtcccgcaggtatggctcatactggtagatatagacaaagcaggcatctgtggggcaatcaagcaccaccaggccccggaacagagtgaagaagccagcaaggatgagatatatgacaagggccaggtcagccggacgctgcaggagtccctttctttgttcctcttgcaccaagaatgtttcctgtaaggaacaccaggatgctcatggcgaaggaacccagccagtagagtccaaaattccggtatctcttcctgagcaggggatggaggggtgaccagcaggtagtcactccgtaatctcagagccccagccagggcctggagaccaccgtg

SEQ ID NO: 477565 - DNA, 1000 bp, Homo Sapiens; identical to SEQ ID NO: 345713

SEQ ID NO: 477566 - DNA, 1000 bp, Homo Sapiens
atgcttctcaatcacatggaaattctagatctatctaatttaatctacagtttcaggaaatggattaatagatcttgatatgagacagctgctgacccctgtgaaaattaaaaacattttaaaagccctcttccttttttgttatctctaaaataaccagttttctaggaaaaaggaaaagagtaccatatttttcataatctctgtaatgcaagtgccaagcacatgtgatttatacctgttttatgacatatggattctgccaatcatctttagtttatcaaaactatttttatgaaggggtgcagagtatcattttcctgaattattattagactaggccacgtgtgtaaataaatctcttctttccaaatcttttatgtaagtgcactattataaggacatatgcccacagagtaagcatacaataaacgtttcttgattagatgacttggaacgtcaatcaataaccataatttatatggtaattaattcagaccaatggagagaaggattatgaaaccaaaacacaggaaataattgagaatcttcttcttagagattaactttgattccaatggcttgtttaaattcatggttttgtggttccaagatgtcatagaaaacttgttttttgtcaaaatggtctctaatgtaaagtaaatcttcaacggaatagttatcattttttccagtccaaatagtcaggctgtacctgtttgatttctttaacagccaaagtaactgagaacaagactgcctgactaatgctgctctgacagggaacgttacaggctgacttagttcattacatatatattccatctctttcaccattgtccaactgtacccttcattgactttctcaggatgccatcctgttgtccaacccagggaaaacgtcacgtctggaaagaaggatgtcacggtgtctaaaaatggttttgcatctattactttgctatttccatttggaccaggaagaatatcggcattaatc

SEQ ID NO: 477567 - DNA, 943 bp, Homo Sapiens; identical to SEQ ID NO: 345714

SEQ ID NO: 477568 - DNA, 1000 bp, Homo Sapiens; identical to SEQ ID NO: 158767

SEQ ID NO: 477569 - DNA, 1000 bp, Homo Sapiens; identical to SEQ ID NO: 345715

SEQ ID NO: 477570 - DNA, 1000 bp, Homo Sapiens
tttttttttgtgattatacgttttattagactcgggaggggtatggcagggcttcatcagtgttccttcaaattaaaaaaaaaaatacaaaagctacgtagaaaacgtcagatcagacgactaaactttcccgactcagggccaagttcttcttgagcctgcgctctcgggacgcctgcgagtcggtctccgagtacgggggcggcgcgggcgggtagtaggcctcttcctcctcctccttgtggggtctcctcctctcctccgaccccttcttcctcacagcctcctccagtagccgcccatcataggggaggtccccggacctggagccgttgtcccgagggtcccgggtacggtggtggtgggacctggggtcggcaggagggcgctcccgagacctgaagtcgtcgtagtgggggtcccgggagcgtgggaagtccctcgagtcgtcttggtcatagaggtcgtcccggctgcggctccgcgggggcatgtaggcccggcttctcccaccattactcgtgggagacctgctccctgactcggcggtgctcggcggggtgaggtcgtccagggcgtccacggagcgggcccggggccgcctggcccgccagcccccgcctgcctgctccctggcgggctcctggtcccatcccctgggactccggggggagtggccaccccactcctcatcccggatcggggtgagggcagggccccgggaaggccgagatcgccagtcgtcctcgtggagggaggtgacttcactcatggcccgctccacacggccactgggggggccaggtcgagaagggtcgaagttggccagctccttctccatgtagtacaggacccgcatggagtcgtcctgctggctggcctgaatcctgtagccactgcggacttcagaggccacactgctgtccgtgtcccgaagcaggggtacataggagccttggccaccagctgagctactcctgtcaacgtctccagggtatcc

SEQ ID NO: 477571 - DNA, 1000 bp, Homo Sapiens; identical to SEQ ID NO: 345716

SEQ ID NO: 477572 - DNA, 650 bp, Homo Sapiens
ttttttttttttttttttgggtggaagggtgagccatgtgttttttttattttaatttttaaaaaatttaaaaaattccctattcaaaggtcaaaaagccacataagttttgatgatgatcaatttgaacggaggctcgagatggactgagaggactgagacacagaagtggggggaccatggtttttactggctggaccacagggggaccctgtccacccgcctgggttgaggaaggtgtctggggtgctcaggtgggtttgttctcagcaatgcaggcatagtcagctcttggatcctccttggtgcctctcttgtctctgcccctgaggtcaggtccctcactgctgggcactggcagcctctgcagagatgcatagtggagttcctgctctgaggagccctgggccatcattccgcgataacattaggtcagggatcagggactggcctggaggtcaggaactctagtccttgctcttttaggcgaaatgatcaggggctggtgacttgcctcaagttcctcatccagagcttgtggcctgcaggatggacagactccaaactggccagtgctgtctggctgaagagaagtgttgccacctcagacattcctgcccctcctctggctttaacttctcccccagcct

SEQ ID NO: 477573 - DNA, 690 bp, Homo Sapiens; identical to SEQ ID NO: 345717

SEQ ID NO: 477574 - DNA, 1000 bp, Homo Sapiens; identical to SEQ ID NO: 161261

SEQ ID NO: 477575 - DNA, 1000 bp, Homo Sapiens
ttttttttttttttttttttttttttttttttttttttttttttttttttttttttttttttttttttttttttaggtgaagaatctttaggagagagcatttaattttttcaaaatgaaaaacaaaattattgtctttcttttccggccgatgggcttagctgtagcttactgaagtcgccaagcaggagagatttaaccagaggcgatgtgtccagtcaccagcatagagccatcctctgtgtcaccatccacacgcagggccttctggcagacctcatgcaatgccctccatgttaatattcatcagaaaatggataattaggggggccagcaaaaatatcaagggtcaaatatcgcacatttctgtttaggccatctatggctttcatctcctctgaagtcaactggaattcaaacacctgcacgttctgtctgatgcgctgctcattgtagctcttggccaggaccacaaccccacgctgcagctggtagcgcagggcaatcagggctggggttcgcttgtgcttttttgccaaggcacaaaggactgggtcctccaagagcaccggggagttcgggtccacccatggttcttctcgatgggatcccagagcactataggcaaccagaacaatgtcttttgacttgcagaaatccagcagttttctctggttgaagtaaggatgacattccacctggttgcagacaggcttgtacttgagccctggcttgttgaggatcatctccagcagcctgtggttgaagttggacaccccgatggacttggccaatcctgcatctttacacttctccatggcctcccatgtggcacagagatccactgtgtcaaatagtatttttccattttcatcttttgggatcacttcctcacctggctttacagacactggaaaatgaataagatagaggtcaacatagtccaattgaagatttttcagtgacctttccaaggctggtcggaccaactctggtcgat

SEQ ID NO: 477576 - DNA, 1000 bp, Homo Sapiens
gtgatggagtcttgctctgtcacccaggctggggtgcagtggcacaatctcagcttactgcaaccttcacctcctgagttcaagcaattctcctgcctcagactcccaagtagctaggattacaggcatgcgccaccacgcccagctaatttttttgtatttttagtagagacggggtttcaccatattggccaggctggtctcgaactcctgaccttgtgatccacccgcctcggcctcccaaagtactgggattacaggcataagccaccacaccctgccctgatttttatcttaagaagatgaatttcaaattattacctctcttcaagattttttaggtagtatgtatttatattttggcttctgatcacgagaaatgcaaactactgccatctaagtttcaaacagtagtaccactttacgttacagttaaaaagtacctttgcaaaacgttttacataataatggcttccatttcctggacttctactatgtactaggcagtgtgctaggtacttcataggcatgatctcaaatcagtccaacaatctcacaaaattaattctatcatcttgtttcacaaatttttttaaatgagattcagaaagatttaaaattgtgttcatgatcactgagcaagtaggtgccagcacttggattcaaacccaggtctgtctgttgacttaaaaccctgcacaaaattaccttctttaatcatcataacgcattggcggaaagacctgtgcctgattatccccatttgcccaataaaaaacagagaggttaatgatttgcttgctcaccatcacagaacgaattagcagaaaagaaactgccttcccactcttcatttcatttttttttttccagaggaccaaatcgcagtttacatattacattctaaaagctatacttatggcagttacatattacttatggataggataaaaatctcctgatttctgagaatcttaaacattgttataaatacggctta

SEQ ID NO: 477577 - DNA, 1000 bp, Homo Sapiens
tttttttttttttttttttttttttttttttaccagcagacccataaaaagtgaaaaaccacaaaaacatcaccttgggagacacaaaagactaagacagatctgaccacatgacaagtgtctcagccttgacctacacaggagcaggtaagactctggagtgacggacggctgccgctgctgccgccactgcgactgcacaacactgtttagacggttgaacaagtgcaaagagaacattgctgagtcccatttgtgttatttggctgcacatctcatggtgttggaggtggtttcggagatgggcacgagctctcactgtcgaagctagcagctcggccctgccatcctaactccaggtggcagtctctctgcttgcagcatccacgtgaatgaaatcacaaccgagggtttccctctttgaaggatttctttacctccaccaaggagtgccagtgtgcgatgggcttccgggggtatgccagcatctcgttccagtggtccctgcccaggccttcagcagtgatccccacacgacagactcctatgatctcattgtggcccactcgatcatagtccatgactgagatgagcaggctgacttgatccatgttttccgggggaatgtcaaagatgatggcctcattgtagacaggattgagagtgtttttctttatggttgttttcttcttcttcagcctccgcccatcacagagcaaggacactttcacatagggatctgaatagcctgtgatgtccatcgccttgaggttccgacacttaatcactgtgagggtgagcctgcctgcagtgggcaggtagcaaagggagaacatgatctctcccaagtccacgctttcacttgtggcatattggatatccttccagatggaggtttcccgagacaggtcagaggcctcaaagaggttgtccaggatgacctcgccaatcatgtcatggcgggagaagcggtcaaagtcgaagacactgagatgcagct

SEQ ID NO: 477578 - DNA, 1000 bp, Homo Sapiens; identical to SEQ ID NO: 345719

SEQ ID NO: 477579 - DNA, 422 bp, Homo Sapiens; identical to SEQ ID NO: 345720

SEQ ID NO: 477580 - DNA, 1000 bp, Homo Sapiens
tttttttttttttttttttttttttccaaccatgacatctttattataccatagatgaatatttgttaaataaaaataggtacagcaagtgtacaataagaccagtagttctccttcagaactctacccatttttcagaggaaggaaacacttttccagaatacaatgctcaagaaatgtaagccagatcccgcttgtatgaggtatcttaagtagtcagactctcaaaaacagaaagcagaataatggtgccaagagctggggcaggcagggggaaggggaaaagaggagttgttcggtgggtatagaacttcagaattacaagatgagaaagttccgggggtctgtttcacaacatgcatggagttaacactgctgtaccatatgcttaaaaatggttaagatggtacattttacgtgatgtgttttttaccacaataaaaaaaataagattgaaatggattaggaaagtaaggggtgttgtaaaaagtcatttaacaagcatttgattttagaccattggacctgcagaaatactttgatttgttagattcaaggtgaggtgacagagcaatgaagtctgcagcagttaaatgtctgttgatgtctcttgagtgacattggagatagctgtgaggatgccaacgatggaggaaacttagaaagtttttagatcctgggccaggcacggtggctcacgcctgttctcactcttgagtgtgtggccactgctctgggttgaagcatatcagaattctgcctgccataggcaaaccattctgcccatggaggcgtcttgaatgaccattccagccctttcttccagcccaggtcacatgatggcatgaatcagatgtgtcttccaggaaactacaaggagaaaagagcatcggggttactgtttgatctctgctgctctgtgtcagcggtaagtgttttgttgctggtctctgtaaatggagtagagaatgaagactttctggattactgtgctggtccc

SEQ ID NO: 477581 - DNA, 732 bp, Homo Sapiens; identical to SEQ ID NO: 345721

SEQ ID NO: 477582 - DNA, 1000 bp, Homo Sapiens; identical to SEQ ID NO: 345722

SEQ ID NO: 477583 - DNA, 1000 bp, Homo Sapiens; identical to SEQ ID NO: 345723

SEQ ID NO: 477584 - DNA, 1000 bp, Homo Sapiens; identical to SEQ ID NO: 161264

SEQ ID NO: 477585 - DNA, 1000 bp, Homo Sapiens; identical to SEQ ID NO: 161265

SEQ ID NO: 477586 - DNA, 1000 bp, Homo Sapiens
ttttttttttttttttgcattttcatagttttatttgataaaattccatcttacattctgtgtattaaaaaaataatatttctggtgtgaggctgaggtctcctctgtgtgtgtacccaagctgaagggtggtgagaacggaccactccagtctgaggggtggaagaggtgaggaagggggccagaaagcccccacctccatcacagtgctgtggtctttccaggctcagggggcaagtcacgtggcagggggagccctgctggcagcatgctaacctgacactcctggtcctggcacgctggagcatagtgtggggcagggtagcaacagggtccaggggggcagacaccccggcgccaggccctcagggtcagcaacacagtagccagaaccagggcagcagtgagggccccaaacaccaccagggccaccaagctaggctcacctagcccagcctcttgcctccgcaccacctccttcactgagatccgcagcagaccagcccctgcgctgtggggggctggccccgtggcaggtaccactacagctgaggtgggccctagaggggtgtccactgtggttggggggtctgggacaggtaagacaagctcacaggtcttgccaccatagccactggggcagaggcagtcgaagtcgtggacacggtcccgacagcgggcccctctctggcatgggcggctggcacagtcatccaggttgatggtgcagaagcgtccagcaaagccctcaggacagaggcaggagaagcggtttatgccgtcaaggcaggtggcaccgttagcacaaggccgcatcaggcagtcatccacatttacctcacagcgggcacccacaaagcccaccaagcagcggcacgtgaagttgagagcaaagccctggtcgtcctggcactgcccgccattgcggcatggggagcctgcctgttcacagggtccagccttgcgctcgcagtcacgcccatggaagcctggtaagcac

SEQ ID NO: 477587 - DNA, 1000 bp, Homo Sapiens
tttttttttttttttttagcagtcaaaagtggaagcttgtttaatattgctctaccatcatcctgaaaggcataataatttgagttacacatctgaactgattggagttacagaatcatatctcctttttgcatttaacaatatatacaatataaaataaatacatttacacaaatggacatttgctggagcacacagtatggtacacatcacaaaaatatacaattgattgctttacagatgtgaagcccatctacagctatagacatggttttattattattattattatttttactactggctataatgcaactcctggattattataagcagtttaaattttttgtccttttacgatctttgcacataagactgccataaaatgttttcctaggcaggtaaacagagacgcttaaataattaaaatacaatcaccaacacccattttctcttctataagaaaaatagcagttttaaattttttatatcttttatgttatcatttaaatgcaaaatagtggaataaatacaacaatctgatctgattgaaacacaagtgtaactacaaggagtcacacaatcatattgctttaaataagaacgaacctaaaagaagcaaaattaaaattaaaatcatatggctaaaacatacacctttataactttccaaaacttcacattaagtaaatggtcttgcttgaaacttgagaagacttccctctagtgaggtttaagatgagcatttaccctaaagcccgtgcagttctttttaaatccacgttttagttttatttcctatttgtgagatacttactcttttgtaatgctgagagttacttaaactgaaaactaaaaaattgtatctcattctttgaacatatctccatctcaggttttcagttggttggctcttacttctgaagcccaagtactttaatgtgatacagtgaaaacaatgtatatattgtatatattttatttatatatagtgtagttg

SEQ ID NO: 477588 - DNA, 1000 bp, Homo Sapiens
ttttttttttttttttttttttttttttttttttttctcggcacaaaagctcatgatttaatgaggaacagaaacaaaatctctgattgttggtgtttcaaacttcattggcgtcctctggcaagcacaagttgatccctctgcagcttcaataccctttagcctgatgacagcttcatttaacagatcatttttccttgatggaggtggcaagcgtaacagtgttctgggcctgcttcagtaatggcatgtcgatcatactcccttggaaagtaaaggccccctttcctaattgttgatgttctttaaaggcagcaatcagttcttcagcccacttaattttttcaggggaaggagaaaactgctcctggaccacggcaatttggttagggtgaatcacctgcttaccagtgaagcccatggcggctccttctcgtgactgtctaagcagcccagctccatctcgaaagtcaatgtacaccagatctatggcttggagaccaaaggctttcgctatgacaacaatcttttgccgggcgtagagaatatccagggtttctttactacttgttgcacctatgctggctcgaaagtcttctcctccaaaaacgactgcatctagaaagagacctacttgaggcccgaccttcagggtttcttcacacactgccttaaaattgagcaaacccattgcagtttccacaaaagggattaaattcattggttgttcaagttttcggccttttaagtggaatgaaaatttgtctgcaaaccactggatttcttcaggactttccacctttggtagcatcaggctggaaggaaggacccgggattgcaaaagggtctctaggtcttcttccgccagaccactggaaactgagttgactctcacacatttttcagtagggcccagatcaatgtcttcaagagtttttacaattctcagtcgagcttcattctttttgtttgcagccactccatcctcacagtcgagcac

SEQ ID NO: 477589 - DNA, 1000 bp, Homo Sapiens; identical to SEQ ID NO: 345725

SEQ ID NO: 477590 - DNA, 1000 bp, Homo Sapiens
ttttttttttttagaagtgtgcttatgaaaacttgtattattattttttatttatttatttatttatttatttatttatttatttatttatttttgagacagagtcttactctgtcactccggctagagtgcagtggcacgatctcagctcactgcaacctctgcctcctgggttcaagcgattctcctgcctcagcctccggagtagctggtattataggtgcccaccactatgctcagttaattgtttgtatttttagtagagatggggtttcaccatgttggccaggctggtcttgaactcctgacctcgtgattcgcccgcctcggcctcccaaagtgctgggattacaggcgtgagccaccgcacccggccaaaactcgtatctttattaattagcacctagcttgtttgtttgtgtctgaccatcaagtagtagttgttgaataaacagtggatactctgatagatatgaagataggagaaaaggatgagaggaaggaaagattctgagacctgtggaagatgtgtaagtagaaggaaaacattctaaagcaggcatgttgcccagctttcgtttttgcttccccaggtccctagtaggctgccaagacaaggaggagctctggctagtattctgtaggtttctccccatctccaggtttgggttggggctactcatatcctcactcttcagctcactcagctctctcttcaatgttttgcactcttcctcttccttcccttcacatgcctttcagttttgcgcaatcagggctggagtcttggaagaaacaaccaccatttgcaaagttaccatactgtaattttcagtgaggagattcctggcctccagttcatggcagagaccatcctgtgttgctctccagtacaggtgtcctctgatggagagaggggcacctgcctgtccttagccagagagggcttccaggtggaagactggagagagaaatggaaagaagggtaataaaaatggga

SEQ ID NO: 477591 - DNA, 1000 bp, Homo Sapiens
ttttttttttttagcagcagcaagatttattgtgtagagcaagagaacaaagctcccacagcgtggaagcagactctggtggggtgccgcgctcgccagcttttattcccttattgtccccgcccatgtcctgctgattggtccattttacagagcgctgattggtccatcttacagagtgctgattggtccattttacaatcctcttgtaagacagaaaagttctccaggtccccattcaacccaggaagtccagctggcttcacgtctcactactacctttctgtagctgctactactacagtgagtagacggcagtgctgggattcgaaccctctgtcttctggcttggaagtcttaaccactaatcgcgtcttcctttcagctactccttgggaaaggcctggaaagaagctacagcacagggcacagcggggtctaaggaccgttccgcggagctcagccagcaggactgtggggctgcaggaaaggacagtccagcccagggtcccagcttctccgccactcaggttggaagtctcgggctgcagtgctcctggggctcaggggcggataccagcaggagcgcggttctgactgcgccagtcaaaagtgaccagcgcgcccagggagatgaggaccagcccggccagccccaggcggactaggttcccccgggtgtagtcggaggagccagagtctgcgggcggagccgggagagaggggccatcagctcccggaccccaaagtctgggccctgaactccaggtttccagcccctggggtggacttagggacctgactctacagtctcaaagttgagggggagtcgatggaggcttcaactcctgggtccaggaagaaggggctggggcctggactgctggatcaggaaggaggggctgggggcctggagtcctgggtccaggaaggaggggctgggggcctggagtcctgggtctgagggaggaggtactggggcccgggaatcctgggtctg

SEQ ID NO: 477592 - DNA, 1000 bp, Homo Sapiens; identical to SEQ ID NO: 345730

SEQ ID NO: 477593 - DNA, 1000 bp, Homo Sapiens
ttttttttttttttttttttttttttttttgcgctcaataatagcttttattatcatgttcggctcagaggcagggaggagtggaacggcatgggagggctgcgggaggcacggcaggggggtcaggggcaagtggcaggagggcggatggggggcagcggtgggcaccggggcagggcgcgctgacctgtcctggggcccgggttgggggcagaaatgagcctgcccacgctgtcccgccacggcaggcgccacgcatcctcgacacagccgccatggcaggccttcgggctccgtctccgggacaggcggtgcagggcaaattggtatgcagcgtccgccccgtgggcccgggagagcctgccccgcagggaccagagcccaaggacgggctcaacactcagtcaaggtggggttgacgacggccagacaacaggggagggaggagggacaagggggtccccacttccagggacgcacaatagcagagccacttacacgctggggagggggcggtgcgggggtcctcctcccgcccgggattcagagtcgggggtgggggccagccgggcgggtgagatgcgcagagaggaagggacagggcggataaaggcacgaggtggggctccggccaggccaggaagggacatgggaggggtctcgagggggaggggctgggcttctctcaactccctccccctctcccccgggctgggggctccggggcgggatcctgagcgcagtcctggccccgcggcgccccccgccgggccggccctctgagaccccggcgcagggccgcctagggggcgccgcgcccctcacaccaacgcgtagtcgaactgcccgcgctcgagcgcctccttgtggtcggtccaggacgaggcgggcatgcggctgtaggggtcgagcaggatgcgcacgcagcgcaccatcaacagcaccagcaccacgagcaggcagagcacgaaggcgaacaccgtgcgctgctccgcgtcca

SEQ ID NO: 477594 - DNA, 1000 bp, Homo Sapiens; identical to SEQ ID NO: 345732

SEQ ID NO: 477595 - DNA, 782 bp, Homo Sapiens
ttttttttttcttcccctttttaaaattttattttgcccaggtacaaaactcaaagttctcaaaagggtatacataatggaaagtcagtctccttctcctgtcctccatatagttccccactcctggaaggcaacactgtgcactgtgaacagtttcttgcatatgcttccagaagcactctcttcggatgtgcaggtcttggaagaagatgaggagtgtctgccggatcagctggaactcccctgcagagagaccaccatatatttctgtcagctgccgcaaagtctcgtccacttgctgcaggatggttggggagtctcggatgaatcccttgatggtatccaagtgattgaaagtgaccagcagcacatccttgggtcggggacacagcaatacttgatatttgaaagccatggtcatcaggtcatagagcttatccatgctggcctggttcagtttcataatggaggcatgagccaggcgctcatagacagtcctcagggccttcttggagtagagctcttgaggcttgaataattcctccataaactttctattgaacatggtggagatgatgtcattcagaactttgcgggccttgtctcccgggatgttctgggcccgcagccgttggtcgaggatgtaaagcatctccccgcccaagttcaagaagagcagcggtagcgtccgcaccgacatggtgctggaaacgagctggactggtgaagagccccggggttcggtagccagtggcctgaaggccaggccgcagcgtcccaat

SEQ ID NO: 477596 - DNA, 1000 bp, Homo Sapiens; identical to SEQ ID NO: 345733

SEQ ID NO: 477597 - DNA, 1000 bp, Homo Sapiens; identical to SEQ ID NO: 345734

SEQ ID NO: 477598 - DNA, 1000 bp, Homo Sapiens; identical to SEQ ID NO: 472578

SEQ ID NO: 477599 - DNA, 1000 bp, Homo Sapiens; identical to SEQ ID NO: 345735

SEQ ID NO: 477600 - DNA, 1000 bp, Homo Sapiens; identical to SEQ ID NO: 472578

SEQ ID NO: 477601 - DNA, 1000 bp, Homo Sapiens; identical to SEQ ID NO: 161267

SEQ ID NO: 477602 - DNA, 1000 bp, Homo Sapiens; identical to SEQ ID NO: 161267

SEQ ID NO: 477603 - DNA, 1000 bp, Homo Sapiens; identical to SEQ ID NO: 345737

SEQ ID NO: 477604 - DNA, 1000 bp, Homo Sapiens
ttttttcatttttgtaaaaataaggtttaataaaacatcagcaatctgcatgagaaggtaaattacaatgagaaacttaaaaagcttacggtctaagtcaaccaatgtagaaggtagtggttgaagaaaacaagctttgacttttaaaatttcctaaccaggggatttatttagaaattctggcattcaaatgtacatgtaaaatccaatttaacagatcaaaattgttacactaagtttcacttagtatctaagtatccaatcacaattgtatctaagtttcacttttaagaaacattataaaggtaattaaaactctaggtgtatacttatatggaactagtttatttcctatttaactactgttcattgcgtaaagtatgttgtcccaattttcagctgttttaaggaattataaaacattgagatctactaggaagagggaaagcctacttctaagtgatgccactagtacaatcaggcttggattaagtctcttctcaggggcagctttgatttagccatggactcacaaggaaaacaagaggtggatttggttagggagcaacagcaaattcagcccgaccatattcctaatctaaacacattttcagcataaagatgtaaaaacaattttttttggttcaaaagttatggttgccatggagacaaaaagaatatacctgaatttataaactgagatatatttcagctccttggcttaaaataatacatctttatattcttgagacatatctcaagatgttccttgctttgccttgaataaaaatttttttgaaaagcctatgtttctcgtgaacacactcatacttcaaatttaccacctattttaagctttaaaattcttcttgccagcatttttcagctaaaaaaaatcatttcacgaatgtttaggtactttttacaatgaagggatatggcagcatggatactgggtagctggctaggctctaaatacctgatgactcaacgctttgca

SEQ ID NO: 477605 - DNA, 1000 bp, Homo Sapiens; identical to SEQ ID NO: 345739

SEQ ID NO: 477606 - DNA, 1000 bp, Homo Sapiens
ttttttttttttttttttgtagattcattttttctttatttcacaaaagagaaaacaaagttcagaagtgttaagtgacttggctgaggtcaccccactaacagattccagagctggcattcaaaccctgtccacctggccccaaagcctgaactgcttggattacacggcatttcccctacggtctccatcttctggtcatctctgtatgaaagcctagaggaagtgttccaacgacatccacattgtatgattctttcaagttaaacccagctgaaatgccagttcccattacgaccgcaaagaactctaaaggaataggcgccggcaatttctctttaaatctctcattaaactccttgccacccaacagcaaaccaaaaaccatcagcccgacgcctagggaacacacgttgaggtttttaacattctgcaacacagcaactgtactatacaccacggaaaagattccactgtaccgctttgttttaactccaaacagatattttaacatggaggtgaagacatgcacagctgctgcggtggtaaacccacggaccagaggctctgtgagatatatggccacaaatccaaacctacagacacctaggcaaaactgaatgattcctgaaagtaaggtcacagacatggcgactttcactctcaaggcatctctggcctctgtgccattggttgcatttactcctcctggaatgactatatcatctggtactaatcgaacagctacaccaccaatcatcaggctaataacagcaaaaggacctatggatatgtgtctggaggttccaagaaaacaatacatgataacagggtaaaatgaagagtacaggccaaatattggaggcacagctgccagcattgcaaaggctaagccttgaggaagctgaagcacccctgtgcttatgcctgagaccaagtcacccaacacatattccttgaatttgtatgctggcagccatttagttatgggtaggaacat

SEQ ID NO: 477607 - DNA, 1000 bp, Homo Sapiens; identical to SEQ ID NO: 345740

SEQ ID NO: 477608 - DNA, 1000 bp, Homo Sapiens; identical to SEQ ID NO: 345741

SEQ ID NO: 477609 - DNA, 1000 bp, Homo Sapiens
ttttttttttttttttttcattgctgcaaatattttccttttactttaggagttttctgatgtacaacaatttttaggctttgtgaattcaagtttgctgggctttccatctactgcacaaagacttcccgagctgcaaatgaaggaatctactcccggcgtgggggtccgcagcgcatcacctgcctctgtagacaaacttcatgggctccacggccagtgcggtggccacaacgtcatctgcattgtgtctgcgaactccagtgaccatcagcccgtccagtttgcccacgatgaagaccaggttgtcaggcccgatgaagcccagcaggcctgtcctggtgaatggcctgtcaaagatgggtgctcctcctgtggtgaccggaactgcctcaaacacattcttcgtgattccaagcaatccatagtacgctgtgccagttgcactggaactgacgcatatttctcccacttcatcagttttacaaagataaggggtaccttctaacttcacaacacatacattagctccaggcatcacctgaccaacgtcctgaacagtaaggactgacaacttttcttcagtatccactctgataacaccataacttagaccgttcatcgacaggactgcttttcttggaggtggtcctcccagatcaggtggcctgcggatggcgacagtcagcgcctcaggagaacttgcacaaggacagatgacctctggcctcagacctctggactggaagacgttgaggaaggcgtcacaggaggagatcgaccacgggttggcaccatcggccacaatcagcatgcgcagtgagctgaggctgacgtccctctggccccgctgagctaggagagaccagtgcatgtctcgcgacttcaccagcgcggcccgagctttatagaagcacactttctggatccaggagagtgggttcgccttcatcagcgcgtaggggacgctgaccacgtgcatcctgttcatgacgcttgt

SEQ ID NO: 477610 - DNA, 1000 bp, Homo Sapiens
tttttttttttttttttacaaatagaagcatttatttttgaatagtttagacatccaaaatggtaaagaatgatataatgaatactcacaaacctgccactccatataaaaagcaaaacatcctcatccaccccggggacccccgactcaggcctgtgtgcaggactgtgcaccagtctcggaggtgtggatggccctgcacacaggtagggtgatgggcagggaggtcagcgccaccgaccaaggccacatgggaggtcaggaacggccaggacaagggtggggctgcaacgaggtgtcccttagccacaccccctaccttctctgactgccagtgctggtacaggaggacatactcacaggcccgatgaagcccagcaggcctgtcctggtgaatggcctgtcaaagatgggtgctcctcctgtggtgaccggaactgcctcaaacacattcttcgtgattccaagcaatccatagtacgctgtgccagttgcactggaactgacgcatatttctcccacttcatcagttttacaaagataaggggtaccttctaacttcacaacacatacattagctccaggcatcacctgaccaacgtcctgaacagtaaggactgacaacttttcttcagtatccactctgataacaccataacttagaccgttcatcgacaggactgcttttcttggaggtggtcctcccagatcaggtggcctgcggatggcgacagtcagcgcctcaggagaacttgcacaaggacagatgacctctggcctcagacctctggactggaagacgttgaggaaggcgtcacaggaggagatcgaccacgggttggcaccatcggccacaatcagcatgcgcagtgagctgaggctgacgtccctctggccccgctgagctaggagagaccagtgcatgtctcgcgacttcaccagcgcggcccgagctttatagaagcacactttctggatccaggagagtgggttcgccttc

SEQ ID NO: 477611 - DNA, 1000 bp, Homo Sapiens; identical to SEQ ID NO: 161269

SEQ ID NO: 477612 - DNA, 1000 bp, Homo Sapiens
ttttttttttttttttttttttttttgaattttttattttattttattttttaatttttatttattttttttgagctggagtctcgctctgtcgcccaggctggagtgcagtggtgcgatctcagctcactgcaacctctgtctcccgggttcaagtgattcaaaaagaattcatgctatctcataaaattttaccctgatattctgcaattgataactgatcagtaatttctttcctatattgattgcatgatgaattctctgctgctgctgctgctgctgctggatgtgtgctctgttaaaatgccttccaatattacttacatttgtggtgttcctcaagagaaaaaaataaatgacatcaattaatgagtcatgaataaagcccttcctacacttttatataatatttcacaagagtgaaatgaagtgagagcttgaagaaaatgctttctcaaaatctttaaattcataggatttctcaaaagtgtaaatattctggtgttgagcaaagtttgactcatgactaaaggtgttcccatagtctgtccattcacagagatttgcactattatgaattttttgttcagtaaaatatgaatggtgactaaagatgtggctacttttcttgcacccataaggttctgcatcagtatgaattttcttatgtcgtgtaagctgtgaaccccagataaaagatttcccacattctttacatacgtaaggttcctcaccagtatgcattctctgatgtcgagtaagttgtgaaccccagagaaaggcttttccacattcttcacattcatatggcctctttccagtatgaattttctggtgtcgattaagttctgaaccacgaaaaaaggtctttccacattccttacattcatagtttctctcaccagtatgaattttctgatgtcgattaaactctgagccatgaagaaaggtctttccacattccttacattcataggatttcctctcattgtgaattttc

SEQ ID NO: 477613 - DNA, 1000 bp, Homo Sapiens; identical to SEQ ID NO: 161271

SEQ ID NO: 477614 - DNA, 1000 bp, Homo Sapiens; identical to SEQ ID NO: 159348

SEQ ID NO: 477615 - DNA, 980 bp, Homo Sapiens; identical to SEQ ID NO: 161273

SEQ ID NO: 477616 - DNA, 836 bp, Homo Sapiens; identical to SEQ ID NO: 345747

SEQ ID NO: 477617 - DNA, 1000 bp, Homo Sapiens; identical to SEQ ID NO: 345748

SEQ ID NO: 477618 - DNA, 1000 bp, Homo Sapiens
ttttttttttttttttttttttttttttacttttttaaagattttactatttgttagaaagatatacaagagcatttctatcctcaaagaaaatccttggatttctgcagacagcagagggcttctcaaaagttactacaaaattaatcacctccacataaatgtatacataacctggcatgacacctgacagggtaaatgacagacaaataattatatgctgaggaaatgttgttgacctaattcaactttattagaaaaacctactttttcctctagtttcttcttctcttcactaaataggcttagtctttgtttgagaaactcattaagctgtaaaacttctttctcagtagatgcaagcttttgctcaaattccccttgttgggaatgggaaactgattcctctgaaaatggtgtctggagtgaagtgttctcatattgtggctgcaaactagccacataagaatcctcacaatttacataatgtcctaacatggcatgttgagcccgtaattcattatcccttatcctctcatgcaggtgggtaatttgttgcttctgccgatcgattacaatttctttctgccttagaagtccttcttttattttcaacattgattcccacttactgaaatcctgatagccaggtgaataactttgacgagatgatccagtcaaaacctgcattggtgtttcacttccttgtcgaaagtcttcaatttgctgctgttgccaaggagctaaactgtaagaatcctctgtatttctaccttccaaaggatttgtccgcagctgctctgtaagccacatctgagtccttacggaaggctgaatgggaactccacctactgcctgttgaccaagcattaaatattttggaggttcaaaagcctctgagcttgtcataatgggcttgctttcaggtaaggcactatatgtcatgtctacagtctgtctcctaagagtagaggaagaggctctaaagtcctccttgcta

SEQ ID NO: 477619 - DNA, 1000 bp, Homo Sapiens
tcacgggttgtttttggtcttcacatgcgttaatatgtgggttttcaggttggttgactgagcgaacttcctgttgcaaacatcgaaggggcacacgaagggcttatcgccggtgtggatgcgcaagtgtgtgcgcaaattgaaatcaagggaaaagcgtttcccgcagccttcgaatgtgcactgaaagggcttctcgccggtgtggaccagctggtgtcgtctcagctttgagctctcaagaaaagctttgccacattctgcacatacgtggactctgggcccgtggatgtggagatgttttctcatggcggcgtaatcccggaacatcttttcgcagccgctataagagcaagggactgttttgggaggttctcctttggaccttttgggcttcactttagtaaattctgccagctgtttaggatctgagagatcaatgcctggtaaccccccaggaggaagtttcttccctttcaagtactcggaataatcaggtgggttttcagcctggccttcacccactgccccttggtcattgttatcgttaggggaccacatagtcacggaaaactcaccctccagcgttttgacctgcatttgcttctgctcccacttcctcgtgcccaggctggagctgctgcctgccgggttggcctcagtgctggtggcactcttgccgctgggccttttgctgggctttttgctgcggctctgggttgatgttgatgttgatgccgccgaggccgacagagaggccagggtcatctggaagtgctcgtcttcaatgctatccgggagggccaactggtcctccaagtcgttgcctagctggttgtctgagtcgcaatagcccaccacttcctcttgtgtctgcaacataagcatttcctggtcgtggtcgccatagcccgtgttcgtgaagagcggctgcaacaccatcaatggcggatggttgtggccaccgtagatccaattgccatccacatcctcgtactgg

SEQ ID NO: 477620 - DNA, 1000 bp, Homo Sapiens; identical to SEQ ID NO: 157711

SEQ ID NO: 477621 - DNA, 1000 bp, Homo Sapiens; identical to SEQ ID NO: 161275

SEQ ID NO: 477622 - DNA, 1000 bp, Homo Sapiens; identical to SEQ ID NO: 160006

SEQ ID NO: 477623 - DNA, 698 bp, Homo Sapiens; identical to SEQ ID NO: 345753

SEQ ID NO: 477624 - DNA, 1000 bp, Homo Sapiens; identical to SEQ ID NO: 468852

SEQ ID NO: 477625 - DNA, 1000 bp, Homo Sapiens; identical to SEQ ID NO: 157783

SEQ ID NO: 477626 - DNA, 1000 bp, Homo Sapiens; identical to SEQ ID NO: 161277

SEQ ID NO: 477627 - DNA, 1000 bp, Homo Sapiens; identical to SEQ ID NO: 343408

SEQ ID NO: 477628 - DNA, 1000 bp, Homo Sapiens; identical to SEQ ID NO: 345755

SEQ ID NO: 477629 - DNA, 434 bp, Homo Sapiens
gcagggcaagtgatttattaaagcaacgtgttgaaacctttacaatttttagtgaagatcagggtgtcgttgaaagactttggaaaccaggttgagcatttttacatgtcacacaccacattttttcactatttccaccaggactttttcaatgagagtcgtttcttaaaagatatctgatcggtgcagtgcttcacttccaacttggctgcaagagcttctggaggtggattaagtttggcaacttggaggtttaccgcagcgtcacttaagaataagaagactgtgatctcagaagcaacagctgggcagacaagagcatgggcctggtagcagcaaagggccagcgagaccatcaggagacacactgacagcctcatggtggcttattcggctgtgagctcagctttcacaatgagtgatttggattcgac

SEQ ID NO: 477630 - DNA, 1000 bp, Homo Sapiens
tttttttttttttttcctttttaaatcttaatttatttaaaccaacaaatatttgggtatctactatctgtcaaacatcgtgttgagaatataacagaaaaaaaaaaaaacacacagacatgatgctttgcctcacagaattacaatctaaaatgatggaagacatcaaacaaatatggtgattattaagaataagtggtaacgcccagtgccatatatagacaaagaaaaaaattattacagacaagcagtaatacgttttgtacctataccaaggaaatagccaacttacacgaagggctgaggcaaaactgttttttaagttggtagatatgctcatgagcaaaggttccctgcatgtaatcatagccattccagctgtcaagttacgcatcatgtgatgagctgctattcgcattcgagattcctccgaatccagggcaaaatccttcctgactatttgctcacaagtagtcatggcaatcttaattgatcgatccaccacaggatggaccagctcctggacagcccgttcaattgcctgacgcacacactgcttcaactgtggatgggcctgaaacaagggaattgttggattcagagtaatgtgtggtgccaagcccgcaagggaatagacattgatgtcgtggtagctgtactgtggctgtggtggaaccgtggctgtacaagtggtgttggtagctggtgtagtagaagttgttgtggttgtgatgggagggagttcttctggctgcttgacatctttctttggagcagagagttgctcatctaaattcttcaggcgatctttatcctttaggaggtttccaggttttagctcattgatgtctaatgcaaggttcttgcagagaacctcgatttcaaacttcaagtttaactttaagtcatgctcctgatgtagctcagctaatacattcataattgccattgtccaagggtttggtggcctaaaaaccacactacgaatgctagattctaa

SEQ ID NO: 477631 - DNA, 1000 bp, Homo Sapiens
ttttttttttttttttttttttttttttggcttaaacaacaaaggtttatttcttgctcactacatatccattgtgggttggtggggtgggagtgggggattctgctcatcgcttaggaccccaggctggcagaggagggtttcaactggagagctgcttctatgtggcaacctggacccaggctctcaaagcttctgcccagaagtgaccctcggcggttctgctcatgctccactcgccggggcagccccgacctaacctcccagcaggcagcgcatcacatgttacaggtgcccaggagaggagaaactgcacctttgtcaacaaagacgaccacggaggggagactgctgatggagggtggtcaggagtaggggggcttgttcctgcctgcaggttctcccctatctcccaggactgagctcgacacaggcacaggctgaggcctttggaaagctgggcttgggagcttctgtgacctggcaagctttgccttccttaaactttctcagcagatggtgaaatccaatttggaatgttcagccgggcccagtcattctaacctcatctcagccgtcagctgtgaaacaacaaggtcagggctgggttcagaaagccatcaggaaccaaagtgttgtttgtttttttgtttttgttttgttttgtttactttcaggaacggggtggctgcctgccgagcggccgctgaaggggttggaggacgtgcggtcactggcggagccactgctgctgctaaggcggccattggccggggctgctccgggcgggacgggggcgaccagccgcggggacttcaggcccatcacaggcttggaggaggcgtagaggtggcggaactcctcgtcaaacagctccaccgcctggcctgtgaacttggagaggatgttccggtgcacgtgtccgcagagccaggtgaagctgtaagatccagacaggacaaatctccagtccgagatgatgaacttctcccggatttgg

SEQ ID NO: 477632 - DNA, 1000 bp, Homo Sapiens; identical to SEQ ID NO: 345757

SEQ ID NO: 477633 - DNA, 1000 bp, Homo Sapiens; identical to SEQ ID NO: 158980

SEQ ID NO: 477634 - DNA, 1000 bp, Homo Sapiens; identical to SEQ ID NO: 345758

SEQ ID NO: 477635 - DNA, 1000 bp, Homo Sapiens; identical to SEQ ID NO: 335018

SEQ ID NO: 477636 - DNA, 1000 bp, Homo Sapiens
ttttttttttttttatttctgggttgggttttttcatgggtttttgttttgtttatttcgaatactgaaaaagtcctttgggctctgtggggttccccacgctcacggctcctttctcccacactcactgcccttcttcccacagcaaatctatttcaaggacagtactttttaaaatgattaatgttgagttctcaactagctctgcagaactagaggagctgtttgcatctgtctgtgcggatggagtttcttttatctgacaccaggtctccaaccacactgaaacaaggcatttatctacagagctcaactagaaccccttttcattaggctactccacttccttcccctcatacctaccccacatcagccacgtggttaagaaggatagtcaggaatgtttttaccaactccaagccctaattcatactcctccatatctcccaccccaccctttcaaccccacccccacccccagaatttcattgatatttctcccaactgttatttggaaaaaaggtaaaacaaaaaaggttcaaggtcttggtgctcagcccaaggggctccatgtgctgggacaccaacaggaaagggcttctgcctctccagcccacacccgagccacctcctgacccctggctgcaaaagcaggaaggggcaggagccagcacaggacccgggtggggcagggaggggaagcgtctcaggatctggcagagccccgggcagcatcattcaacttggccacccgcaagcttgctggtgacgagcgaggactttctctggggcagatcctgtggggtggggatgtgatcaccagtcaccaggttcttgtctggtcctgcacttggcagctgcttattcttcatcttggctttggccatgttgtagtctcctgagtcaaagtacttttgcatttcatccgcacagagaagcacactccaatgtaatgatttataatcccctttctggagtctcttcatgaggaagtcggagc

SEQ ID NO: 477637 - DNA, 925 bp, Homo Sapiens; identical to SEQ ID NO: 345763

SEQ ID NO: 477638 - DNA, 1000 bp, Homo Sapiens; identical to SEQ ID NO: 161279

SEQ ID NO: 477639 - DNA, 1000 bp, Homo Sapiens; identical to SEQ ID NO: 161280

SEQ ID NO: 477640 - DNA, 1000 bp, Homo Sapiens; identical to SEQ ID NO: 345764

SEQ ID NO: 477641 - DNA, 1000 bp, Homo Sapiens; identical to SEQ ID NO: 161282

SEQ ID NO: 477642 - DNA, 1000 bp, Homo Sapiens; identical to SEQ ID NO: 345769

SEQ ID NO: 477643 - DNA, 1000 bp, Homo Sapiens
gtctactcactggctccaagccaggaccctggaccactaatgcctgtgttcactgggttcaggtgctggccagtgggaaggagggctgggaatggtggggaaggaaggcgtttccttcctggctggcatgaataactggggagttcgtgttggccaatacttaagcagtgcatgcagtcattagaacatttgtcttgtgcatctcccaggtaatgacgagggtggggtgaagttggctcgggttccatgcacgtgcccaagcaggtgacaaggacctgggagagctgatggtgctcagcctagcactggcactgccctagggtctagatgaattctggcttggacagaatctgcatctcatgcctctcagttctctcccggaacgtcattctggaatcctgtgatctttgctccctgcaggggaaagagatggagctgctgaagacacagtagatgagggggttgatggcactattcaatgctggcaggttctgaatgatcacagaggcatagaaacgctcctgggtgtctggaaggaggttgaaattgtccaaaatgtcaaacaggaagtatggactccaacagcagatgaaggcaagaatgatgatgatgctatacttgatagccttgatttttgcctttgagatgagtcctcggttatagctgctgcacagtttcccatctgagcagttggaaatcactgtttcgtaggttttgcttttaatccaaatagttcggatcacaatgccatacatgatgctgatgattgtcagagggatgaagtacaccaggaaggccacgatggtcatgtatggggtccagtaggagtcgtcaggccacagggcccagcactgcacttcaccgttggacagtgtcctcttcccaaatatgatcagggtgggaatggagaacagaaaagacaggctccaggcgatcacaatgaggaccctggcttgcttttctccttgaaggaacttcatggggtagacgatggcatggt

SEQ ID NO: 477644 - DNA, 1000 bp, Homo Sapiens
tttgaacgctcccaagatgtcacgtttattgcaactgagcagagacaggctgtgcggaccttcctcaatcccgtccaacccccagcccctccccaagcccccgctgcaactacgccggcaggtccgcagagtgttgcttgacagcgcgtggcggtgcccggagtcttaagacaccgccagtctctggcgccttcagtcatggtaggggactccagagggcacgcccgcctcttgaagccctaagtccggcttggaggcagcggaacctccggagaggtcagaggtagagcgaggacactgtcggaggcggtggcgctggtctggagggtaccactaggggcgggattccagcccctgggccgggcaggtcacccgatgggcaccggccctgggggtcggcaggcagtggcttccttgggggtgggggcttggctggcccctgagacttcgggcttctcaccaccgggtcagcgggcagagggcgggtagggggattgggtcggtcagccagctcagccttagtgcctcgtgccagcagggccctctgcggaggtcctggccgttcagagggaccagattgggctgccctgtactggcaggtgggtcccttgagctggcagagtcgctggtgcaggcgggcacggtaccagtagctggcaccaagcatcaccaggaccaataagaccaggaggctgaggagcagccctgtggtcagggagctggttgctttgagctgagtggtgcagtcagggggtgcccagccctcctcacagtagcagtgcctgttgctgtcacagaccccatgtccatggcatttgcttcgacattcctgtgcccccaggagatccacacgctggcatcgatggtctatacacaccaggccagggccacaggctgtgccaggcagagtcaggaggggctgggccacatcactgcccaggtccaggtgcacccagctgcagttcagctcagtcccattcacatctattgtctcccagag

SEQ ID NO: 477645 - DNA, 376 bp, Homo Sapiens; identical to SEQ ID NO: 161284

SEQ ID NO: 477646 - DNA, 1000 bp, Homo Sapiens; identical to SEQ ID NO: 158173

SEQ ID NO: 477647 - DNA, 1000 bp, Homo Sapiens; identical to SEQ ID NO: 345773

SEQ ID NO: 477648 - DNA, 1000 bp, Homo Sapiens; identical to SEQ ID NO: 345774

SEQ ID NO: 477649 - DNA, 1000 bp, Homo Sapiens; identical to SEQ ID NO: 161285

SEQ ID NO: 477650 - DNA, 1000 bp, Homo Sapiens; identical to SEQ ID NO: 345776

SEQ ID NO: 477651 - DNA, 1000 bp, Homo Sapiens; identical to SEQ ID NO: 345777

SEQ ID NO: 477652 - DNA, 1000 bp, Homo Sapiens
ttttttttttttttttgaaatgagaaaaactccaacctgctttatgtagaaagggcagaggtcaggggagggaaatagtcaaaaactgcacgtcattccttggacacatctaccctctgagacactggacactttgagtccagagggaactggcccccggtccatccctctttgaaaggatttctttagtttgactctttgacactcctcttgtgtctgggctctgggccgctggctgcactggcccctggcccaggaaggctgggtccggcaacacctggctagctctagttgatgtagtacaccttggcggcatcataatgggcgtgggtcatgtagttcttgttcctaaggggccaccagtggtcagggtggtaggtggctgggtagacatggggctggtgttgaacacaactgaagagcgccaggctccggtctgtggccacagtgggcaggtagagctgcagcttatccagaagatgacccggccagaaggaattggggtgtgtttgctgcagaccactggacctcttcaccttcagcttcctggtaaattcctcaaactccttaaagcgcattttcttgcttttctttggcgttttcttgtcagtcctcttagacttgccagggccctgggaccggagcagagccagattcggagaaaagaccttccagtcagagtagtagcctcccggctgccggatggggcacactttgtccatctggaaaatgatcttgtctcctgggtacagcaaggctttcatgaggatgtcctctgtcagcgggaggccataggacttacagagcttccagcattgcaggtagaccagaaagttgtgcctgcgggccgagtcaatgagctccctcatatccccgtggatggtggacgggaggcagtgctcatcaaagtgccgattcccacagcgcaccaggtgacattgctccgtgtactggatggaggggatcgtgagcttgtgctgtcgctgccgctcgcggtacc

SEQ ID NO: 477653 - DNA, 1000 bp, Homo Sapiens; identical to SEQ ID NO: 161286

SEQ ID NO: 477654 - DNA, 1000 bp, Homo Sapiens; identical to SEQ ID NO: 161287

SEQ ID NO: 477655 - DNA, 1000 bp, Homo Sapiens
ctgtagaaattcattttattcttattcagactattttcaaaagaagcagtggtgtgctgtttttctaaaaatatgcctttatagatttttatatatgtatattataaaatccatacatgtatttacatgattgctacatacaaaattacagcactgtggtatgtacacatctacaggtacattcttgccgcgcatccctgctgtgctttccccacgtgagggagggagggagactgaatcggttgtgagcaggcaggcaggcagcatctggaggcttccggcagcctccccctctctccctccatgagctcccttagggctctcgagtcctcactggtctgccttatctgttcttctaaggagtcatcatcaagtctccgggagcccgtgggctccatgccatccacaatgctctgtatcagtctcttgagctcattgagggcagtgcgcaagctgccggctggcacatccttggcggacgaggtttctgaagactcgtccatggaggagtccgtggagacggctgagtcagcactgtcattgcctcgaaggtgtgagcacagatagcgaacctggcagtaggcttcccagagctgcagtctcagctgctctcgctcctgctccagctcctcagcctccatgctctgctcgatctctgacaggagggatgtgctggtggcggcagagctctgcagactcctctcctcagtgagttcttccaccttcacctgcagctgtcggcaggagagacgcacctcctgaagctccagctggctttggtgcagctgtaggtccttgtcatggccctgcctctccaggattagcacccggtcctgtagctcctccacggtcccttggagcaggtcattttcctctaaagtagcgctgagacgatgctccagctcccgtttccgatctgacagcatcttgatctcggcctgaaggctctccagccggataatgtgctggttggttgatgagtttttctcccgaaagtctt

SEQ ID NO: 477656 - DNA, 1000 bp, Homo Sapiens; identical to SEQ ID NO: 345780

SEQ ID NO: 477657 - DNA, 1000 bp, Homo Sapiens; identical to SEQ ID NO: 345782

SEQ ID NO: 477658 - DNA, 1000 bp, Homo Sapiens; identical to SEQ ID NO: 345784

SEQ ID NO: 477659 - DNA, 1000 bp, Homo Sapiens
tttctggaggtatctatggaaaatatcatatcttttactgggatagttaatctagaatcatctctgccagtgttgtactgaaacgggactgataagaacaacaaatacacgtttattttgtaccacgcggctgtcagtgtccggagtcccccgggcagagcgccccggggagggctgggccctcagagcagcaggagggcgcccagggacagctcaccctggcccagcaggcggccccgctcccggccgcggccctcgtcccgggccttgactcgaacggccaggcggcgcacttcgtcctccgagaggccgtcgaagcagaagtcctggtcaaaggaggccttgcggctgcgccccaccacagtgctgcattgccgaagcgcggtgcccggcggccgcaggacgaggctgaggcgacagctgacggctcggggcccgggggcgcctccggccgggctctcggcgcggagcagccggaggcggagccgcccggttcccggacagtactcggcggccaggcgcagggcgtcgccggcgcggcccagagccacggtgccctcggcctccaggcgctcgggaaacgggacccgggacgacggcgggctcgtggagggggcccgggccggggactgggagcccgcgcggcgctccttgtcctcgttcccgctggagacggagcggacgcgggtcaggcggcgactcctcccagcccgcagcgcgcgactcagcagcccgtcggggacgcgcaggaggcggcagccgcggggccgccgggcgagcgcgtcctggggcgggcggggacagccgggggccgcgggggtcgccgggcccggagctcgcgggacgcgcagggtccccaggagggcgtccgggccgccgccgccgccgtaggtgtgggcccggggccggggcgcgggcgggcccccgagcaggagcgactccttgcggcgcgtgtgcgggctctcgagcagcgcgcagaagccgtaggcggtgcgcacac

SEQ ID NO: 477660 - DNA, 1000 bp, Homo Sapiens; identical to SEQ ID NO: 161288

SEQ ID NO: 477661 - DNA, 1000 bp, Homo Sapiens
caaattctgaaagtgtctgatttattttcaaaataaattatatcttgattcctttcaggttcatgtggcaccggtcaggctgcctcaaatgctatcacgattcaaggtttggggtgagtttccatgatcagtgtcctcgtccagcattagagaattgtgcctcctccatctagaggtctgcagagccacacagtctgcaggacaagcagggacactgcccaggtctccccgggccacctactccagggctggtctgagaaagctgagggcagggctttcgtcctctggctgaaatctagggtgcagtgctggtttgcttcctgggctccaaccctgggagaaaagggaaagctggtttctagattctgtgtaataattcttcacaaacagatataagtagagcaggccaggaaacgaagggggctgaacgaacaagcccaccgggggtggcccaaacataagcgcatccctggatctctcctggtgcttggagccctgacccaccggactacagaaagcccagactgtggagtgaccccaagggctccctcaggaggcccctgcaggagccctgggaaaccccatgccgggcctcacccagtcaagagctgtccccagctctatggctgccctgcctgggaggctgctgctggagtgtcctcctcctgcttccagctctccagctgggaagcaccatcacctacgtccttcagacagatcaccccctgcccccgtacgaaagcccacgggccgtcgtggctggagggatgctgacccaggggccggctggccccgcctcgtcctgcactgccagcctccttcttgggacatcttcctggggatccccctcaagtccctttccagaacacgtccttagtccaacgcacaggtgcgtaaatgtctgaactccagtgatgaggccgcaacctttcccacaggatccctgggccccatgcaaaaaagggtttggatgcacacgggtctccacatccagaacatt

SEQ ID NO: 477662 - DNA, 1000 bp, Homo Sapiens; identical to SEQ ID NO: 345788

SEQ ID NO: 477663 - DNA, 1000 bp, Homo Sapiens
gataccgcgaagaacagttgggatgaaagggatccatccattgcttcctttaagatggcctctaggcagtgggttttctgtaagtctggcacaaattctggagccaatctctggcaaggcagagtgctaggcgaggtctagggacccagggtctgcgcttgaagcctcccgctcactggaaattattgacctccagagatacatacattttttttaatttaaaggggaggtgcacagcacaccttcctccactgggagaaagggggcccaattcccactcccccaaacacacacaagtacacactgactaaggcacagctagggctagggcgggggcgggcagaaggccccttgggaggacgtggcgccacagctgcaatgggtgtgggggtgtggagctcatcaccgctggaggtgcgtgggggcaggagaagaaaagcctcagggctccccaggaaataggagaagatggtcgggaaataggcagataagaaaaccaacaggaaacctagaaaagaattgagaggaaagaaacaaaagagagagtggaaaaagagaaacgggtgaaaacaggttgtgggcaacagaacaaaacaagaaggaaacagcagaggaaagggaagaacatacatcagagaactgggaaagtgcgatgaattgggaaggaaagaaaaggggaggaggggagatagggaagaggaaaacacaggaaatgaatactcaataaagaaaactcagggggggcaggatgaagaggttggagaggcaaacggggccctttgggagtcttagaccttgacaaaaaccaggtgggcagagtacaccaggtcgcccacataggccagcaagttgacggccgtcaggttggtcacagccagtcggcggtcccagatacacacaaggtaggggtttctgtcgctgcagctcacatctctcgtctgccagggctggacaccatacttctcgttgaactggtagaggggccagaggacaagggcag

SEQ ID NO: 477664 - DNA, 1000 bp, Homo Sapiens; identical to SEQ ID NO: 345789

SEQ ID NO: 477665 - DNA, 1000 bp, Homo Sapiens; identical to SEQ ID NO: 345790

SEQ ID NO: 477666 - DNA, 1000 bp, Homo Sapiens; identical to SEQ ID NO: 345791

SEQ ID NO: 477667 - DNA, 1000 bp, Homo Sapiens; identical to SEQ ID NO: 161289

SEQ ID NO: 477668 - DNA, 1000 bp, Homo Sapiens; identical to SEQ ID NO: 345794

SEQ ID NO: 477669 - DNA, 500 bp, Homo Sapiens; identical to SEQ ID NO: 345796

SEQ ID NO: 477670 - DNA, 1000 bp, Homo Sapiens
ttaacaagtcagtgctttattaacctggcaaaggggcagctaggcggcctgagcagcccctgccagaccctcctctgcactcctctgcctaagtcacggcccaagccctggacacgtaggagtgtaggcgggcaggggcaaggccaaggaaggggtggagttgtccaatgcagatgttaaggtccaacccgacttccttactgagtctaggtgtgggggcccccctctcaccccttcctccctgcacagctctggctcttcctggagtcaggaggctgtgtgtcccacatctgctgtggtctggaaggtgatcccatccccaggcaatggggaggccaggaagggccagagccagacgagggcccagcggggccccagggctgcctgcaggttgtggcagggacccaggtcataggagtgctggccccgagcccactcccatgtggtctggccccgcagcagcagcatcccatggaagagcagcccagccccgcacagcagcgcacccgccacgcacgtgtccgtcacgaaggccaaggcaaactgtgccagagacactctgcctgtgagcaacatgagccagggaagcaggaggagggcagccatgtggaggggcgtgtgggctcgcagcagggccgacagtgcagggcccagcagcacagagacgtggagcaggacgccggcggcatgaagcagcaggcacaggaagggccggtagttgccgaagcccacgcagcggcccagcaggcggcagtggtggtcccgacgcaggatgcagacgcggcaggcagagcagtgtccgctgcgtggcggcacctggctttggcattggtagcagtaagcccagccctggcccagaccgcggccggccagcatcacgccacggatgctgggatccgagcgcaggaagagccccacgttgcccagcaggttgagcagctggaaggcggccagcgccagctgcaaggcccgggccaggggtcccagcggcggcggcccg

SEQ ID NO: 477671 - DNA, 1000 bp, Homo Sapiens; identical to SEQ ID NO: 345797

SEQ ID NO: 477672 - DNA, 1000 bp, Homo Sapiens; identical to SEQ ID NO: 345798

SEQ ID NO: 477673 - DNA, 1000 bp, Homo Sapiens; identical to SEQ ID NO: 161290

SEQ ID NO: 477674 - DNA, 1000 bp, Homo Sapiens; identical to SEQ ID NO: 345800

SEQ ID NO: 477675 - DNA, 1000 bp, Homo Sapiens; identical to SEQ ID NO: 345801

SEQ ID NO: 477676 - DNA, 1000 bp, Homo Sapiens; identical to SEQ ID NO: 345802

SEQ ID NO: 477677 - DNA, 1000 bp, Homo Sapiens; identical to SEQ ID NO: 161291

SEQ ID NO: 477678 - DNA, 1000 bp, Homo Sapiens
ttttttttttttttttttttttttttttttttttttttttattttcaaaatatattttatttctttcttacatgtattttgcaaaatttccaaggtaaacattagctccacatacagaaataaaagagttctttaagaactagcattgaattcatcacaagaatcatcaaattatgataatggaaaacaaacttgcctatgaccaaagctactgagctgaagtgaagagctgtctttacaaagatccctctcattaagcccactgccctgcagctgactcaagccatcatcatgtatgtacgtgtataagaaaggacactggccgggcatggtggctcgcgcctgtaatcccagcactttgggaggctgaggcgggcgtatcacgaggtcaggagtttgagaccagcctggccaacgtggagaaacccccgtgtctactaataatacaaaaactagctgggtgtggtggtgtatgcctgtaatcccagctactcaggaggctgaggcaggagaatcacttgaacccaggaggtggaggttgcagtgagccgagattgcgccattgcactccagcctgggcgacaagagagaaactctgtctccaaggaaaaaaaaaaaaaaaaaaaaagaaaggacattggcacagtacagcagctttgcaacctcaaagatggtttgagttttagttcccatgagtacatcctccacaggtattgggtgctttgcactattgacttagatgggtcagttctgaagtttgattaagacattctcttggagatacattttatataaatcttgtaatgtgctaaattgtcaaattgttaatggtactaaatactcaaggacattattttgtatggcccctacatttctgcatcatcgtcgtcgtcatcatcatcatctttggctctgaaatgcatttttctgaactctcgtctgctcattgaaggacaagatgaagacgcaggtgggaggtcctgcatgagctcaacgtttc

SEQ ID NO: 477679 - DNA, 1000 bp, Homo Sapiens; identical to SEQ ID NO: 161292

SEQ ID NO: 477680 - DNA, 1000 bp, Homo Sapiens; identical to SEQ ID NO: 345803

SEQ ID NO: 477681 - DNA, 1000 bp, Homo Sapiens; identical to SEQ ID NO: 345804

SEQ ID NO: 477682 - DNA, 1000 bp, Homo Sapiens; identical to SEQ ID NO: 345805

SEQ ID NO: 477683 - DNA, 1000 bp, Homo Sapiens
ttttttttttttttttttttttttttttttggggtctgcaagtcagaaaatttaataactcttcaaggacacacattaactgctacaaatgttgcaaatgtagatttagataactcaaatgacattgttctttgctccaaaaccacaaaatatcacaaattacaatccactatgtaagggctatacatacacatcacatatttataaattcttatccagccaacttacatacatatctcttatcctaagacctagacgtaaataaaatggtgaagtcatgaatgataaagctccatgaattccatcctcaatatgttcatgaacaacttggactccaacatttcgaagtcttgtaacatacataagtccatcatctcttaagagatcatgttgacaagtaagaatataggttagtggcaaattctgtaactgagaatcattggccaacaagggtaatgctctgctgtctgtaagtcctggcaatgaataactaagtcctccaagaattggttcagtatatacatagtcttttctatacttctcaggaagaagaatactccagttaacaaacttaaacagatgtcttgactccagaggcatgtgttggtttcttctcattgcccagggaagtgcttcatccttggtgaaatataagctcacgagttttatggctacatccctggtcaaaactataccatgctcattttctcggtgagatggcaaataagaatctgttatctgtaagccagggtaaagtaagacctgcatcttgattttatgttttatttcagcatcattctgcacctgttgagtgaccgctgttgctaaattgcccccagaactgtctcccgaaatgcagattcgggtgggatccactccatattttgtaagaattttttccaaaagaaaaaatttgactgcagcaaggccatcttcaaactgagcaggaaagtggtgttgaggagccagcctatagtccacgcctacaacaacagcatca

SEQ ID NO: 477684 - DNA, 1000 bp, Homo Sapiens; identical to SEQ ID NO: 345806

SEQ ID NO: 477685 - DNA, 1000 bp, Homo Sapiens
aagtttagctgccgtcggtgttgtaagaattaccgtataggggcctttccactggggggagagacctcttgcctggaggtcttttactagtacctgatctcctggggttattatggccggactgtctgggctgagtggtccgggctttggaaggctgtggtcggtgtgttctcttagcagctcccttaacagggtgaggtagggcaggtacgtgccaagaggtgggttattcacagggagctccacgattggcgcttctcgagagccaatttgattaggtgttgtttgacaaggccgttggcgcattccacttttccagaagactgcggatggtatggagtgtgtagcttccagttaacgccaagtgtggttgtcacctgtttgactattttggagataaaagcaggccaaatctcgggattatctgttcaatgagggttgaagctactacctctgctgttttatgggtggtagggcaggctttaatctaacctgagaaagtgtttactaaagtaagaagataactcgatgtatttgctttagtaaggaatagaaggaaggatggtagattatgggttcaagaaagttatatagtggtctaggcggcagggcagtgaaggcgtctggcggtaggtggagggagtgccatcaatccttataacagagattgaggaggggcggctgggcctgctaaaagatggcaaaacagagtaggtagcccttgtgtctagcaaaaaggaaatggacttacctgctacctgaagcattaccctgggctcggcaagggtgagaggggttcccgagcctgggcctcttcagtcgtcatccagttggaggagctagagggcaccttcgccatccagggaggggtcgccatgtggagccacagcggccgccccgaggctggggcagtctgacctccagtgctccatttgctggcagttagggcacgggtgtgttggcggcttggggtttgggcactgttttgcccaatgacctg

SEQ ID NO: 477686 - DNA, 1000 bp, Homo Sapiens; identical to SEQ ID NO: 345807

SEQ ID NO: 477687 - DNA, 1000 bp, Homo Sapiens
ttttttttttttttttttttttttttttttttttttttttttttttttttttgcagggaaacctgatcaaagcttgttcgggctctgaacacccctgtgcttagagaccctctgtaccctccccccccccgaagggtgtggcggttatggtgcagtgtgggtggaaagcccctggggaggccaatggctccagctcagcctctccaaagcggggctttgtccgatcccgcagtggccctgtctcaggttccctgctcccgacgtcctgttgcgcagggctggtgatggcgcagctggacgtgtgcacatgtcactcactacccaagcccaagcttgggatgtcactcagctccccaggcccgacctcactcggcccgggacatgcggtgcccagcgcagtcgtccggggcagccgtcgcccctgggacaaggccagctgggaggagccggaagacaaacgctgaggccaacgccccctcacccctgggaggggtggcgcatgtctgcgcgcgggggggaggcgggcgtctttggtgctgcggccccggagagcggcctggcctgcctggcgtccgtggggaggcgccggcggtcctaggacgcggagcccagcgagtccgagtgcagcgtggcgtagcccgaggactcggagggggaactcaggaagctgctggtgctgccgccgccgcccgccgcgcgcagccccccgggctcgccccacgacgcgctcaggccggggcgcagagagccggcgtgcgagtgcgcagaggggcgtggccctgggctccgctgggcgctgcttgggggcgtcggggcctctccgggatctgcgccgtcgggggcggcgggcgcagcggggaagggcccgggcgggcggcgcagggcctgtggctcgcactcgaaggcggtcagggcgaaggcgtcgggcagcagcgaggccgaggcggagcgggggccgggcccggggcggcggcgcgggctgccggggggcgagtcgcgg

SEQ ID NO: 477688 - DNA, 1000 bp, Homo Sapiens; identical to SEQ ID NO: 345808

SEQ ID NO: 477689 - DNA, 1000 bp, Homo Sapiens
atatgagaatcctgacatttattagcataataaaactctcaagatgaaattgcagttttccagacagtaatttcatttgcaggacaacttacaagggatttattttaaagccaggtaaaaaggtaaaacctaaaatatatgagacatgcagaaattgcaggccccaaataaaatgaaataaatgtgttagggatggaaaacccagctgttgtctctcacatattaattaggggtgacaggaacaacagcccagggattcagggtctcaactcatctcagtctgctttcaaagctgctgggagttcttggaacagaagttgcctccaacaccttgaaaatcatcacatcatatcccctgatacatcatgggctaagcactaagttgttattgttattgtggttgttgttagaaatacctttttcatttggacagagctttcatgtttatcatttaactaacccacaaaaaaacctagtgacggccatacagaaaactcccttttcagtcataccgaggtttactgaagttaaatgacttggacaaagtcacatagttggtaaatcagagagccaaaactaaaacatcattcctctgagtccatagaaataaggcaattttaatgataattttaatgataatcaatgaaggcacattagagttcagaaagcagattccttccatcatttcactttatgcatgtagtgagacaggtagaccgggggaagccatggagctgagtgagttgcaaaattgatattattgaacacttctgtataatgggttcttatcctggattccccaaaagacagagcctgtggcaaaagcttatgagctgctacttcattcagaagtgcaatcccagagcaacaggagagagcagggcaaggcagagaagaattaaaaacgggggcagcagggtgtcatactgatccggccaccacttggtttcatcatgactggttgctcgatcttacaggactgtcttctacaagaccatac

SEQ ID NO: 477690 - DNA, 732 bp, Homo Sapiens
caagaagttttctgtagtttattctacattatcaaaatttatagcctattaactgtgaatcaaagatggaaagaggaggatgaattgctctgaattgataaatttactccctctaaagaagtacatctaactgccgttatattaaggataaggatgaagactgatttaactgcttcctgctgacaggggacattgttttggggaaacggcagtcagagctccctcagaggcctatctaaggggtcccagcagaagaagccattgtcggaggctccagttgcaagaccatttggagtttgatggccaaccattgaatgtggtgccatttgtccatttccaagaatctccttgtttcctgcttagtccaatccagtgcatatcagttcctgcgtacctcttcaaaaattccatgtcttcttgtgtatcaatctgagcaagttctgctttctgcaaactacaaaatattttactggctgtccaatttctggtatcatcagaaaaatagaaacacttatctctcactccaagccagtcccctgaacatgccacaggtttagcatgcttggaccatgtggctatcataataatgcaaactgtagtaataataatactcaggaagcacataaggccaatcttccagttttgtatcaacttgggaactatccgatgtatgaagccatcagctctgccatcccgcagctctggattaatcatggcaaggcgctaaccgat

SEQ ID NO: 477691 - DNA, 1000 bp, Homo Sapiens
gaagagggataaaaatgttttaattgttgaaatacattggtgaattgagtaacttacattgcaatactaagtagatacacaagtcattatcaaattaatttccagatatcccactaaccatccatcgcaagtccttgaaaagttatagaaataatatgatgagattgtcgtgatgtagaatgagcaacccaaacagctatgaagtatttgtagttgcacatgcctttcacgaaagaaaataaaaatgtaatcaaaatgtgcatatggcatgcaaatttgagtttatttttaaatagtgcaatgaaatacaccttgttcctaaaaaaggaaattctgacatttaaatgaaatttgaaaaccaaatagtaagaaatggaaagagatagttgtaagaatccatttaccaattttacagctaaaaattaaagtgaagtagaaatagcaaaagataacagacaaatatattattttaggtcattaatttatagtgccttatcatcttaagttataaatagaataaggattttgttatataaaaactatcaaaaaagtatcagtgaaaagacatgacctccatgaaatgtgctgagtggccagggtggaaatgttgtcaaaatgcagcggccctggctgggcaacaacagcctccatgacagtttgttaacttgtctttcgtaggtggccacagaaagttccataaacaagtgtactgtttaaccaattcccttctattaccacaacaatatgtacccagggttttatgtatacacttaagatttgggggaatgcaaaagggaagggtgactgtttagaatttccttggaaatgtctgtgcacattacaacgtcccacggagccaaattccttccaaactgatgagcaagctcttgattcttgagtcatgatgttattttcttctaatttttccgaaccgtctttgtttgactggacaccatattgacagcttcagatggtaggccaacatatactcctccatagt

SEQ ID NO: 477692 - DNA, 1000 bp, Homo Sapiens
ccaaacagttgaaggagaaacaatttaatcagaaccaggcctgagctacattaagctgattctcatttgagcgtatttgccatcagactgcactcacaccttaatccaactggcacaaattaggcctgaggcctcttccactcactaaatttgcatgaaggtgtctttgacaggtccagttcatctcggcaaagagcattcaggcccacccacgtccagcacccttggagggctcctggccaggagaagcgtcctcaggccagccacggccagcaagagccttcagaggccagcctggggtccggaattggacctgaagccagcgggccctgatcagtgctggcaggagccaggtgtctggtctcagccacccccacccggcacccctcatctgcctcatctccgtctggggcacatctgcagatttcaaggggcaaacccaattccagggttccccctccggccctcacgggccactgatgtgtccccacatgcctgcatttcagcaaatagcgtccctcagagtgggggccaccatcgccctccaccaagtctcctagggggcgggggacgcagcttatacaagggcagggtggcaaatctgaattcacaagtgggatcccctgcctccttccttggactctgtatcagcttccccctggctaggggactcctctaagcctccagctctgatctgaacaggcccacccagcgccagcaccaaagtccaaagcccttgtccctacactggacccccaggatctgatgcctggtttcgtttctggcaccacctccccccacacccccacacttcccaccccagaccccagggccttgccacttcctgattctaactcactgtggccatctcctccccaaacccacctacaaaagcccagctctcccccacctcctgcaggaagccttcccgactgctcccactgcctggtcccattgctaactaccttatccacacaggagcctgcctcctcctctggat

SEQ ID NO: 477693 - DNA, 1000 bp, Homo Sapiens; identical to SEQ ID NO: 345810

SEQ ID NO: 477694 - DNA, 1000 bp, Homo Sapiens; identical to SEQ ID NO: 345811

SEQ ID NO: 477695 - DNA, 1000 bp, Homo Sapiens; identical to SEQ ID NO: 345812

SEQ ID NO: 477696 - DNA, 1000 bp, Homo Sapiens
ttttttttttttttttttttttttttttttttttttttttttttttttttttttttttttttttttttttttttttttttttttttttttttttttttaatacaagccaaactttgttaaggtttattgttctttttgtattaattgcatgctgaggaaaggtactacaaaaggaaaatgaacacctgggaccccaattcactctgccaaaggaaaaaaatcaagctgaaagctgagtcaagcaatgagctgccttttcttctgttcctaagcagacagcgacagataaaaggttcaacatctccacaggtagctggtagagtaagagggagaaagaagaaatggtaaagtgacatgaaggcaagacggtgttccgtgactccgtgctgctcctgtccctgtattggattccagcaccaggggcctgtgtctactgctgcactgttgaagacactgtcacggttatcatggttgattctggatctaccaaagtagtgctgccttgaccggggcccagttctcattgccacaccagcaacttccagcacctgttaacatggaatccttacctctgcctcctgccatctaatctcctgccagggcctctttttggcagaagctagcaagaagcctaagaaaatgtaagggagtcagagaatgaaggttgcagactttcagcttcagtaaagagcagaacatggaagtgggtatgtggggctgggagacagagccgctgaaggtcttaatctgaccaccatgagtctgaattccctttgcccttcatccttgtattcaccagtcatattaaaagtttaagcttccatgccttccactttctctttcacagcatttcctccacaatactgtgaactgccttcccctacccaaatccaagatcctcctcagtcttgaaaccttcccactgtgcccttaagagctgctgctccatatcctagatctgctgcctcttctctgagcgttctgtacttacgaatggaac

SEQ ID NO: 477697 - DNA, 1000 bp, Homo Sapiens
cagttgcgaaatagcaatctattttgcaatatcagctcctggtaaatttcacttgtgagcctggaacaaggatgggggtggattcaaggaccgccccctgaggtggtgagaagaccagggattgcaggacattgtgagattctttctggggcagctggaaggatgcttggttgcccagcgacaatcctgcctccgcagcagtcttggtttcctgcagtcccggatgcatctcattaaaaggacagagggatggatggccgacacattttctgaagtggcattttcaacgtcctgagtcctggtatcttgtttataagtggcacttacaaaatacaagggaaagaaaaagaaaacgggagaggaagaaaggtctcctaggatctcaagcatgcagtgcgtggatcttgactctccaatttcagcttgtctaagagacggggtgcagggcctccttgaaatccacctgaaatgaattagcctgaagtaaaagtaggtgtttatctcaagtcattgcctcaaatagctgactacctgttggaagaagggtctgatcgatgcaaaccagagcagtcgtgcgtgagctgttacacagcggttagtatcgatcagagctaaaggctgccgataggaatgtggaggaaactgacaggcagagaagagggaagaaggaaacagccttcgctggtggcagccgtacagaggaaagccgataaaaagtcaattccacttaactgaatggctgctaactaaatatttttggggccagagccttcccaggtagtagctggagcatctctgttccggaactgagacatcaagcgagagccgggcatcgacaggcaagatcactggtccctggtgatggatgggggaagaagagagcccctgaatgcagagatgggaggctttgggctcagccgagctgactggggcacttgaggacagccactgaccacggagcactctatgcaactgccgctttgtgcctgagctggtggcg

SEQ ID NO: 477698 - DNA, 1000 bp, Homo Sapiens
ccagcaggcaagaaaagaatcattattgtgcttatggacacagcagctccctggctctgagagagcgagcaggcagtttttaggcactaggagatttctgtgatgcggttctagatgaatgaatgagaccgagtagcctatccggtcagcccactgattggacccgctggccccttcaaacccaggcagcttcagaccacagtcaagcaagggtctctctgctgacagaacctgcagctgagtcccccggatggggagaaggaggcgcgggacggaaagggagttggtgaaggtggtcgggggtgagaatggggcctagccccctcctcactccccactgattcttctggaggagcaagagcgattgctcttggtcctgggtctaagtgtattggaccaggccatcggggctgtgtccccgggggtatggctttttgggcaaaggtggcccacccccacttcctacagaggggacaagggaagggagagtggcaaggctagaagctctgctcctggcccctcccggcccccgctctgctctgccacgcccagcagccccggccctgccccgccggtcacacggtcacttcggtcttgctggctgtgtagcaggtgtggtggcccgggatgtagtgcagctgctccaccgtgttgtgtctgcgtgaggcaaaggcatgacgcttggctgccgtctggctctggcccagggtggcgtatgagttattggaggcactgggatgagagtgcatcttgctcatgcggtagcggtccagcacgggtgtggacacaaagacgtccgtgtgcgagatggccctggacagcgactgctcgggaaaggccgtccgctccggggacagcagcgggtcctgggagtgcaggcgctccgtggagagcagctgctcgtcggacaggatgcggtcgtagggcatgctgaactcatctggcaggccccgatccggggacaggaccctgtcctgggacatggcccggatgggccggc

SEQ ID NO: 477699 - DNA, 1000 bp, Homo Sapiens; identical to SEQ ID NO: 345813

SEQ ID NO: 477700 - DNA, 1000 bp, Homo Sapiens; identical to SEQ ID NO: 345815

SEQ ID NO: 477701 - DNA, 1000 bp, Homo Sapiens; identical to SEQ ID NO: 345816

SEQ ID NO: 477702 - DNA, 662 bp, Homo Sapiens
agatggtaaatgtgggggattttattgccgatgaaagtggctctcagcgggaaggggagctggaaaggggatgaagcaggaaggcattcttcccctgaagtctggccatccccagctgggctcctctccaaagctatgtcattgagccatccctctgaagtcaagttgcttctctccgaagttcaactgtagtctccgatgtccagctgcttcgtctcttctccccttgtctgccgtctgccagtggagcctggggtttttatgggtacaggacgtgcctcctgttcctggtacagctccgggagatgggagataagtgacactgagacttcatacccagaaccctcaacttcacaagaaacttctgctgggggccaaaagactcgggacagcagagctcaaagcagggccagaaggtgcaggtggagccacagcggcgggtctcctttaaggataagatggcatcatcataacagcactgctctgaagggttgtagatcttgttcccacacctgggtgtcggctggcacagccacagtcctgagccaacaggagcgtctgtagttccttttgaacactggaggaggaagactgttatccagcagacaagagccaagatgcagcatcgtggcctcatgcttccaaagatgctctaggagaat

SEQ ID NO: 477703 - DNA, 1000 bp, Homo Sapiens; identical to SEQ ID NO: 345817

SEQ ID NO: 477704 - DNA, 1000 bp, Homo Sapiens; identical to SEQ ID NO: 345818

SEQ ID NO: 477705 - DNA, 1000 bp, Homo Sapiens
acttttaacaaaagggtgtgagggcctctcacggcccccttggcacactcaatagtggccgaaaggtggtgtacaccctggccatctggagtcacacttgggggcggggggaggggaagagcagtgagggccttaaggttctcctccccaagcctgacccagggctgggattccagggcttggcctgcagccctggtatggacgcatgcaatgatggacataacaggccctacctgcagtccctacctcctgctaatcctctctgtacgtctgggtcacacattgctcagcacttgtccagaacgctggagcttttgccccagtcgggccgtcctcctgggattcccgatacattttctggcctccgcaggccagagtcccctgtgccttttacagcccagagggaacagcatgctgtccccacctcccctgggctgtagctgcttctatgccacttgggtagcagaggcccttcagggtcggcccaggcctgcaaactggactgcccctcctgtgcaggtccacaactccaccctgaattggggaccagtgagctctccccagatcgaatggccttagcctctgccactgtctggacactggctcaagtcccttgttctggacctcagtctccccaccggtataatggggttcacatttggggccaaggtgccctagggaggtgctggagaatccactgccaggtcgtcctctgaagacatgctgagtgcatgtgcaagcattggggactgtgcaaccgggtaccctctgctcctcacccacccgccctgccgcccctgcctgctcgctgcactccaggtcacagttggcacagcgcaccgcctccacgccatcccctgagctgtccaccaggaactgcagcagccggtccaccggcgggagcccgctgggacccttcagcaccgtctggtgttggcacagcgggcaggtgaggcggccgtcggtcgcgcggccacgcaggcagccggcacagaagtcg

SEQ ID NO: 477706 - DNA, 1000 bp, Homo Sapiens
cttcttcaaataatgtcttttaatgcgcaaactagaaagttcaggattacaaagaaaactggttcttttcacatacggttatccttgtgatgtagcattccgcttgacattggaagtcgttcgatatcagagagaaaccatatctacgaaactagagaggctgctcagatgactacaaaccagccattcttacttgttttatcactgggagtgttataaagatggtcgtccagtttcatgattcttgcagggttttttcaaatacagcaatgtacaaaaatgtgctgctccagcagagcacactggacacgcagacatggtgccggagtttgccatctcttccactgccttctctagaccttggcgcttacctcatgttaacagtttatatgtccaaatgcatctctgctcccagtgtaaatgttaggctgaggtggaaggattgattgagcccaggagttcattcaggtccagcctggaaaacacagcaagatgtcctctctgtagttccagctcttctggaggatcactagtgccatggttgcaggggcggtgagtttgcagtgacatgagatcatgccactgcactccatcttgggtgatagagtgacacctagtctcaaaacaaaaagtacgggaggggagaaaatttgttgtgtcagcaagtaaatgaagaaagggacattattagagttgagaaataaactggaatgtgatttggtacctctcccgcagaagataagtttgctaaatgtgctgaaattagaagcattgtataaggccctgtgcagtggctcatgcctgtaatcctagcactttgggagacctcggaggtgcccgagcccaggagtttggggaccagcatgggcaacataatgaaaccctttctctacaaaaaatacaaaagttagctaggccttttggatgcgacaactgattgtgccacagagacacaaccctagtggcttaggactctgggaagatataatctccgccgttt

SEQ ID NO: 477707 - DNA, 1000 bp, Homo Sapiens; identical to SEQ ID NO: 345820

SEQ ID NO: 477708 - DNA, 1000 bp, Homo Sapiens
cgtttgacagatgtttattggctcacatagctgaaaagttctgaggtagctctgcttcaggtaaagcttggtctagtggctcaaaagatgtcaccaaggacctagtttctctctgtttagtcactgttttctttggtattggctttatccttaggctccatatggtagcacctggaagcttgagaatctccccttttaacagaaaaaaaaaagttgctataattctaggtctcacattctcctatgtgccacacagaggacagataatatctcctctggtagctctcgatgaagaaaagcctctcttttccagaagagccagtatctcctcatatcacaatggctctgtggccaaggggatgggataaactgattgacacaagccaaacagggtccactcatgaagatggtggtggtgccaaaccacatagctgagaaaggatagcttcccaaagaatacccgggtaactgttcccagagagaaggggaagagatgatggaaaccaataaaagatgaccacgtctaaaaatgttgttttataaaactcctgatttcaagtagaattagttaattctataattctttactttcctgtgtagacgctacatgttcctcgtgtttgttttatctttggtcctggacctagggagggcatttctggctctgatgccaatactggattatgtgaaaacttttcaactattgactggatgaagctatctaacaaagcattaaccaccaccagaaagtgaccatttctccctcccttggcagtggcctcacagcttatcagaatgtagactatcatggtagtgagggatggacagactggaagaggatttaggataggaagcaatgagagggctggaactatataaatttttatgaaaaaaaatctccagttgagtttacatattcccaatcccagaatgatatctcataaaacaaaggcaatgaggtctcttaagacctggattggccaggcgtggtagctgaggc

SEQ ID NO: 477709 - DNA, 1000 bp, Homo Sapiens; identical to SEQ ID NO: 345821

SEQ ID NO: 477710 - DNA, 1000 bp, Homo Sapiens
gtcctttctgggccaactgctactaacatatagatggcaagatgctgttaaagaataaatcagaaaagcttcttaacaacacaacatgcttcctgaagctagtgcttgagttataacactgtgttaacagcaagttcagatacatttaaaaacttttaaaatgtcaactgttgaggttagtgatagtgctctgtattattagatataagcccagttcaagtcataatgcaaatcccatgcttctccattcttgcacactgaaggtccacttatcagttctagaatgttgaagccctgagtcttcagggaagactgttctttttcactagaagaatctcacatgctccaggtattatatgaggtaagattttggcattactggcagctcttcatatcctgtggaaaatgatgttcctgtcttcaattgagggaaaccactcatttatcttattaggaagtatcacaagcagtttcccttgtgagtaaggaataggtgctgtctgtcatttgctgtgtcttcttccctcatggtagagagggtttggtcctacgtatgtaaaggccacctcaggatattagatttgtctgggtctgaagggcttcttgacatctagcaaaagcactaatccaaagtaaatgaatttaaacaatacaaaatacgcaggagtatcagctctgtgtgccatgtgtataactcatggacaatccacactacataccggtctttgaggcaatccaatctcgatacttagttactctggtgtagactccaggttttttgggaagcgcacatgattgtccccaacttactatacccacaatgtaccagatgtcatgattatcataaaccagaggtccaccagaatctcccttacatgcatctatttttccttccatgaatccagcacataacattcctggagttatcaggccatcatacacatcctttctgttacacacatcagtgcttatggtttccactctggcttgccgaagtgta

SEQ ID NO: 477711 - DNA, 1000 bp, Homo Sapiens; identical to SEQ ID NO: 345823

SEQ ID NO: 477712 - DNA, 1000 bp, Homo Sapiens; identical to SEQ ID NO: 345824

SEQ ID NO: 477713 - DNA, 1000 bp, Homo Sapiens; identical to SEQ ID NO: 345825

SEQ ID NO: 477714 - DNA, 1000 bp, Homo Sapiens
tagatcagcataaaattttcagagagaatccaaagaacacacggaaagaccgagtgaggaagtgtccaggaattcggctgagaagctcagcagcctgtgttcagcagtctacccgctggcctggaaggctttttccagagtgggttgaccttccaaagtcagtcctgggggaggagtccaacttggcctgcttgattgacggggccccagcactgaggaggcgggggcaggctcgagtaatgaaccattggctcttcctgctgtcagaggtcccagagagataatactgccgtgatgagacatcaggcatcccaaaaagagcaattaaaactcatgtttggaatagaaaatgaggtctttcaaagcacgtcactgtcatgctttctgcagcaaatacacaggtcgttcttaacacttaatgggcagagccatggaatcgacccttagcctggagtctaaaaaattgtcttgtaatttgggcttgtcttggcaggtgagggcttgagaagaggcagggtgagcctgccctaggaggagaaggaggaggagaggaggaggctccaggtagagggtcactggggctaagtggagactaatgttggctaacctaaaaggggggacttttaccaaaaacaattagcctaagacttgaatctgagctccttgaagcagaacctgcataaaaatgggggaatgtcagggttggggcaagatagggagtccttctgggaattttccactatgtcaagatggcttcttgtggcaggggagggaggggctaggggtgggtgtagttgcccatccgcagggtcccctggcgcacggcacactcttcccggtgggcttttaatgctctctggcgatcggcctccgtggggaacgtatcaaggtggcggcccaccttctggaagtgaggcatgtgccagagggtgtccagcttcacgggcggcttgtacttcctcagctgactgctccgggtctcatacagcttcccaaggac

SEQ ID NO: 477715 - DNA, 1000 bp, Homo Sapiens; identical to SEQ ID NO: 345826

SEQ ID NO: 477716 - DNA, 1000 bp, Homo Sapiens; identical to SEQ ID NO: 345827

SEQ ID NO: 477717 - DNA, 1000 bp, Homo Sapiens
gccgcttcacaccgtttttattgaccgatcgcagcccagcaagattgatcgagctggaatgggaagggacttctcctcccccaggcccagctcgccagggcctcgggccgtgctgcagtttctggcctttggtgtcgctccccgccccccagccccgcagattcccggcttcttttctgtctgcgcggccgggaccgcccaggcaggcgccggggctccggggctccggggggagggactcggcggctcggctcggctccgcttctttcttctgcctgcaaatatttgctgcctcgctggaaatccgacgatttcgcgcgcgctctgcttgcaaagtctttaagtaaacacgctcaaatgaccgccccgggcggcccgaggcacgctctctccccctccgcgggattagtaactttaggacttcgaccccggggctccgctttgcctgttacccaggtcgggcagcgcgcgggcgcccggggccgcttctcccggcacctcggccccgcggagctcgcctggaagcgccggttgcctggctctggtgggtggcccggccgcgagcatctccgcgccctgggtctgtagccctagggctgagccccagaaagccgcgcctccgctctgcgccatggcctctgctttctgtacccgactgggtttccccacttccactgggacagggtctcttcgcccctgggagggcgggtgggagggacttgcacgtgggcatgtgtttgggggtgtgtgtggtagcttaacccctaccgagtggagaaagtccggctccatttctcaccttttttccaagaggacacacataccccgctcaacttgacgcctaaagcagccgcttccaggcctggggtttcggataggccaagccggctgctgccgacccgcacgccgccccgggccccggctcctctctaggcggtggccgcgccgtcgcctgctcggctgcgggatgcttgctcccaaggtcccaggcgtccaggtt

SEQ ID NO: 477718 - DNA, 1000 bp, Homo Sapiens
atgtatgttatattggtctttatttttagcatttcattctattaaaataggttcaagggatactttttaaatgtataagctaaggaatttattttcctttcctggtcttctttaattgtattgcttatggggagtgtccccccaagagagattgcgggttggttgtgagtttagttaggcgacatcatcaccttcaacacaactggcactctgctcacctgcttgtggagggcagcagcagagatggcacgtggagttaggagccactgctgatgaaacatatgaccaggggccaggtttatcccaactcctggctccttctctccatgttcccccgcctccttccttctccctccctctctgtcttacgcacacacgcacacacacacacacacctcactcttcagcagggccatgatgagtcagctctagggacagtcaggagccctgctctcatttccagcactggtggcagctgcagtgaggggccctgcaggcagatcaggaatacctgcgtggctggggcttaggattgctaaaccagcctgtcccactccaaagtaacagtaacctgtctccactctcttcctgggaaggacccctcccaccctcccccaaaatgcagggaagataggtacccccatcaacaacaaggtgggtaccccccccccaccaacgtctccatctccagggagtcccagatgccacaaagactcagggcatctgactggggcacttaggtcctctaaggagtacagaggccaaaaaattcctcttcccagtgactgggggctccttgtccttcacaaagataccatccctaagaaggaactgggtggggcagggttcaatttacacgggaggctgctgttcaggagctctgaacacacgcacagctttggctcaaactgtgggtttggaggggaaagagaccaaaacaagtgtggccttccatgagcctgtgtgagtgtgggtgtgagtgtgggtgtgggtgtgagtg

SEQ ID NO: 477719 - DNA, 1000 bp, Homo Sapiens; identical to SEQ ID NO: 345828

SEQ ID NO: 477720 - DNA, 1000 bp, Homo Sapiens; identical to SEQ ID NO: 345829

SEQ ID NO: 477721 - DNA, 1000 bp, Homo Sapiens; identical to SEQ ID NO: 345830

SEQ ID NO: 477722 - DNA, 1000 bp, Homo Sapiens; identical to SEQ ID NO: 345831

SEQ ID NO: 477723 - DNA, 1000 bp, Homo Sapiens; identical to SEQ ID NO: 161293

SEQ ID NO: 477724 - DNA, 1000 bp, Homo Sapiens; identical to SEQ ID NO: 345832

SEQ ID NO: 477725 - DNA, 1000 bp, Homo Sapiens
ctaccagtttcttttattatcttaaatctttcactctcttcttatcatttttgcaagagctctttatctattaaaggaaattaacacaaaaaaaagaagaaaagaaaagggagaatggaaatggtatagttacagatcaatccatttgagccatacagattgaaaaatactctatattttcattattctaaataacagtggcattgctttacatttacaatgtattacttaaagtcacttatttgaaaacaaatcaatggcagtatacttgagaagcatttctgaaaagggtcgttagtggtcaatccaattgttaaatgaataagaaaatacaagttgacttacaaagaggttatacattgccatggtacggtatcgctcctggacgtccctatatctgagttccatgactagagatttacttctaatttctgcaattgttgcaaggacaaacttgagatcttcaagggtattggggatcttcctaaggtttttggccaggtgctataacagaaagtacaaagaacactaagcaaacacagaaaaaacagtaatggcgcaaatgaagacccaacttacacgaaaagtagtttcaattacacacagcgattgagtacctccatctcttcatggagattatagagctcctcttttgctgactcattgagaagttttccaagcgaaatcacccaggacttggcattttcctgcactgtgtttgccagatgcctgagctgaagtctgatgcaatgctcatccttaattagagggtggcgcataacctcataagctatcttggaatagaactgcaacttttcatcatatgctacacaaggaggtttcttggcagcaaatttctccatcacaatagctttgtccaatttccagagaggtcgataccgcttccatttttgtagatacttcataagattgatcagaatcctgtggacattttgggggatcataacagcttgttcaattatctgagggttcagagaga

SEQ ID NO: 477726 - DNA, 1000 bp, Homo Sapiens; identical to SEQ ID NO: 161294

SEQ ID NO: 477727 - DNA, 1000 bp, Homo Sapiens; identical to SEQ ID NO: 345835

SEQ ID NO: 477728 - DNA, 1000 bp, Homo Sapiens; identical to SEQ ID NO: 345837

SEQ ID NO: 477729 - DNA, 1000 bp, Homo Sapiens; identical to SEQ ID NO: 345838

SEQ ID NO: 477730 - DNA, 1000 bp, Homo Sapiens; identical to SEQ ID NO: 345839

SEQ ID NO: 477731 - DNA, 1000 bp, Homo Sapiens
ggggcttaagcaacagaaatttatttatcacaattctggaggctaggagtcaagatcaaggtgccggtgaagcaaggcttccctctgagtccccttctctggcgtgtgggcggctgctgcctcgctgtggtcgtccctccatggggagggaccccttttcctcttctcataaggaccccagtcccatcggttcagggccccatctttacaacctcatttaacctcagttacctcctaaagaccctgtctccaaacacagtcacattgggggttaggaatgcatttgcagggaattcaaacattcagtcaatagcatggagagaggagaaagagacagggagagagagggagaggggaaggagagggaagagaagatggggcagaccccgtggcactggtgcaggtccggacggctggtgtgggcagcctggccgtgactccattgcgacgctgagaagctccttttcactttgggtagctcatcctcacctctaaaggaggtgagggcccacctgcaccttttgaagtagcaacaaacttgcagacagcagctctccagtgcctccctgcttttacactgagtgacgcagcagcccgggaggggcactgccactgtctccacctgcagacaaggtcagggaagtgaactggctgcccacagccccacagcttcgtgtggtctaagcagtagggagggagctctgagggggtggaagatacaatacagacctgaaggaaactcagaactccttggcacagcccatgttgacaagctgggcccccactgggggtccttcctgaagcctccccaaaacctctgagaaagggccggctcgatgggtgtcccttgcagtgagcacaggtcctggaagctggcccggagacggagcgtgcaagaaagcactccctggacacacggttacccgacaaagttgcctgagttgggggcctctgtccagcctgggcgtgctggatggagaagcccatccagctcttggct

SEQ ID NO: 477732 - DNA, 1000 bp, Homo Sapiens; identical to SEQ ID NO: 345840

SEQ ID NO: 477733 - DNA, 1000 bp, Homo Sapiens; identical to SEQ ID NO: 161295

SEQ ID NO: 477734 - DNA, 1000 bp, Homo Sapiens; identical to SEQ ID NO: 345843

SEQ ID NO: 477735 - DNA, 1000 bp, Homo Sapiens
gctttctttcccccatttatttcattaaccaaaattattgtctgttataaaattataaatagagggtgggggggaatgaagttagtgaatgggtacaaacatacagttagatagaaggagtagttctaatatttgatagcagactacagtgactacagttaataacaatggattgtgtatttcaaaatagatagaagacagaacttgaaatgttcccaacgcatagaaacaataaatatcccagctgatgagtaccctaagtgccccgacttgatcattacacattctacgcttgtaacaaatacacgtaccccatacatgtgtaaaatatcacatatcactaaaataaaacaagtagccaaaatcaaccattaatattcaaccattaatactgctgactttgctccatccaaatactataatttacgtaaacctttcaaaataggagaagctctcctgggccattccaggggcaaacggtgcccttaatccctaatggttactttaagtgtttgaagctattaaaacagttgaaatgttggcaatgctaaatatggttacaggaatagtatggaaacttgtattaaacatttgatttttataccttttttgtgtgtgtggagtgagctaggaatagtgcattgacaaatgaacaaccaccagtgacttgtgtacaatcaatgtgaacacgtttcaattgtcagtaacaaaatgatgctggccctccagctgccattttctaggtctgccacaccagacaccaggacttaactctttgcccatccatcaaattacgctctcagatttcgcatgcactgtagataaacgtgtaagaaaggaaatggtttaaaagcacaatattattgtagacagacaatgccctgagtgaaatcacatgtgggtgacttaagacagggccctaaaccggctagaaaaaggaagcaagtcatgaacagttttatgtggaggggtttggaagtcttgatcaccattcaatgat

SEQ ID NO: 477736 - DNA, 1000 bp, Homo Sapiens; identical to SEQ ID NO: 345844

SEQ ID NO: 477737 - DNA, 1000 bp, Homo Sapiens; identical to SEQ ID NO: 345845

SEQ ID NO: 477738 - DNA, 1000 bp, Homo Sapiens; identical to SEQ ID NO: 345846

SEQ ID NO: 477739 - DNA, 1000 bp, Homo Sapiens; identical to SEQ ID NO: 345847

SEQ ID NO: 477740 - DNA, 1000 bp, Homo Sapiens
tgtacataaatgttcatagaagctttatttgtaatagccataaactgggaacaacccaaatgtccatcaacaaaccagtatacaaatgaatactattcatatgacggaagagtatttataaacaaaaaggaatgaactcctgcaatacccaataagatggatgaatttcaaaatgatatcttttgacatacataagaacttaatatttaataccacctaatcaatttattcttacatgagttctgcctctattgttatatttataagaatttccttgctcttaaattgaatatttgaccacacaatcttttaatactttacttttacactgtcattttaaaaccatctagaattaattttggtctaagacataagttagggaatgggcattaacatcttttcttatctggtttgctagtttttaggaccgtttttaattatttaggcctgagtgttttggtttgttcttctcagatagaagtcagtacgtgtcaaataaatgttatataaaactaatgggcatcgaactgtaagaggaaatttatgcataattctgctttccaaccaaacaaaaaagtcataattttcatgagttttgtatcatataaggagacaattttgacaactatagcataaatgcaattttgaataatgttattatgttccattattctataaacattctatttgtttgtatttatagatggcattagtatatatttcaccatttagattttttcattttctcagcattttaaataatattatatggaaaacctttgtgcccataactttgtgctttctcttggataatttatgatgagccaattcccagaagtaatgtttagtggattaagcaattagagttctgcttctctgtgcttatttccacacagcttcccaagaggattatgccaatttgacaccatgagtaggcacgtttgagtcaccagcatcatgccatccttgcttttggggtgtactaccaatggtggctatg

SEQ ID NO: 477741 - DNA, 1000 bp, Homo Sapiens; identical to SEQ ID NO: 345848

SEQ ID NO: 477742 - DNA, 1000 bp, Homo Sapiens; identical to SEQ ID NO: 345849

SEQ ID NO: 477743 - DNA, 1000 bp, Homo Sapiens
cattcaagagattatttattgaatgcgtaccatgtgcctggaagtcagaacctgctctgtaattttccaggtccagcataaaatgaaagaggagggtcttgtccaaaattttgttagagtttcaaaatagagacagcagggcatgcagctggccacaccgtcagcattttaggagtcagggacacaacggtgacaaaataagcatccctacccttgtagagctcacattctagcaagaagagatagaccataaaccaaatcattttgtttatgcaagacatataaacaaatatatcagaaaaatatatagagaatgttagagagtgattagtcctagggggaaatggatgaggaaaatgggcaagagagtggaggggtggggttatttgattttaatgaggatggtcagaaaggcttcacagagaaggggaatctgagcgaggacgaaagagacagcggatgagctgagcagatagctggggaaaaggcttcccgacaaagggaacagcacatgcaaaggctctgctggcagcatgcctggtgtgtccaaggaagagcacggggcttggagcagcactagatgaagtcaaagaggtagaaggtctggaggactcgagccaaggctcccgcaattgtgcaaggacacacagggtggcctgacgcagagtgagacagcgaggtggcgagaagtgagtagattctgcatgtctttggaaggcagggccaaaggatttgcctacacattgaatatggcatgtgagcaatagagaggggtcaagaaagctccaaagttgggggactgaataaagcccaaagaagaatcaagctgccattgctgaggaggaggtggtggggaggagcagctctgggggcatcacaggggctcagtttgggacactttaagtctgagatgcctcttagtggttcaaatagaggtacagggtagacagagagaggaattttggagttgggggaggggacattcaagcaggaggtacaa

SEQ ID NO: 477744 - DNA, 1000 bp, Homo Sapiens
agaataaatatgtgctattttattaatgaacataaatttgaatatttagggaaagatgcattttcaaggacttttcgggcatatgctttttaaaaatagactttttttagagcagtttaggttcgcagccaaattgagcggaaggtacagagatttcccatacactccctgcccccacacacgcacagcctcccccactatccacgcccccaccacagcggtgcagactttacgacagatgatcccacattgacagaaggcttcagagtgagtgttgggcattctaggggtttggagagacgtgtgatgacctggaccctccgtgatggcgtcacgcagagcggcactgccctgaaaccctctgcgctctgcctgttcctcctcccccagcccttggcaagcactgatccttcctctgtctccacagtttaggcggatgttttttaatgaagcagttgatcccaaggacaggtcagacccagggccagcctgaccctcagcgtcttcctctggatgcgttaccctccacctccttccactcttcctcctccttctccagggacctcacacttgggcactgcttggtcttcaggtccggaggttgggctggcggagaagccaggcccggggagtcctaggtgcttgggaattattcaggagcaggaaaggcctttgtggggttcctgcagccccactccagtgacttttcagggggcttcctcagactgtgagagctgagggcggtgttgttaccagcctgaatgcagccacctgatgtccttgaaagcccacttgctgtaccaggggtgactctgtcagtgagatgctgattagaggacacaggcgtttcctctcgatcaggtgaggcccagctgggctctcctggccagcagccaggagcaggagactttgctgcctgtcggacttctgggcgccaaagccgcaggctaatgccgcctggtgggcagtgaaccctgggctcatgagaccccagcaccgc

SEQ ID NO: 477745 - DNA, 1000 bp, Homo Sapiens
ccagtttcaaggtaacagatgcacatcatgagaccagaggaggcagagacaaggctggatttggcttttctaagcaacacgtgttcctgcgcagggctgaatggtcgctgagacagagatggaagccaggacaagggagcctaccgggcccagataggtacagagagcagaggctcctgttctgtcctcgccacccacgagggtgacactgcttgtaaatggtggctgtgctctcccagcaagaaaaaagcacaactaaatccacactgcacacagatgcagacagaaagccttcaagtggctctgttttctgctccctgccttgccaggtccacaagcagagaggagtgtcaggcacatggccccgctgtcaggctccccagtgagctgcgggctcagcaggagctgcccactgacatacaggggacacccactcctgccaccttgggagcggttgccagacagagccgcactgggtgctggtgtcatccagggaccccacacacttccttaaatgtgatcctgcttccctctgcgcagctgcatcctctcctcctgcaggactgtctggaaacttggctctcagtttgctctcccttctctcctctgcctgccccaaacccctctttctaaaaaagtgatgccatgttcatggggttatttcttgaaaatacttggcggcctccatgcttctgttttctttgagccaggtggtcaggagggcttacaaagaatgcctgggctcccccgcaggtgccggcagatggggtagcgaatggtcctgtgcctccacctgctccgggagggagtctcccgtctctaggcctggccccttcctaaccctccacgtatcctgttctccagagacttcagaacccactcctgagaacagcggagccaggcgcttagaggaagaccaaatgctgccaggacacggattgtccagggattacattccagcatcttattaggtatctggatctgggacatgacctccaag

SEQ ID NO: 477746 - DNA, 1000 bp, Homo Sapiens; identical to SEQ ID NO: 161296

SEQ ID NO: 477747 - DNA, 1000 bp, Homo Sapiens; identical to SEQ ID NO: 345851

SEQ ID NO: 477748 - DNA, 1000 bp, Homo Sapiens; identical to SEQ ID NO: 345852

SEQ ID NO: 477749 - DNA, 1000 bp, Homo Sapiens; identical to SEQ ID NO: 345853

SEQ ID NO: 477750 - DNA, 1000 bp, Homo Sapiens; identical to SEQ ID NO: 345854

SEQ ID NO: 477751 - DNA, 1000 bp, Homo Sapiens; identical to SEQ ID NO: 345855

SEQ ID NO: 477752 - DNA, 1000 bp, Homo Sapiens; identical to SEQ ID NO: 345856

SEQ ID NO: 477753 - DNA, 1000 bp, Homo Sapiens
atatgcataaaggaatttaattaactatgtttataaatgaagttgagaatttgaattgttcaactcgaattaatataacaatagttaacttcttaaacatgattgcattttatataacatttactacatttatagacaggttaatatttttgaaaaggcaggtttctagatacataactgggttatatcaaaggttcacggaagtatatgactataaatgggttttcctttggcaggaaccctgctgcaggcgtcagaaaatccgtgatggatgggaggggcgagggctaaatgttttactctcctggactcacaaccaggtgcttcgattacacttgtgaaaataagtgattaaaaacaaacaaacaaaaacaataaatacctatcatgagcatccccctttcctcctcagaattcccctgagactccccacaggctgcaaggaaggactgaagccgcgtggcccaatgactcaggctccggccgacttctgagaccgtctctgcgttctccatgattcaacaatgccagctgattcgtgggctcctggacactccatgccatttcctctgctggagcgtctccacccacctgtctgcttgttaagttgcccctccaaatccagcctgaagtcacctcctccagaaaggcttctgggaccctctcacctgtgacagtatacccctcctccatccctgcctggcttcctgcagacttgagtttttgattccttgcctgcttctgtggggggttctgaggagccagggtgtgtgctggcatggactgggaggagctggtatggggttttgatttttcccaaggtggcactgccttggcacagccttacagtgagggcatgagccacacacacctgccacttctagggcaaatcacgtctccaggaagggccagcagcagggaggctgaccaaggaagggctggagggggctgcccccgcagctgcactgttaccctgaaagggtgggtcagctgtggggct

SEQ ID NO: 477754 - DNA, 1000 bp, Homo Sapiens; identical to SEQ ID NO: 345857

SEQ ID NO: 477755 - DNA, 1000 bp, Homo Sapiens; identical to SEQ ID NO: 345858

SEQ ID NO: 477756 - DNA, 1000 bp, Homo Sapiens; identical to SEQ ID NO: 345859

SEQ ID NO: 477757 - DNA, 1000 bp, Homo Sapiens; identical to SEQ ID NO: 345860

SEQ ID NO: 477758 - DNA, 1000 bp, Homo Sapiens; identical to SEQ ID NO: 345861

SEQ ID NO: 477759 - DNA, 1000 bp, Homo Sapiens; identical to SEQ ID NO: 161297

SEQ ID NO: 477760 - DNA, 1000 bp, Homo Sapiens; identical to SEQ ID NO: 345863

SEQ ID NO: 477761 - DNA, 1000 bp, Homo Sapiens
gcctggcacatgttgtatattcaatttgtgatgatggtaagatgtgacagacatacaaacgcagaccatggccgtctctccaagactctaaagcaagctctccgagggcactggaaaccccagccctggctgataaggggcagccaccattcaggaggtgaatattatggaattctggaaacttccacaaaagctccaaatagaagtgtgtgaatgattctgagtctcggctccccagctgcttggaccccccagccacaccctagctgcccctcaaatgcatccagagactgacaactcaggccaaagccctgtgcttggggacaccatggcattggagcagggggcgggacccccaaatgtgacccctgggaggtgtgttttgtatggtggggaaagggagtgaggttggggctctggaagacaggagggcatcgaggcatatcagaggcctttggaacattactcttcccaggaaccagattctgctgggaagaaagcccatgcttgcaaatagaaatagcgagggagaccaggccaacagcgccctgccaggcagagcacagagggaccgctctaacaccgagcaacatgtgattaacaggttacactaattaggagccagcagcacccaagggagctccttgggaagtttctctcctcctcctccacatctcttttttctgattatgtattgaatactgttattgttgaaaatctgaaaatacaaatatgtgtaaaatggaaagtaacaccccaccccccccacattctccctaaaattttacacccacagatgtgcggccaatattttggtgtattttccttaagtcgtttttctagactttctttgtttggagagttttgccatacccctgcccctcaagccttgttcactcagcaaagccctcctttggagtgtgaaaggcagaggtgatgcggccctgctctgggatccgagtcctgagttgagaagggttttcctgaacctccaagctgg

SEQ ID NO: 477762 - DNA, 1000 bp, Homo Sapiens; identical to SEQ ID NO: 345864

SEQ ID NO: 477763 - DNA, 1000 bp, Homo Sapiens; identical to SEQ ID NO: 161298

SEQ ID NO: 477764 - DNA, 1000 bp, Homo Sapiens; identical to SEQ ID NO: 345866

SEQ ID NO: 477765 - DNA, 1000 bp, Homo Sapiens
agttactatatcttttatttttaaaatctggaatagctccctttttgttttttttctttctgtgtcagagacatttttgaagtatttatgtcacctttacagaatgttcatcaattggcttttgttagattgtttcctcaaatttgacagttttaaagaaacactgcatccatgatactgtctgaaccagtgcatcacatcaagacacatgattgacacaataatgctgtgtgccactcgctgcatcacagcaggacacatgaggcacatatgtgctgctgtgcattcctcagtgaatattgcaggacgtgtgggtggggccaggtgttgtcaaggtcccggcaggtcgctctgccctctaaacacaatggctggatgggcggtggacacctgctctgcggagcctgggcagcagctgaagatgatgtggggaggggctgctcagctggggctggaaggtgaggacagggctgggctggccgccttgtggagatagcaggacttgttgagggaaagtcaggccagggatgcaaaccaaagcctgaggagaaactgcagggccgtgcatggcctcagctccctttctgaggctccgttgatgtgagtgctttcaacaagccctccagggaatctctgctgcttgcaaccaaaaagtagtgaccactggaagagccagcccctgcgagaggacagaggcatggccgccatcaagaggcaggcaaaccccagagaaggaggccacggacttggcagtggacgaccggtgtgcgatctcagtgccacaggttactggttttgtggcaagatgtgtacctgctgacagcatggcttcctcgtctgcagagtgtgacagtgacattccctgcctcattagacgttaggatacagtgaggcgccgtgctcagccccattctggcacgtagcatcgataaacaccagctcttaccggaccgttcccttatgctgggaggaaagaaacgatttggatttcctctgtcta

SEQ ID NO: 477766 - DNA, 1000 bp, Homo Sapiens; identical to SEQ ID NO: 345867

SEQ ID NO: 477767 - DNA, 1000 bp, Homo Sapiens; identical to SEQ ID NO: 345868

SEQ ID NO: 477768 - DNA, 1000 bp, Homo Sapiens; identical to SEQ ID NO: 345869

SEQ ID NO: 477769 - DNA, 1000 bp, Homo Sapiens
atcttttaagaccaattttattgagatataatttatagacagttaaagtcactcatgttgtgtataatacgattagaattttgacaaatgtgtacatacagttgtataattggtgccaccatcaagatataaaatatttccattacccataaaaagcttcctcagtcccttttgtggccaatgaatccccaccttcctgcaaccaatggttttctttcagagactatagttttttgttttcaaactttctgtgaatagaatattacactgtgtatttgataattgttttctttcaatcagcatggtgtttttaaattcatatatgttatgtatattactacttcatcctctatttttgcttagtagtattccttttctagctagaaagtagtatcaagatactaaaatatatttgttcatcacttgttgataggcaactataaataaatttattgccataagcatgtgtatacaagctttctgtgagcatatgttttcatttttcctgtataaatttctacaagtgagattttggggtcatatggtaaatcagtaccaaagtattttccaaagtaatgtattattcttcattttcatcagcaatatgtgggagttctagttgttctacatctttaccaatatttggaatcatcaatcttcttaattttagtcattctttttttttgagatggagtctcgctttgtctcccaggctggagtgcaatggcacaatcctggcttattgcaacctctgcctctcaggttcaagtgattcttctgcctcagcctcccaagtagctgggattacaggcgcccgccaccacgcctggctaatttttttatttttagtagagacagacagggtttcaccatattggccaggctggtcttgaactcctgacctcatgatccgccctccttggccttccaaagtgctgggattacaggcatgagccaccgcgcccggccttgatgacgtctctctttcacttttgttcct

SEQ ID NO: 477770 - DNA, 1000 bp, Homo Sapiens; identical to SEQ ID NO: 345871

SEQ ID NO: 477771 - DNA, 1000 bp, Homo Sapiens; identical to SEQ ID NO: 345872

SEQ ID NO: 477772 - DNA, 1000 bp, Homo Sapiens
gagacagattctcactctgtcagccaggctggagtgcagtgatatgatcttggctctctgcaacctccatctcccaggttcaagtgattctcctgcctcagcctcccgagtatttgggattacatacaggtgcctgccaccacgcccagctatttttagtggagatggggtttcaccatgttgaccaggctggtctcgaactcctgacctcaggtgatccacccgccttggcctcccaaagtgggattacaggcataagccaccacaccagctttttggctttcattggtccctggccaattcagacagaaggccttcaactttgtccaagctcctgcccccacccatcaggagcccccttgctcccataggccccaggctgtgggtgagctgccctggggcccccagggactctggagaccccaatcctgggcttggggcctggctcagccttgcctgggggcccattactcaattcctttccactttaccttctgctgttcctgtccctgtcccaagggccctggcggcagtaagaggcagatttcaccttggtttctggctcaactctgagccctgagccggcctgagcctgctgaccctggcccggcagcctagcgccccctccaccagttcccacttgaggaagcccagcggggcactgatgtgcatcttccagcctcggctacctccctgcttggtgccctgcccacacctggtgacctcctgagcacagatgcccaagagtgacatgcccagaccctggcggagacgctggggtggcactcatctgtgcagagatgcccccaacccagcaagatgctggggcaggaccatgcttgacccagaatgtggggcgtgtgatcccctagccaacatcctaggaagcaaggacatccccagcttctggccctgggaggcgatcttgttccccaccctgggtggctgggtgggccggccccgggttcagagtccctggctgcagccctcccctacagcc

SEQ ID NO: 477773 - DNA, 1000 bp, Homo Sapiens; identical to SEQ ID NO: 345874

SEQ ID NO: 477774 - DNA, 1000 bp, Homo Sapiens; identical to SEQ ID NO: 345875

SEQ ID NO: 477775 - DNA, 1000 bp, Homo Sapiens
ttttttttttttttttagcattttagagagtttatttgagcaagggtgattcatgaacaggcagggccaaactgcaagcaactgggtctctactacagaggtacaagggggaaaattttataaggttcccacagaagcaagacaaagaaaatacttggttaaagttgaaaggacctagttagaggttagatggtggtttctaattggttaagcttgtttggctgtttacactgagtcgggtgttagtttgcttggtgctggaacctaaatggtggaactgttaccagcagcaaatccaatgggtctgcagcagactccatccttgccccccggaggagaggagggaatttggcccgggaggcgtaaggtagcatgatagtccaaggcaagttttagagcaggagtaaaagttttagagcaagaacaaaaggaagcaaagtgcacttgaagagagccaagcgggtgacttgagagatccaattgccttggtaggcccttgacttggggttttatacattggcatttttccggggtttccatttctcctcctctgatttttctttggggcgggctgtctgcatgcacagtggcctgccagcacttgggaggggacgcatgtgcagtgtttttactgaagttgtgcacgtgttcactggaggagtttttcccttaccagtcaagccttcctaaaggaaggtcatatatgagttaaatgccactattttgcctcttagggtgcatgcttgagcctgcgcacccaactcctgagatcttatcaggaagcggctgatcaccagcttcaggtgtttcctatctattgggaggccatagttccctggcgccagctgccactcattattatgttagagacacagcttaacaactgcctgaccatcacctgatggttgcctgacattcctggtgagggggccctcccctgccctgctcatgtctgactagctacctgctccaacatttccccacctcaagagtccaagac

SEQ ID NO: 477776 - DNA, 1000 bp, Homo Sapiens
tttttttttaacttaaaatatggcattcaggttttatccctctccccgacgccatgtttcctttctgtattagtcacacacgtgatcctaaagtctgtcttccccactttaactggggagggctggacaaggtggaattccaattgcaggagacaggatgtgacatgggtgaggtgcccaaggctcaccgactgaaacttcgatggctcttccctgtttccttgtgcagggccccccttctctccactgctcacctggctctcctcctcccttcctgcctgctttgcagctcttgctactattttccttttctttccctgctcccaccctggcccaatttatttcacagaaatatcacagggccagccaggcacagcggctcacccctgtaatcccagcactttacgaggctgaggagggcagatcacttgaggtcaggagtttgagaccagcctggccaacatggtaaaatcctgtctctactaaaaatacaaaaatttgctaggcatggtggcaggcgcctgtaatcccagctacttgcgagggaggctgaggcaggagaatcacttgaacctgggaggcggatgttgcagtgagccaagatcacaccattgcgctccagcttgggcgacagaacgagactctgtctcaaaaaaaaaaaaaaaaaagaacgaaagaagagaaatatcatagggtcctggaccacctctgaaactgtggggaaccctgctccctggtagacatgatgcagaaacatcctaagtgcattagtgtaaaggaaaggtgcacatgtgcttccttcaaagtgcaccactttgaatatgtaaacaatgcactgaatgatactatggtccccatactgggaatgtgcataggtgatgtcacctggaagaaaggaacaccacagtttcctcctccttcccttggagaacacttgcagacgataaggcagcaagttaggatgcagagacaaagaaccctgtaggtgcttgtctgtcca

SEQ ID NO: 477777 - DNA, 1000 bp, Homo Sapiens; identical to SEQ ID NO: 345877

SEQ ID NO: 477778 - DNA, 1000 bp, Homo Sapiens; identical to SEQ ID NO: 345877

SEQ ID NO: 477779 - DNA, 1000 bp, Homo Sapiens; identical to SEQ ID NO: 345878

SEQ ID NO: 477780 - DNA, 1000 bp, Homo Sapiens
actcaatctgccttcattagtttgtaggtaacatgttgtttctgctaagtggttctccaggtttgctatgaagcaggtgatctcagctcttgtagagggaaaaggactgtcattctgccatcttggtagaaactccaagaagggaagagtggagggtgaagccgattgttgccgagaaccagtccttaatcaatataatgtcatagaaaagtgacactctccaattttcaaagctaagttctatgatgcctggcagcttcttctttggtttcttgaaagtcccttagtgttgagtcaaacataagtgaagaatcctctgggatcccagcctgtaggtccttcagaaaacgtgactcccacacacatgcgtgtctaccacccgcatgagtccagtaaacctgcaaagcagggagacatcagaataaatggttgctttatgtgaatatgtgttggggaggtttccggttctgcaatgccaacggtagcagcagcaaagcagggttggctcaccgtgtccatgtgaatgaattgtgttcattccaccaataaatgacatattttccgatctaaaactatgaccatttatttccaaagaggagatccaggattctgcccacataaaatagaaaaatctggcagttcttttgaacatgacaaagggattttttgagggaaattattgaactcttgtggttctctaactatggcttggattgaaattttcaggtataggccaagcacaggggctcacacttgtaatgccagcaatttggtgggccgaggttgctggattgcttgacttcaggagttcgacaccagcctgggcaacatggcaaaaccccatctctacaaaaaaaacatgcagaaattagctggccatggtggtgctcacctgtggtctcacctacttggggggctgaggcaggaggaatttttgagcccagggtgtcgaggctgcagtgagccttaatggtgccactgcagtccagcctgaatgaca

SEQ ID NO: 477781 - DNA, 1000 bp, Homo Sapiens; identical to SEQ ID NO: 345880

SEQ ID NO: 477782 - DNA, 1000 bp, Homo Sapiens; identical to SEQ ID NO: 345881

SEQ ID NO: 477783 - DNA, 1000 bp, Homo Sapiens; identical to SEQ ID NO: 161301

SEQ ID NO: 477784 - DNA, 1000 bp, Homo Sapiens
ttttttttttttttttatcgtgaagagattcctgtcatttaattagatttgccacaaaaagcaataaccttagctaaccacgctgctctcctcctccacctaacccccatctcccttcatatgcacaaacacaggaacccaaagcccctcctccccacaatcctccccactcacattatgggaagaaatgtcactaaatggacttggcctcctccatatagcacggaacaggtgaataaaaatatctttatgaagaattttgttgtgctattatcttagggttgaatcagggccaagatggaggcagaggcaagtgaggtctggggatctcttagagatcagaatttgtctgagaggcacagagcctatagttcacccagaaagggggatatatctaagaggacaggggctagaactggctaggctgaaagttttttcaagtgtatgtgtgagggtaagggtagctataaatccattctctttcctcccccataccttccctagctcccagatagaagggcaggggaccctgaacagggaacagagtcacaattccctcaagtttcatctgattcccacagagcttccagcaggcagtgagttgggcatatcccctggtgctgcatgaccccttcccccagctcagggcttcttctctccacctgtgagcaccagggcctgcaggatgtcagacagtgatacaattcccttgaccacatcattttcatccaccactacaagtcggtgaacctctgcttccactagcctgttgatgatggtctccagagtctcatgcaggtagcacttgagaacaccctcaaagtaatgtgatcgatgttgcaaggctttagtcacagatacatctaggttgttgtaggtcttttctgctgccagattgataacatcaaacttggagtagatgtccaccacacgccccttctcatccaccactggcagggctgagactcgatgctgtacaaaaatccccagagccacatag

SEQ ID NO: 477785 - DNA, 1000 bp, Homo Sapiens; identical to SEQ ID NO: 161303

SEQ ID NO: 477786 - DNA, 1000 bp, Homo Sapiens; identical to SEQ ID NO: 345886

SEQ ID NO: 477787 - DNA, 1000 bp, Homo Sapiens; identical to SEQ ID NO: 158300

SEQ ID NO: 477788 - DNA, 1000 bp, Homo Sapiens; identical to SEQ ID NO: 161305

SEQ ID NO: 477789 - DNA, 1000 bp, Homo Sapiens; identical to SEQ ID NO: 161306

SEQ ID NO: 477790 - DNA, 1000 bp, Homo Sapiens; identical to SEQ ID NO: 345889

SEQ ID NO: 477791 - DNA, 1000 bp, Homo Sapiens
ttttttttttttttttttttttgctttttcacattttactacagaggtatttgatagacatatttattattagttaatatgtaaacttgtaaactgctaattcatatcctacttgtacaaaatcattttacaaaaactctttaaaaactaatagagaatgtattctctggtgggcatcactggaaggcatacctgggcaggtcctcccctgaaggctatcagcagctgcaaccagctcagctactgctgcctttgcagccgacactccaccctcctgctacctcttcattcccaagttcactgtgtcctgattcgtcgccttttctcccctcttttgtggacgccttctcacctgacaccaccacttcacagatgattgtacaggataaatgaataacagtattgtatcttcgtacctttctaccttggacgagaacaactctggttctctcagacattcagcagtcttatttcctgtggccttttatcccataatatattacttcaaatttaaataaatctccttcaaccagagtcctcaaatagcgttcattttatcctttgagtcatccttttatataaagtccttcaagtatccatattacaatatttaaccctcatgatcaaaatgactaagaaagctgtcttgttacaactgttttatactctacatcaccaggagctctgctaagaaaatacaaaaaggaaaaattcagctcaacaatgagctgtaacaggttcttaatgtgtgctactatttgaagtctctaggccaaaattattgcaaacaaagaatcagttcttccaaacatcaccaaaagacccagggtcatgcaccaaaccagaaatccactgtgatgttgatatataaaggattgtgttccacagatactaatttataagaacaactactcaacccatctgttctccagactcgtgacacttggtgtaagagcttcatccgttctgcgttcacctcattgcctttgtctctagtgtg

SEQ ID NO: 477792 - DNA, 1000 bp, Homo Sapiens; identical to SEQ ID NO: 345891

SEQ ID NO: 477793 - DNA, 549 bp, Homo Sapiens
tttttttttttttttcagttgtttgtttcctttaattaacatctaaatagattatacatcttctataattataatatggaaatgtatatgagcaaaatatataaattttttggtgactgcttagggaagaatgatgtcagtgaagttcatccaaggtcttaagcagcagcatctatgcagccagggcgtggtcagcgtttggggacagaggtaaatatccgcaatccatgcatctctttgatttcttcttttagtgcctgattaaccatctggtgctgctggacagttctcttctccttaaattcttcttattcaattttaatttcatacatcgccccacaacctcctgaaatgtcagtgacttttatagctgtagctcgtggaaacttttctttgagaatttgggtcactctgagctccccctcagtctgagtggcaaacatccgatggtgaagtggaagcccgcggatcccgcggaggagaggcgctgccgcggccgggctccatgcagccatgcccggccgacgtgacccgccgcccgaggtcact

SEQ ID NO: 477794 - DNA, 1000 bp, Homo Sapiens; identical to SEQ ID NO: 345892

SEQ ID NO: 477795 - DNA, 1000 bp, Homo Sapiens
ttttttttttttttttttttttttttttttttttttttttttttttttttttttttctattcagattttttggccaatttttctggcctttatttatttatttatttttttattttactttaagttctgggatacatgaaagaaagtgcagcatgcaggtttgttacataggtatacatgtgccatggtggtttgctgcacccatcaacccgtcatctagggtgcagtcagccttataaggacagaaacgccagggttagtgtgtatccaaggaaaatgtgccaccttggccacaggtgtgctccaacatcaatgctactcagtttctcttcctatctgtttctgtgtcttccttcttctcttcccaccactgttacccatatatgctacctttctcacactttctgcaaactcataacttcctcttacacagggcactctgttacttgaacactacctcatggtatctatttacatcctattatcttcaactactacaccacctgccacattatcagcattttgtttgctcagtcccatgagaagaacctgactagccatccttaaaaaaacactctgttcccaatccaatcacctagttcaaccatgtgcccaaggctgcctggccagccagggcaatgataattcaagccaattccacccacagcaagttatttctcagatcttagtttttaccagttgaaatgccccctgaagttttctttgatgctcatccctatgtctgttcagttttttttttctgccctgaggttcccccaagagctctatcagagaaagacttggcccatgctgccaacacactgggaagctggggttagccctctccagaacccacgggcagaaaaggacagtgccagaaagtgtcagggctaatccaaagagaattccaacggagaggagtgtgtgtgtagatgaggatagaggatagtcacagaattctcagtacaaattggagattattatggcccaagtgttcaca

SEQ ID NO: 477796 - DNA, 1000 bp, Homo Sapiens
aacatttgcaaacctttattttagcacaggaaaatatttcctcaaatgcatacttaaataccttaagtatcttaagtaggtaatgggagaagaaacatgaaataggttttcttctgaagtagaacttgaaaacaagataaaataccttatatctctaaactagtagttgaccctcaatttggaaagagacagaatgatataaaggagttttaaatggttccaagaaatcagaaaagtaacttttccaacccccaaaccatacctgacactgcaagcatcttctttcagaaaattgcagcattattgtctaagatttgctgagtctctgtgaacatctctctgtctcactatctcctcatctctaacggtggcaaacttcttaaaggaagttttcattcctaaagagttattgcatagttctcaccattataaaaatatgattctctgttttcaaaatgcattacaattattaaaagttactgtgattttaggaaactatctctccccatcccaaatccaaatgtcaatcacatttagtgcaaggttgtgtattagattactttgagttataccaacattttaagttttctcctcaaaaatattttactctgattatgttcattttattctcaggaatgcattgtgttgaataatctgctttcatacatctacaaaattcttttttgagtagtagctgtgcaatgtatgtcacataattatcataaatttcataactttggcatgaattttgctgtaactcatttcctggcaatatataaaatgcctttgacataacaccatagaatatttaaactgaaaatgaatgatagaaataatcaagtgtgaatcagttccccctcccttcacagagtaggaaactcaggtgtaagaagataaaatttgcccaagatcatgcatctcatttctgatatttaagccctactaaaataattacatatttttgatcttgaacttgacttgaaaattatgattttttaaa

SEQ ID NO: 477797 - DNA, 1000 bp, Homo Sapiens; identical to SEQ ID NO: 161307

SEQ ID NO: 477798 - DNA, 1000 bp, Homo Sapiens; identical to SEQ ID NO: 345896

SEQ ID NO: 477799 - DNA, 1000 bp, Homo Sapiens; identical to SEQ ID NO: 345897

SEQ ID NO: 477800 - DNA, 1000 bp, Homo Sapiens; identical to SEQ ID NO: 161308

SEQ ID NO: 477801 - DNA, 1000 bp, Homo Sapiens
ttttttttttttttttcgtttcaatattttttatttgagtgtgaaaccattcatatcttgcacaactgtacagataaaactatttccattttagctgtagacacaattatcacactgagtggtgtgatcaaagattttatttacagaacagttgctgaaacatccgatgtcatatttccatttatttcttacccatagggtaataggtccaccataattgcttggtgcattttataatacagaaagaaaacctatattaatctctaacaaacctcacaaattactacaaatctgacagaaaaatgcctacaaaaaattctccaaaagtacaatacatttttatttccacacatacacagtatagtataggctcaaaggcacagctttgaatttttttctatcaaagtgtcggatattattatagttttatgaaggaaccgtgaaagtcactttcacacttggtgcttggtaagttaaagtttgttccatccagtttcacaaagttaacacagcagagctgagtgtgatactcaatgccataaatccacattctcatagaacttaaaaaaaaaacaaaaaccctctcctgccttttgctgacactagccattgtgcaaacttaagacaaatccttgtatgtagaagaaccagtctcctacaaacctcaatcaacttaaggcaatacagaacagacctcttccttccctcaagacagtgcttacattccaagacaatgcaggtactgtgacagatgtgggtatgacagaaaatctagagtttccagatagctccccatttagccctggtgctccaggaaatagggatggtaccaccaggaagaagggatgtgcagaacacgtctgagggctgttccttgtacagtacaatgacaagacagatggcaaggtgaatgctcttggtaaattatgtgcccatccaagaacacaaaccagattctgtctccagtatccatccttcaagactaaagagattttgtcaa

SEQ ID NO: 477802 - DNA, 990 bp, Homo Sapiens
ttttttttttttttttttcatcttccattattttattattttttatacatatatatatatgcgcaatctgttttatgtacaacaattggttctatcaaatattcagaccaaggcattctactggtaatttccccccaaatcaattcaggtaaaattagatacttatgcacttcacgggctatcaaaacttgcaacttcattatcaatttcagttctgaggtcatacacacaattcaaaatatacattaactaggttaaggcgataaaagtgggctgaaagaaaccacaggattcagaacaatgaaactgtgtattttgcttgcatgagagtcataacgtgaacagcaagtattgtgcgtatctcatagctcttcagtggagaggaagcggcttctgaacatctaaggtgactgcacagcaggtgggaaacagctggtgtggcctgctggaggcttcgccgagggagggctcatttcttctctgcctctccttttttgggttcttgtttcaatttgtaatcagccagggcggccttgattgcatcttcagccagcatggagcagtgcagtttcacgggaggaaggcagagctccttggcgatatctgtgtttttgatagtcaaggcttcctccaccgtctttcctttcacccattcagtggctaatgagctggaggcaattgcggaaccacagccaaatgttttaaacctagcatccacaatcttccccttttcatccacttgaatctgtaatttcattacgtcaccacatgctggagcccccaccagtccagttccaacatttttagatgtcttgtcaagggaccccacgtttctaggattttcataatgatcaacaaccttcttgtgatagagtcgggccggggccgacagctcccgggcgggcaggcgggggctccgcagcagcagagccgatgccgcccgcctcagacggaaagccccagccgccgccatcttgccggcttgcgcct

SEQ ID NO: 477803 - DNA, 1000 bp, Homo Sapiens
gccattcagcctttattgatagaagacagttgctcaattctacacttacagtcttgatgttgcccaaacacggagtctttgtgaataacagtttcaacatcttatcaggggtcatgttacacaaagcagatgagcagtgcaggtcagacgggtagcactgggattgtgtctaagggtggtggatactcggtagaaagttccagaactgggaaaaacttaaagctcgcccttcaaggcggggcttaatgccaaaactcccaggcagctggctgagctgttgattaaacagaacatcctggctctagggttcgggaactcccagacaccaagtcaacatccatctggtggaaagagggggatggtgcgtgaggctgcagcttctccaattttgtctcagctttgctgggagagcatttttcacatttgactagctcactcccctgtctctcttctaacccagctatctgcggaacttgccacttggggagtcagtaattagcaaggagagaaaaagaagcataaaaacagctgcagggcaaagggaggtaaggaagtgccaataaatatcatgcgttgaagttttgtccaccacttgccacgtggttcgagctttacgtggttcagttggctttcattccatcaggggtgtcttaaatcccagtacaaaagcacccccctccagttcctccctctcccatcgcattttcccctttgaaagccccccaagcccccaaacaatggcaccgcccctcttaggtacatgcaagaagagatgtgaatcatgaacaggtagaaaaatatctggtctctaatacggaaaaaatgggatgtttcacagtatcaacagtgcttgctggttctaaaaagtagccccaggctgccaagggattatgagccagttagagatgtcattctctggcctgtaggagttaggatggctgggaggtagggagggagaaggagtcccattccagaggcctcgggatgggtttgcagaagt

SEQ ID NO: 477804 - DNA, 1000 bp, Homo Sapiens
gagacagagtcttgctttgtcacccaggccggagtgcagtggcatggtctcggctcactgcaacctctgcctcccgggttcaagtgattctcctgcctcagcctcctggttagctgggattacaggcacacagctccaagcctggccaatttctatattttcagtagagacagggtttcatcatgttggccaggctagtcttgaactcctgatctcaagtgacccgcccacctcggcctaccaaagtgctgggattacgggcatgagcgctgcgcccggccaggttgtggtaattttttatggcagccctaagaataaatacacagacctgaacttttgtctttttgagcaaggactgccatgtacaacttgacctgagagtgcagccttcaatcttttcctctggggcctctggcaacagttctcagatgactatgctcagagagacacctgtgactgtccacccagcagccatctgttcaccagcagaggagaccggaagtcccttgtgaggtgctgggttctgaagcttcaggagtgggatccatgtcatcgtccatatcagatctgtctgctccaatctcagccctttcttcctgcctgatccaaaggctattttctagctgttcttcagcaatttctagctcttcttccgtttgtaaagtagccacagtttcccggggcaagtttgaggaatatagcccaaatttggctttatagccaaacattgcctcaaatggactttgctgcaaggaaacgtcgaaagcctgattcctcaccatctgcatgaatcggaggcctttggcccagtgacatgagtggttactctgcatccaggtacttatcatgttctttacatcacggcttgctccttccagggagccctggctttggccagggtggtacttaccagatacaatctttaggtctggccacaactcattgagctcatgaacaacctggtttgtgaactcaacgccactgtcagagtctaacacac

SEQ ID NO: 477805 - DNA, 1000 bp, Homo Sapiens; identical to SEQ ID NO: 345900

SEQ ID NO: 477806 - DNA, 1000 bp, Homo Sapiens
attgacacatggcttctggcgtctggccctaaaaccagaggataaagtgaagtaaggcagatcacctgctgcttcctcactatactgattagagtgttgatttagccagctgtgctttgttttcctcaatcatgacatgcttggcaaattcattagaattaattcccaagttctcttttaatttgttgagctcaaaatcatggagaatcttgatagtcattaacttttctctcttgattctctccacaacatcttttggaacatcaggtatcatccaggccagcaaaaatttaactaaaaacacaacatgttccataacaatgatgaaggtcatcttggcagcaaggacatgccagaattgcatattatgaaaatatttattctcgtcatcaggaggatatctgtaatctctgtacctgcaagtgatgaagtctcgtttttccgaaggtgcagtgtggtttggaaaatcagctatcaggaatactgacaggctattattcacatatcctgtcataggctgtgtggcatttgttgagtaagcatagtagtaaactagacggggaatgatgtctgacgtaaatgcaacaataaaggcattagttgcaacagaaaggacagccattccataaagaatgtcttgccaaacacctatgctatgagctttagaagctacagttctcctgtattgagtggtaagtttccaggcatccactcgaatctctacaatattatttatgagagcaagaagaggagccaaaggaaaagaggccacaaatagtgtaacaaatccaaattgagtaactgtttctaagtactcatagaaaagcccaaggggtccaaaactttcaaggtcatgatcctgctcccatcgactatacagcttctcagagtttgtccgagcttttcggcgtctccaccaattcaaagccaagggataaatggcttctttaatgtttccaaaaatctgtttcccggtcattataatggtcaattgggttgt

SEQ ID NO: 477807 - DNA, 1000 bp, Homo Sapiens
ttttttttttttttttttagctcctaggaatggtgagactatatttgcatgatgtggccactacacacatcaccagagactgtggtccaggttcgaagagtgaagcctgggtaactggcagggagacacgcgcacatctcccacctggagcagccagaatgggacatcaccccacaggctttagggcgctgggaagagaagggtgatctgggaggaggcacgaggagaccagaaggcagaaggagggttaggatgatggagtcagcaacataggctggccatcccctcagcccctcattgttcttgatagcagtgcatccaggagctcgaggtggggttggggcttgggccgctctgcaggaagtgtggatggatgcatctctgctttccatctcagtgtaaggaggacagctggcttctcagtgccctcagcccctgttctgtgtgggtctgaggacttgggccctctgaggtccttctgtgtctggggtgggctctgtggctcacctgattctctccacaccccgctgtgaaatgagtgctgttctcttctgccctacatccccaagagtccctggagcgatctactgcccatcttctccaaaaacacacaaggagagccctgccccagtccaagctgcaattctgcaagagctttccggggcctggggcacctcgaggcaggtcctggagagaagggaagcagatcctgcacagagtccccatcgctcctccctctacaagccctgaccatgagcagtgtgtctcctctctgtcacagtcctccgcttcctgccttggtcaggcccctgccctctcccgagcctggtgccggtccagagccagctggagggcgcacttcaaggtctccacgttgttcaggacgttgtatcgactgagggccaccagccgataaaagtcctggggctcataggtgaagttcatcatgccatagggggtgtctggcctgttgatgacaaagtccccaaaggccttctcc

SEQ ID NO: 477808 - DNA, 978 bp, Homo Sapiens
tcagctggtgtagtagatgtggaagtagagagtcttgttgcgcagcagggagtaggagttgtcgaacttgagcaggtagatgccctcaccagggtagtcatggctgccagcctgcacgtctcggtggctgtcccgccggtacacaggcatgacctccccatagcgaccccgcaaggagctcctggagcctctctccacatctccagctggaacgggttcttcaatctcttcctcctcttcctcttcttcatcctcatcgtcactggaatcactgacctgcacagttatgtcagtgctagttacaggggtccagtcaaaataaactccaaagccaatgtcatagtcatcggtcgcaaactcccagcagacacgcttcccctctggatgagtaggtacccggatggtcaccacctcaccacgcttcaccaccagacggctgttcttctctttgcccagcttgcttttgaattccttcaccttggcaaaggtccagatgcatggaggagccatcagaggtggggagactttcctgtggtcccccagaagatctgcagattccaaatcagctgaaagaacatctatagctcctgtatgttcagactggatcataacgatgtccccagacctctgtggaacttgatacttagccatctcattgaggacctgggcctggtctgcaggcagcaaatcctgtttcaccaaggcctgagcctccaaaggaccagttgctttccgcagatcttccgtggcatccttactcactggagataccatctgtggcctgtggggtgaggagcagggttctggatcggtggcagaagccaataaagaggtatccttgttttctagatcttcattctctgaggcggccgcctggctcccctccactccctggcagtccccgacgccgccagccgaccctgggcgggctgtggggctccaggagcccggcccctcagccgcctgcaggtcagacat

SEQ ID NO: 477809 - DNA, 1000 bp, Homo Sapiens
tttttttttttttttttttttttttttttttttttttttttttttttttttaaccctttgttacatttattgcttttcatggaaacaattacgtgatacacacttgaagtagaggtttataagttctagttctccaatgactgctttccaattaacatcatgtggatatctgtcctttgtgagtgccctggtgcttaataaagcttgtgtgccacttgaaagattttccacatatgacacattggtagggttggcttccagtgtgaatgacctgatgtcgaaaaagattcctcttaaaactaaacgttttcccacattctccacattgaaagaattcctcctttgtatggattctttgatgctgaatgagatccacattcctaccaaaggactgtccacattcactgcatttatgggtgttcggtttactgtgaatctgttgatgacatagaagggttgaatgccggccaaaggcttttccacactcaaggcatttatggcgtttttctccactatggatcacctgatgtcgaataagggttgaattctgactaaacgttttttcacatttgctacatttataaggtttttctttggtgtgaatcctcttatgttcaacaagatacgcgagctgccgaaaacactttccacagtcatgacatctgtatggcttgttttgcaggtgacactgtttatggaccgtaagagctgaccgctgtctgaaggcttgcccacagaccttacactcaaaaggattctctaaaaagtgaattctttgatgttgatcaaaccatgccttacgcctaatgacttttccacattcactgcattcataagactttgctcttgtgagaattcgctcatgccccaaaagcaaagatctttgattgaagggtttgccatcctcatcatatctgccctgcttccaccttgtttgcgcattctgatcttgaataaggttaaggttttgaaggaagcccctgctgtattcatcaccact

SEQ ID NO: 477810 - DNA, 1000 bp, Homo Sapiens; identical to SEQ ID NO: 345901

SEQ ID NO: 477811 - DNA, 1000 bp, Homo Sapiens; identical to SEQ ID NO: 345902

SEQ ID NO: 477812 - DNA, 1000 bp, Homo Sapiens; identical to SEQ ID NO: 161309

SEQ ID NO: 477813 - DNA, 1000 bp, Homo Sapiens
ttttttttttttttttttgattacatgtccattcattggtttggggctataaacattcttgttaagagctgtggagatcagtgtttgtttaccataaagattttgctttttcccttttatgagtggaggctgtaactggtatagccagcatttggttgggcacacactcatctctcaaggccagtgggctagaggcttggcagactctaagggtgggaaacaaaaccgctctcaacttcctgagctcttgactgtccatggatacacacagttcaaaacagcgagacactgagggactggagaagtggggaagacttgattcctgtttttgctctgaaaattccaagttgagaagggaaccaggtgtgggtttcttattatggtcctgcagaacccccaagacaacaaccaaaaaactgcctccagtgaccactgggacctctgagggtagcttgctgcatcagtcaacctggtacagctccagcagctcctgcaggagcctctcctcctcctggagcccaccagactgctcctccagaccctgctcctcccagctgagcccctccttcacggatctggggttgcccatggcttgcagcttctgaaacaagcccttgcagctctctctctctgcccggctcagcaggcttaggttcagggtgaagcgcccagtgctcgccaggctgcataggatccccagcaccgctgcccggtcagccggccccacgtgatcagccagtgccaccagcagctccccaagaagtccaaatcccacatctgtctggaagaggcagccgagccttggacccccaagctgcagtagagcctggtagcgctctggcccacttggcaagtgtcgtcgccaatcacgatagaagtcagcagacgtctcgggctggaggggggctttctccggggagatttcagtggccacatcctggaaggtccttccctgaatagtgtgacagttccagggcacagttctctttcctcccatctt

SEQ ID NO: 477814 - DNA, 1000 bp, Homo Sapiens; identical to SEQ ID NO: 345904

SEQ ID NO: 477815 - DNA, 1000 bp, Homo Sapiens
ttttttttgtaagtatatactgacatttacttgccaaaataaccacaaatgactacacatatttaactataattaaatcaagtttttagaaatttaaagtctgcttccctagaaatacaggaactttgtgtgataaaacttgagacatatgacaatttctgaatagcaactggaatattcaaccaacaatggtcatggtcagttttgtattttttccttaacttatatacttcattctttccaactattttaaagctaaatcttttttaaaaaagttttaaaaataagtcacaggcaaatcatgaagagttgggtttatttcaacagtaaatctgaaactcttgccttaagcaagagtactacagtaattatatcaggaatagacaatttcctacactgtcaaatatataaaagttccttttgcactttcttcaacactgatcaacaagcagattcagtccacatttgctttgatctaactactgagttaacccaagcttcttcttcagagactctggcatctcgggtggaggagggcgaggaagtctgaagtagaccttcacggagtcatagataaaccactgtagtgcagtcagggtaccaatcatgatgatacgggcaaacagtcccttccatacacctttaaatccaagtctcttgaggaccagagaagcactgctacctttttctttattcaacacagataccacagaatcagcagggtgagaaacaattgcacaaaagactccagctatgtaacctgctacaaatgttacaaccagctgctctggctttgaacattcactgcggggcttaggaaccacaaacttgtacagtgcttcaacagtacgttcaaagcaggcgaacttcatcatggtgtatggtatctgtctcatccagagaggagcaacccccttgtagaatgcttttaggccttcttccttatacattttgggagctgcatccctcaaagtgttggcataacctggctgggtttgaa

SEQ ID NO: 477816 - DNA, 1000 bp, Homo Sapiens; identical to SEQ ID NO: 345905

SEQ ID NO: 477817 - DNA, 1000 bp, Homo Sapiens
tttttttttttttttttttttttttttttagcaaatgtggtacatgttttattctgctagaatcagtattactgtcacgttttacactgtatctcttaggaaatggtgagagccatccacacaatgtgcatttaaaggagactctactataatttcagctttcctactctttatagaaaccatcttctctgcaaacacacaggcaatatctctgtgttcatttctattgggagccctgtatgcaagatggagagagccacatttcccctgagatgttacgtaaaagtttgaggttgagatgacatatctgacactctgttgttaccctcagaagctactacatgtgaaattctaatgactgcattatcctgccaagtgaaagaggcaggcatgagcaaggacggttaagaggggtgggagccttatcatgatggggagtcttgttctgacatctttggaaaaactgtccacagtgtgaagtcatcaacttgttatcctggtttacagtttgagtagctgttgttatggtgtcgaacattttggtgagttctgagtggctcacatgtcaggtacaagggttttcccatgaaatttacatcgagttgtccacctccagcttatagggcttctggaacagagtgggtcttgctcttcgtgattccatgggagaaaatggaattggaggaactagtagaattcagggtaatatccagtcagagactttgactgtgatggatttggagctttccttgccagtggctgagttacgaacagagcaagcatagagcccactatgctttgtagttatttgggggatagagagcttttgtcctgatagctgaaacttcccattaattgtccaagaatattgtgcccgtgggttagactcggcgaagcaggacaagtagaggttttctcctgaacggtaataggtgaatgaagggtaaatgctggggaggtctggaccatggaggagattcagggtgactgggtcactgcg

SEQ ID NO: 477818 - DNA, 1000 bp, Homo Sapiens
cagggctgagaatgtttattccatgcccaaggcagcacagacctggcagacagcagtaccacagggcaaagagggaaggcagtgtcagatgaacccaggtgggcggccagggccaggccagcaggaggctcaggccaggggcacgaaagggggggtgaggtaggcagaagctggaggcactaagggggtgccctgggcaggaggaacagaaagagggaggcagagagggcagccggctggagagggccgggctacgactgcacgttgagcacgtgggcagagcgctggtggtgccagtcccggaggcgggtgtagcgtgggctctgcagctccaggacatacttttcccttgatttcttcaggtgctcctcatccgggtcttgcatgaactcggtgcctgtgaggtgggcaaggatgcggaaggaacgcgactggcctgtccccggccgcggccgccagtcctctgtgttctccatcagccgctgcttgctggcatctgggaccagcggtcggagcggctgtccattctgctgcggggcgctgtcagcgggcgggggcgccccaaagggccgggccgtcttgttgagggagacgctgggtgcaaaggtgtaccgcggagggtccgcggcgggggcggaggccttctgcggtttgctctgaaccggctgggccctgctgaggcccaggctgaggcgctccccgcaggcccggatcttgttctgagcttcgatgtgtgtgaggctacccgcattctcgccatcgatgctcagcacccagtcacccacggccactccggcctgcgccgctttgcccccaggagtgagccgggaaatggagaggggcacattgaagtccttgcccccttgcagccggaagccccaaggtgctggcccctccagcactactttgaaggaatccatgatgccggctcctgcttggcccggccagggcgctgctctgcgtcgggctccagggagcctcgttgggatcggccgccagt

SEQ ID NO: 477819 - DNA, 1000 bp, Homo Sapiens
agcaggagccaaggaagtttatttactctactgggtgacaggagggcagagtgctccagaggagacccagatacatcaaccaaggacttccctgagatttggctttgctcttccaggcctgcacatgctgcgtgatgaaatgaggcctgcctagacatctgtgagggcctcgagggctgctgcctcgactttctccctagctaagtccacccgtccagggacacagccagggcactgctctgtgctgacttccactgcagccaagggtcaaaatgaagcatctgcggaggccaggactccttggcatcggacacagtcaggggaaaagccaccctgactctgcaggacagagggtctagggtcatttggcaggagaacactggtgtgccaagggaagcgagcatgatttctggagtggactacatgcatggtctggagttcagtaaactggaaagtttcacccccaagtcttaatttaatcaaaattgctgaactctgttcaatcttcattgttaaaagcagctttaaagctgggtgatttcttagtcaaatgtataacgaagcttttacttatcaatttctttttgggagggggcatgggctgaaatacatcttgtgctcaataaacctccccacatcaatatttcaaagcactttctaggttacaataatgacatttcaattccatatacgcatacatagaatatatatttttaaacagagtgggtcttaagagtatacttggaaccctcggagtcctccatggacaagaacagggtggcccatggacttccagccaaaggctccactgtggggctgctttggggagagactcacagctggacttctctatccgaccatgcaatgttagccagcaccaattacccacaatgctttgcccataagagatagaaataatggaactcacaggaagaaacagtattgataacatacacaggcttacagaggccaggcccagtaattaccatgagacagaagc

SEQ ID NO: 477820 - DNA, 1000 bp, Homo Sapiens; identical to SEQ ID NO: 161310

SEQ ID NO: 477821 - DNA, 1000 bp, Homo Sapiens; identical to SEQ ID NO: 161311

SEQ ID NO: 477822 - DNA, 1000 bp, Homo Sapiens; identical to SEQ ID NO: 345907

SEQ ID NO: 477823 - DNA, 1000 bp, Homo Sapiens; identical to SEQ ID NO: 345908

SEQ ID NO: 477824 - DNA, 1000 bp, Homo Sapiens
tgttagcagtggtgagttagggaaggagcagaataaaagatattctacctagcaatggggacccgctgtagtagtaagaaactaagtaccttaagggactggggagttttcttaaacctctctggcaggagcatgtattggcctctgtttcataaatgtgggtcattttcatcaccttgggatgttagactttggcaggtctgatgatgaaacaaggctgcacatgctcgtaagaagaaatgaccttcccatccttaatctccttggtgatggtgcaaattttaaccagtatctgggacaggggtccgcaggcactgcagtgctcctttaagctgcagggggatgaggatgtgcaagctggggccgtgctttctatggctccggacttacaagatgtccaaggggaaggctcacatttggtggcacgtgggtaacagggacgcttgccatccgagctctccagaaggctgcggtatgtggtaatctcacattccagccgggacttgacgtccagcaggatctcgtattcttggttctgtctttccagggcacaccggatctctgccagctgagcttccaggttatcaatcagactctggatctgggtcagcaaggccgtgtagcgagcctctgtctccgttaggatgcactcttgggaatctctcattcgatgctgggcctgcagttcaacctccagagtgttcacactgcgtctcagttctatgatctccttttggcagcattgctgctgttgagagctggtcaccacttgttgattcagctcctctatctgcgtgttgaaccactgttccacatctttgcggtttgtctccatgatgggctcatattgacatctcatttcttgtagaacctggtttaggtcagcagaaggggcagcagtcacttcaatgtcaagtctctccccaagctgacactgtaaagaattgatttcctctttgtggttgttcttgaggcaaaggagctcctctttcagagactg

SEQ ID NO: 477825 - DNA, 1000 bp, Homo Sapiens
tttttttttttttttttctggatagctttattgaagtgtcgtgtacaaagcatacatttcatgcacttaaaatgattaaaaatcaatgatgtttagtatattcgcagagttacaaccatcaccactactgaaatttagaaagttttcatcacgacacaaagtaacgttctatcagttagaggtcatctcctatttcaacctccctcagacattggcaaccactattctactttctgtctccatgggtttgactgttcttggtacttcctataagctgactcacataacatgcaacttttagaaaggctgaaaaccacaaataccatgttgagcaaaatgagcccgacacaaatgctaggatgtctgtactttagtaattgtgtgtatcctgtttcaataattgatttagaattttcttattagagcaaataacataattcattttaagatttatgcaatcataatatatttctattttaagaaatatacaatttatctgatgcactgcaaatgcaaacgctttacctctaaagcttatgcttacaatgatatattattgaagatccacactgggctgatttaagtcgatttacttgtagcactgcacagttaagttcagcattatctgagtcttttatctcatgtttgaaagccaaaccattcattgtcacccatggatgatgactgctgttacgaaacacaccaatccatgaggatggtgaaatgatggacagaaatttcatttcttcttcattatctatagaaagcagactggagttcttcgaagtacaggccagcaaactctcttcccaagttcttctttccttaccaatgtagtaacaactgttggaatatgtaatccactcctcaggacaatggccacaatgacgtgctttctgagttcttgtattcagggaagaattgttgtgcctctgtattaatgtagagggaataacaactatcgttaccacagaggccattaagataagacagataattc

SEQ ID NO: 477826 - DNA, 1000 bp, Homo Sapiens
aaggattaaagggccttgagaggctagtaacatcagttttattgggttggggtggcaaccatagcctggctgggggtggggctggccctcacaggttgttgagttccagcagggtctggtccaaggtctggtgaatctcgacgttctcctccttggcactggccaaggtctcttctaggtcatcgatggttttctccaactttgccacagacctctcggcaaactctgctcgggtctcagcctccttcagcttctcctccaacagtttgatctcctcttcatatttatcttctttggtggaatactcctcctctgaggccatcagggacttgagggcctggtccatggttcgaagttcctcctccagctgtctggctcggctctcggccacctcagccctctcctccgagcgctccagctctccttccaggatcaccagcttcctggccacctcttcatatttgcggtctgaatcctcagcgatgtgcttggcctccttcagctgcatctcctgcagttccatcttctcctcatccttcatggcccggttttcgatgaccttcattcctctctcgctctcatcagccgccttctcggcctcctccagcttctgcagggctgtagccaggcgctcctgggcccggtccagctcctcctcaaccagctgaatgcggcggttcagggaggccacatctgcctcagcatcagtggccttcttctcggcctgctccagtttctcctgggcctccttcacggattcagaatacttttccacctcatcctctgtccccttcagcttcttctggagggcctgctgctcctcctccagctgcttgcagcggtcctcagcttgcttcttgtcggcttcggcctgctcggcgcggtcgatggcgttctccttgtccagcttcagcatctgcatcttcttcttgatggcgtccatggctgcggtggggggtgggccggccggcaggcggtgaggaccggacggactgggctg

SEQ ID NO: 477827 - DNA, 1000 bp, Homo Sapiens; identical to SEQ ID NO: 345911

SEQ ID NO: 477828 - DNA, 1000 bp, Homo Sapiens; identical to SEQ ID NO: 345913

SEQ ID NO: 477829 - DNA, 1000 bp, Homo Sapiens; identical to SEQ ID NO: 345914

SEQ ID NO: 477830 - DNA, 1000 bp, Homo Sapiens; identical to SEQ ID NO: 345916

SEQ ID NO: 477831 - DNA, 1000 bp, Homo Sapiens; identical to SEQ ID NO: 345917

SEQ ID NO: 477832 - DNA, 1000 bp, Homo Sapiens
ttttttttttttttttggggtgtagaaaccacttccatttattgcagcagattatcccagctagtaggggaagtatccagcaagaataggctatgcaatgctgtcaaaacacatcatggattttcaacatcagcccatgaagaacacacaaaaatgcaaaaaggccaaacaaatgaagttaatgggttaactgtgttgttctagttcttgcaagtgtctttgcttcttctttaaaatggaaatgagtgtggcagaacacactagaagataactacatatctttgcattgtttcttcagcatggtgagttcaaatttccatggtttagatgcaacaataaaagtacaaaaaaccaccttttgcattttgggatcctcttgaaatgcacagttttcatcttctgaaattttcttgcaaattgttcgggcaattttgacctcaatatagtactccaaactatctgtcacctgctcctggctcttcagaaccttcagcaccctaaagctgaacttgttatactaaagctggccttgttatactccttcatggcgaaccagagtgcctgctgcacatagacgtagttttgagggatatcttggaatgtcctcaccacctttgttgagccccaggcttggaatcttctggatgcaagggccacagtggccactaacagcagcagggcctggcagagccggaccatggctcctcagccaagggtcacaggccaaataccatctatcctttcaggactggggcaagatgtggcacactggcccctgctgcctctgaagatacacagatactggcaccccagctcctcttggcactgctgacactggtgggcttccagcagctcactctgagaaggaagcctttctgctctatggtctctggatcaccttccagggtgggtttggaggccactcttgctagcacaccacagctacaccatgggcccacctcagatccaagttcttcgccacgttcctggctgctggccc

SEQ ID NO: 477833 - DNA, 1000 bp, Homo Sapiens; identical to SEQ ID NO: 345918

SEQ ID NO: 477834 - DNA, 1000 bp, Homo Sapiens; identical to SEQ ID NO: 345919

SEQ ID NO: 477835 - DNA, 1000 bp, Homo Sapiens; identical to SEQ ID NO: 345920

SEQ ID NO: 477836 - DNA, 91 bp, Homo Sapiens
ggacctcagttcgacgaggatgacagtatagagttttcactcattttgttcagctttccaaggaatgtatatatggaagtcatcatcgatc

SEQ ID NO: 477837 - DNA, 76 bp, Homo Sapiens
gggcctcagcgtaatcctattgagcatgatttttaagtcatcacctctcttcaggataatataaggttctcatcat

SEQ ID NO: 477838 - DNA, 67 bp, Homo Sapiens; identical to SEQ ID NO: 345921

SEQ ID NO: 477839 - DNA, 1000 bp, Homo Sapiens
tcactgaagtctggcagtgcctcctgcaggctgtctgcgaagactaggtgaagcgtagcggcgcagagagcggcggctgtcctccgtcacgcacagcaaccagcaggttcccgtgtgcagccccaggctgaaaagcccgggctcgatggcctgcagcacgtggtaggacagccaagcgttgtgtcccgaatctgcgtccaccgccaccaccttggtcaccaggtagccggactctgcggcgcgtggcactatatcgaagagtgcggagccatcgggccccagcgcggggtacagcacccgcggcacattgtcattgaggtcgcccaccaacatgcgccggctcatgttggcgctgagcgcgggcgagccctggtcgtgggcctgcatcgtgagctcgaaggcgcacagctgctcgtggtcgaaggcacgctgcgcgaccaccaccccgctctgtgcgctcacggacacgtaggacgacagtgcccgcagctccaagtcagtggtaacgatggagtaggagacttggccattcagccctaggtccaggtcagaggcgctgacttgtgggatggaggctccgggaaggttgttttcggccacgtggaccacgtaggagacttggtggaaaaccggagcattgtcgttgacttcaccaatgcgtagggtgaggcttgtgctggatgagagcggaggcttgcccttgtcagtggcagtgatggtgacgttgtactccgggatccgctcccaatccagggtcccatctgttacaagcttatagtcattattggcggaagattcgattctaaaaggaactctttcgtttatgaggcatgtaacctccccattttctctcgaatctttatcatgtgttttgaacagagtgatcaccgtccagggttctgcgtcctcagttacagaactggacactgaagtaaaaaccacgtctggggcattgtcattctcatctaggatttctagtataattttacattcgctggtc

SEQ ID NO: 477840 - DNA, 1000 bp, Homo Sapiens
accagataatttttaactccatgtttgagaaacattgaataatgcaatgtgtttgtggcacaaggggaatacagacccaggggaggcaggaaaatttaggtaaaaggaagcacaaaagttgaagacgaggcgctgccatcaaggctgtggggtttcaggccaagaacaggagctgaggaagccacaagggagggcattttctgcagagttgctgaacgagtaacaacctggtcctgagagagctcttgtggaagaataagagccaagtgggaaagcttttcatcctgcaaagctgtggcagaaggttcttccttgaatgtggtcatgtgcacttcagctcaggagtccagcgcaggagtcctgttggctgaagtccagagtgtcctttctgattcctgaagtagatgaacagccctgtcccaaggaagagcaggcccagcacaaagcccccgactccactcagcatcttgctctgtgcagattcagtccgtgtactccattccactgtgagagggctcgtcacgcttggatgctccacttggcaggtgtaaacctctccactccgaggaactgtttccagcatcaccagggtctggaaggtccaatctccattctggatcaggcctatggagaccaccgcagccttctcttcctgaccattctggaaccacctgactttaatgctgcctggatagaaaccactcacagagccgaccagggggttgcggtgatgcaggggctgggtctttgcaggatacacagtcaccttaggatggactcgcggctgcactgtgaagctctcaaaaaaccccgtaattgtatctgcagtagtcgtccatcttgtcccgcttctcctccgggatgcccttctggctgttccagttctctgcgacaggccgccccagttccgtaactgcctggaactcctccacgttgctgtcgaagcgcaggttctcctcccgtttatggatgtatctgttcaggtactgcacccgcttca

SEQ ID NO: 477841 - DNA, 1000 bp, Homo Sapiens; identical to SEQ ID NO: 345922

SEQ ID NO: 477842 - DNA, 1000 bp, Homo Sapiens; identical to SEQ ID NO: 345923

SEQ ID NO: 477843 - DNA, 1000 bp, Homo Sapiens; identical to SEQ ID NO: 345924

SEQ ID NO: 477844 - DNA, 1000 bp, Homo Sapiens; identical to SEQ ID NO: 345925

SEQ ID NO: 477845 - DNA, 331 bp, Homo Sapiens; identical to SEQ ID NO: 345926

SEQ ID NO: 477846 - DNA, 1000 bp, Homo Sapiens; identical to SEQ ID NO: 161313

SEQ ID NO: 477847 - DNA, 331 bp, Homo Sapiens
ctgaggaagagaaaaaggaattactgcaagttcttttaatgttaataacccttctttctccctgacgcaatctgatactaaaagtctggagcaaactcttacaagagggcccataccaacattaaaatagggccttattcttccttaacatcttgggtcactcagacatccaaggaaggtagttgccaacaccttgaattctggtggaaaccgcgaatgttttggaccattcatcattgtgaccctacactgaaatccagctcaagcttggtttaccatccccttcccctccattgcgtgggggaggaaaaaaaaaaaaaaaaacacaaac

SEQ ID NO: 477848 - DNA, 1000 bp, Homo Sapiens; identical to SEQ ID NO: 345927

SEQ ID NO: 477849 - DNA, 1000 bp, Homo Sapiens; identical to SEQ ID NO: 161314

SEQ ID NO: 477850 - DNA, 1000 bp, Homo Sapiens
ttttttttttcactaggcaatggcggcatttattgtgacactagtcagaactcccaaacaggccttttgcactgagagtagagcatgcacatttgccaggtagattcgggcccctggctgtcagagttgtcagcctgcctaagcagaggaaaatgatatagacagagatggcatgctatcatgaaaaagtctgtctgtgataaccaagtgcagtaccgtaaaattattgaccatggagccccttcacgatgactccatggctgggaaccactgaaggaggaggcttttccaaactgaggtggtctctgaagactgctcttctgactccattcctgaaagaggctgtgtgcaagaatcaggttccatggagattggaatatagtctggtgagttgttgaggggattttatgtgatggaattatacccgagaccccagagtcagctttcaatgaatggggctcggcccttgacttcattgcctcctatcatcctgggcctggcaggggatctatgagaaaggcaggaaccacgacaaaggcaggtccaaagtcaagcagtattcttacatgtcgaacgggtctctcactcatgtagatgatgttgaaaaatgttcacagaaggtgtctgcggaaattgcaagtctgacaatcatgtccactaatgctgttgaggggcaatgtggacccagccttattgctgctcaaactctgtgtcccagaatgaaatcccaggatgatggaggattgccccctcacaacgtgaagcagctgctcagctggaaactgaattcaaggttaattcaaggagctctgcaacatgactggtagtgttgatttttgggttgactccaggacaataaaacattctccaggaatcatgcagcttttacaatagaatcccatgaggatcattttccatgaactggggaatgttgagtttagaagacgttgagccagaccaaggaaacttattgctgttcaaagtctctatcccagactga

SEQ ID NO: 477851 - DNA, 1000 bp, Homo Sapiens; identical to SEQ ID NO: 345928

SEQ ID NO: 477852 - DNA, 1000 bp, Homo Sapiens; identical to SEQ ID NO: 161315

SEQ ID NO: 477853 - DNA, 1000 bp, Homo Sapiens; identical to SEQ ID NO: 345930

SEQ ID NO: 477854 - DNA, 1000 bp, Homo Sapiens; identical to SEQ ID NO: 345932

SEQ ID NO: 477855 - DNA, 633 bp, Homo Sapiens; identical to SEQ ID NO: 345933

SEQ ID NO: 477856 - DNA, 1000 bp, Homo Sapiens; identical to SEQ ID NO: 345934

SEQ ID NO: 477857 - DNA, 1000 bp, Homo Sapiens; identical to SEQ ID NO: 345935

SEQ ID NO: 477858 - DNA, 1000 bp, Homo Sapiens; identical to SEQ ID NO: 345936

SEQ ID NO: 477859 - DNA, 200 bp, Homo Sapiens; identical to SEQ ID NO: 345937

SEQ ID NO: 477860 - DNA, 1000 bp, Homo Sapiens
ttttttttttatgcttttagtcatatgatttatttttttctgtgaagttgaaagttttaagttaatcgtgagtttcttggtaatatcctttcttcatccgatggctttgattttatcacttggttactttaactctgtgactggctgctgttactactgctgtcttctgagatagatctgctgcttactgttcccactttgctccaaaatctcttcattttattccatttaagactaacaatagcaattaaaatgagcaaaggtgaaaaaatgtagaaactgatcaaaagaccattgtttttaggagcagcacgtcgttttggaagcaagggtacacttttttctactgtaagccaaaatccatcattgatacttcctcctggtgatgacattgctggctcacaatctggaggagcataaccaggatcacattgacaatggaaatgttcattgcaaatcccattctgtccacaatttgtagtatattttgttatatttagttcactaaaatttctgcattctcgggagtgacataccttgtgttggccacatgcagttatatcttctgtataggtctccgattgttttgaaccatttcttgcatgtgcggacaaacatacgtgacctctaaggtaagtatattgtatgtctaagtctgtcattggtactagttctgaatgtatccagtgacaaacaatctttccacaaaggatatcaaaaaaatcacaacgggaaccacagtttccaaatttgtcattttgaaaattcacttcttctgtgcacagaagattagcagacttagcaaattttccaaataactgtgaacactgtctatccctttctctgcatactcctttaaagcaatagctagtcttattactgcagtattctaaatcagcagctttcacatcaggtacacaaaactcagatgttccattgcaatattctggaaaatcacacatatctacactttttctgcagacatggcctctttcgtgga

SEQ ID NO: 477861 - DNA, 1000 bp, Homo Sapiens; identical to SEQ ID NO: 345938

SEQ ID NO: 477862 - DNA, 1000 bp, Homo Sapiens; identical to SEQ ID NO: 345939

SEQ ID NO: 477863 - DNA, 1000 bp, Homo Sapiens
gcagctgtccacagtaaaataaaagtacttttttttctgtacaaatatctttattttcctacttaaaaagaatcacgtactcagtccaacagctttaccaggcttggccaacccaataagttacacactcactcaggtacttggaaggttattggacagctccttaaccgatcgagtcagcacaaagtggtcactttccccatagccagactctggatttgcctcctgggaggacaccatgcctggcacagactgatggggtggctgcagtcgaaccttgcctccagattatgaaccagtataagtagcacaattctcgtggctactttcacttcagagtgtcatgtttattgatgtggagctttctgagtagggaggttaaggcacacctgctcagtaaaacaaatatttcttttagtgttctagattgagggcagcagtcaatggtaaaataaattttggtagcatgttcctgagaggttatacagcagccctggctcaaggatttctccccctgcacgattcctaagaatacttgctagttgattctttgttttggcaatttgatggttttgatgaatttgctgtgatccaggggtattcaagtacttctctgagcattggcctctggctgggaacatgcttcaacagtcttgaaatgaggtccctggctccctctgttacaaagtcagggaatgtgaattctcaacccgtgatattcttttgtaggtctcttggtatgtatttgcctcaaaaggaggcttcccaactaaaaattcacagcaaagaactccaaggctccagagatccaccttctcatcatgcatccgaccttcaatcatttcggggggcaggtagtccagggtgccacagagagtggtcctcctggaagatggagcatgttctgaccacccaaaatttgcaatttcaagctctccagctgatccaagaagtaagttctctggcttaatgtctctatgaataactgtttttgaatgac

SEQ ID NO: 477864 - DNA, 1000 bp, Homo Sapiens
ttttttttttttttttttttttttttttttttttttttttttttttttttttttgatggaattaaaaagtttacttttggctgggcaaggttgctcaagcctgtaatctcagcactttgggaggctgaggcgagtggatcacttgagttcaggagctcaagaccagcctggccaatatggtaaaacaccgtccctactaaaaatacaaaaattagccagatgtggtggtacacgcctgtaatcccagttactcaggaggctgaggcaggagaattgctcgaacccagaaggcagaggttgaagtgagcgaagattgtgccattacgctccagcctgggtgacagagcaagaatccacctgcacaaaaagggcaggcaggaaggcagtaaagaaatgagcagggcccaaaccaggagagtgtggcatgccacaatggagactgaacagaaacaaaactacgggcgactgtagtgttgttcccttctggaatccagaagcttccctgtgccaggtggagccaccaatgtggggaggagagcacaaagagcagagaatccacagaaaccatacccttctacaaatactcgaagaagaacatccatgagaaaaaataaggcaatagctagagaaatagaacgatactccgaaggaatataaagtttgctgtcagtgaaaattaggtcggcaaggacgagagtgacatccagtaagaccaggaaaactccaaatagtccaaatgcaaaggatgatataattgaatgcacaattttcttaatcttgctgccattgtggtcatagttgtcagagcatacagtagaatctggtagtgaatccataactcctccactgtgagagttacccgaagctcggcttctgtgatggtccaggggacttccgaggcgatcgggcagcgtcaatcttcagtcgctaagccgaacagatcagatttgaaattggtgagatgtttcttgggctggtcggtctgaggacctgaggtcgt

SEQ ID NO: 477865 - DNA, 985 bp, Homo Sapiens
ttgaacagaaaaaaatttcacagcaaccacttttacaagagccccttttatgtccttgttcctcaggctgtagatcaaaggattcatcacgggagtcaccactgtgaacctcacagcagctgctatatctctctgagctgagtgggaggatgaagttctgaaatatggagacatgatggtgccatagaagaggagaaccacagccaggtgggagccacaggtggagaaggctttccatcttccctttgtggatgggaccctcaggacaacgcaggtgatgtgcatataggaagccaggaggcaaagaaatggggtgatcgtgactagggcagcctcagtaagaatcatcacttcactgaggtgtgtgtctgaacaggagagtttcaggaggggagtcacatcgcagaagatgtgggggatggtgttgtctgcacagaatgagagtcgagccatcagcagggtgtgcagcagagcattcgagttggcaaccacccatgatccagtgaccagcagggcacagagctgatgggtcatctttgctgtgtaatgtaaggggcggcacacggcgacaaagcggtcataggccatcacagccaggaggaaattgtccatgtcagcaagctcactgataaaatacatctgcatgagacagccagagaaggagatggtttgagtcctgagtatgtgattggccagcatcttggggacggtggtggagaagcagttgtccacaaaggacatgttgctgaggaagaagtacatgggggtgtgcaggcgggagtctatgcttatggccaggatgatgagcaggttccccaggacagtggccaggtacatgctgaggaagaacacaaagaggagatgctgctgctggggctgcctggagagtcccaagaggaggaactcggagacactcactggtttgtccctctcatatgtctggacccagctgcatagaagacagtgaattcagaaacatacacat

SEQ ID NO: 477866 - DNA, 1000 bp, Homo Sapiens
ggaggaaacaattttatagtaagagaaaagggtcccagagatgggaagaaaaccaaatatgacagcagggaaatacatgattatgttattggtgaaggtgtcacaacatgcaagatgggggagttgagaagggtcacagaagaaattaggaatttccgcatcctggaagcaggtcatttgtaaggcaatcaagttgtgcagctgggcgtctaaaacactggaggactgtgggtataggtgtccaagaagaaagctcaaatctgccgacggctggtaccttacttgggatttactatccgacaggtgtcagaacgcagcccgggaacagaaagtaagcaggtcatttgcaatctactggagcctggaggactgtgggtattaggtgtccaagaagaaagctcaaatctgccgacggcaggtaccttacttgggatttccgatccgacaggggtccgaagccacccgggaacagaaagaaagcaggttatttggaatctactatagcctaagagccgaaggcaggcaagagagttctcaggagctgtggggttttgtagactgtggatcccaaactttgcagtataagccaagactttgtatgatgtcacaaagggggcggggactgggaacctttggaagggggatcccaacaacagcaagtctttcatgagttaaaggaaaaacttctggcagcttcagccctggggctatccgatcggacaaagccttttccattgtatgcgtcagagagagaaaagatggcaggtggacttttaacccaaactgtggggccctggatgaggccggtggcctacgtctctgaacaactagacagggtttctaaaggatggcaccctgtttgagggccttggcagcaactgccctgctagtacaagaagcaaataagctgactcttgggcaaaacctgaacataaaggccccccattttgtggtggtggagagccagaccctcttccccccctggctcttgggaccccca

SEQ ID NO: 477867 - DNA, 1000 bp, Homo Sapiens; identical to SEQ ID NO: 161316

SEQ ID NO: 477868 - DNA, 660 bp, Homo Sapiens
ttttgtgctttgacttgctttattgagcctgtgcaggaacagggagtgagcttcggccagagccaacagtgtggaggggagagctgggctggcactgcccgtggagtggtagggggcgggaggtagtgttacaagtccagcgggctgagctctctgggggcagcagcatgggaagaccccactctgagaaggccagcgtgtcctctttgtctctttctccatacctggaagcactgtgcccaggtgccagcccaccggtttcatatccgcctgtaggcaccctcttgcccagggcacatgggcccaggcctggtcagcacagatgctctgtttccccaagagtggcctggaaggggctgggactggggctggagatggggcttgggctggggatagggtgtggccaggaatgtggagtgggcccagggtcccaggggctgggatctctctccttgtccatggcacatgcctaggcttggtcagcatgttgatgtatctacggagctcagctgtgtactgggccatctgctccggtgtggtattgtcccctgggtacaatggctccaacggggctccccgggcacccagcagtggctacagcaacagagccacacaggtggacaggagcaggagggagaggcagcggcatgcggcagccat

SEQ ID NO: 477869 - DNA, 1000 bp, Homo Sapiens; identical to SEQ ID NO: 345943

SEQ ID NO: 477870 - DNA, 1000 bp, Homo Sapiens; identical to SEQ ID NO: 345944

SEQ ID NO: 477871 - DNA, 1000 bp, Homo Sapiens; identical to SEQ ID NO: 161317

SEQ ID NO: 477872 - DNA, 1000 bp, Homo Sapiens; identical to SEQ ID NO: 345946

SEQ ID NO: 477873 - DNA, 894 bp, Homo Sapiens
ttttttttttttttttttttttttttacagtaacaaggtttgtatttcacaaacaattgcaagggtgaagcagatatcttctaagcgtcacatattcacaaacaattgcaagggtgaagcaggcatcttctaagggtcgcatgactgggtttgcagtccaccggtcagaggagcttcctctgattcttccgcagcagtcttctcttcgttcgtgccttgtggcgtttcttcgttttcattatcttcactttgtagctctttccacattaattgtctagctaatttgatgttcaattcttcgttgtagtgaagccttcttctcatttcgaactgccgctttttctcctgtttgtggaggaggatttttctcatgtaggcctcactgctctcttgctcgtccacctcacagctgtggtcggaagcatcggtggcttcctttccttcgacaccacgcactgaatcttctccttcgacatcgcgcactgaatcttccccattatcttgcacactcatgtaggaagtgccgggctcatttgccttcattaaatcgtaatctctgtacgttgcgcggtgtgccgcaaggatgcttgattcgtcccacttttgggatttctttctcttcacatcttgaatagtccctccagactgctgaccggaagtcgccaccgaggaacccgacgagcttttgtttttcaggatccccttgatgggccggtgcgaggaggtggaggctgacattttgcggagagaagggctgcgagagagttgggccgctgagtagccgtccaccgccctccagtctgaaactgcagggcggtctgtgtgggcaacaggtcccaacgccctagttaaagcaccagggccctggtgtcacaaagggcgctgcgtatgacg

SEQ ID NO: 477874 - DNA, 1000 bp, Homo Sapiens; identical to SEQ ID NO: 161319

SEQ ID NO: 477875 - DNA, 716 bp, Homo Sapiens
ggatccagttattcccactgtacttaaattttttttttcccatgagtttttattagcagtgaagtcatgattttggatgccggggtggggatcaccgggtactaggtcccccttcaccaccctgggagaaggacagaggacagaggagagggaggtgcagccagttcagatcttcccgggaaacgtgccttcagcccagtgcttgtcccaggctgtgacccagtatgtggggcagagggacttgtacacatgctggtaccattcgcacacagagatatcacctcctttagtggtcactgccttctgacagcagtggaagtccaggtagttctgctagcagttcctggtctggttctggttgggaagcagctgtcaaaaggggcagtcttgtagttcttgatttcggtctcgatgtcttcttccgccatggtgctgaatcccaaaggcagcctagatacaacttctgtatttaaattttgtagttgagtgactgagattcccactattggatcggacatacagagaagagcaattacagggctcttcaaagatgcaggtgctgccctcacaaatctattttgcaaagcactggtcaagggtatatcttctggacctttccagctgggatgagtaggtctaaagtgactaatgcactccaccatcccaatctccctaagctttcagatcccttgctctacattaaaccaagggagatc

SEQ ID NO: 477876 - DNA, 74 bp, Homo Sapiens
cgagccagccaggagtcgaacctggaatcttctgatccgtagtcagacgcgttatccattgcgccactggccct

SEQ ID NO: 477877 - DNA, 1000 bp, Homo Sapiens; identical to SEQ ID NO: 345952

SEQ ID NO: 477878 - DNA, 1000 bp, Homo Sapiens
cccgacatgccccgcggcgcgccattaaccgccagatttgaatcgcgggacccgttggcagaggtggcggcggcggcatgggtgccccgacgttgccccctgcctggcagccctttctcaaggaccaccgcatctctacattcaagaactggcccttcttggagggctgcgcctgcaccccggagcggatggccgaggctggcttcatccactgccccactgagaacgagccagacttggcccagtgtttcttctgcttcaaggagctggaaggctgggagccagatgacgaccccatagaggaacataaaaagcattcgtccggttgcgctttcctttctgtcaagaagcagtttgaagaattaacccttggtgaatttttgaaactggacagagaaagagccaagaacaaaattggcaaaggaaaccaacaataagaagaaagaatttgaggaaactgcggagaaagtgcgccgtgccatcgagcagctggctgccatggattgaggcctctggccggagctgcctggtcccagagtggctgcaccacttccagggtttattccctggtgccaccagccttcctgtgggccccttagcaatgtcttaggaaaggagatcaacattttcaaattagatgtttcaactgtgctcttgttttgtcttgaaagtggcaccagaggtgcttctgcctgtgcagcgggtgctgctggtaacagtggctgcttctctctctctctctcttttttgggggctcatttttgctgttttgattcccgggcttaccaggtgagaagtgagggaggaagaaggcagtgtcccttttgctagagctgacagctttgttcgcgtgggcagagccttccacagtgaatgtgtctggacctcatgttgttgaggctgtcacagtcctgagtgtggacttggcaggtgcctgttgaatctgagctgcaggttccttatctgtcacacctgtgcctcctcagaggacagttttttt

SEQ ID NO: 477879 - DNA, 1000 bp, Homo Sapiens; identical to SEQ ID NO: 345953

SEQ ID NO: 477880 - DNA, 583 bp, Homo Sapiens
ctgccgcgtcggccccttctctctatgccggctttcctttcttcttcgtcctctccctctcttctctttcgtcgtctctctcttgcgttatgcttttctttttcttttctttcttgttttcttttttttttttttttttttttttccttttgtttgttgcttaaggtacaatttccattttatttttctccagagaatagcctgtcttcagtctttaagaactcagctccttacatgggctttggtgggggacgtggggcagcacccgcaggtctaaatcggggtgggggtgttcggtccttgcgggcttcacgagatcgattcctgactactttgctgtgaattgcacaactcacacagtaatgtagcttcacatacagcttgggaagcacataggcatcgaagacgctcgcttcagaaatgtccctgactgctgcggcctccactatgtttcgaatgacgaatttcttaatggccttgtccttgggcacgcatcgggcacagttagtgcagcgaataggctgcacgtggccgcggccctttttggcacgaccattgttccttcttttctttgtcatcttgg

SEQ ID NO: 477881 - DNA, 1000 bp, Homo Sapiens; identical to SEQ ID NO: 345955

SEQ ID NO: 477882 - DNA, 1000 bp, Homo Sapiens
tttttttttttttttttttttggtgaaaagagatatgtatatttagaattagccagatggactcagtttggatgatcccaattttgttggcaacatccaaagcatcataatcaggagccagtggaacatatgccttcatctctccatcagggtgttgaccttggccccatcaatgtcacagagcttcttcacagcctgtttgatctggtgcttgttggctttaacatccacagtgaacacaagggtgttgttgtcttttatcttcttcatagcaaactcagtggtcagaggaaacttgatgatagcatagtggtcaagcttgtttctcctgggggtggtcttccgaggatatctgggcggcctccagagtctcagtgtcttgggccgctggaaggtgggtgacatgcggatcttcttttttttgtggccgtggacacctttcaacactaccttcttggcctttaaagcctttgctttggcttcagctttaggcgggccaggagcttccttcttcactttcggtgccatcttctgaaaagggtctcaagtgtatctttgaggtaactctactgggtttgaaactttatttcttcctagactttagctcggtccagatgaagtggtctcaaacaccgaaggaaggggactggatgaccatcagtactctgcatcagtcacaaaatgtgatccccaagccagggcatcacctggcctgttggatatgtaaattatccccactcaaggcctactgaatcagcatcccgtgctttaacaagccctctacttttcaaaccactgttctattccagacactactgaattgttctgtaactcctgctatcagcatatagttttttagaggactcaagagattcttctgtcccacagaataaggaagtaaaataataagtaggataagataatctccttcattaccttcctccaacagatgggtttcctggtatcttgtaaattcactgaatgcaattcctgccccccc

SEQ ID NO: 477883 - DNA, 1000 bp, Homo Sapiens
tttctcttcttttttttgcaataaaacatgtttaatttaattcagaataagatataataactcttcaataaaatatatacaattgtacaaggcaccctttcaaaggggtaaaggcatactggagggatgggagagatggagaggaaggtgaaataccagggagcttaatgggctgtttggcaactccattttcaccaagtcaaaacatggctttatcttctgccctggacatgttaaaaagtatataaaattttctaataagtttagcatatacagcaggtacacacacagagaaagcataattttttttctttctggatctaccaattgttcaagaatatttagcatacaggtaatggttacaaggtactcattttttaagcagaaaattactgtacccccccacccaaataatctttgcaatctgtgaggatgaaagtacctagtatttctcagaaaccatcaactcctcccaacaggctttaactttttactctccaattatctgaaatgaagtaaagcaacagccttgagaagaattaggaagtatttctaattttctacctcacctccaggcattctcaggattcttctcatcccggttattggtcttacaaaaaaaaaattcttcaaaaaggtaaaactgtaaaaatgtgtgtgtggggggggggtgggcgtggggagagataggaacaaatatggtagtatataaaaaggtttcttttaatgcaagtaaaatgcagaaatgtgatgtgtccccttcactttgaaaaacctctccatatctaatactttctatgtgcattatgtccaattctaatatttgttttccataagcagaagtcaatcatcccatcaaaatcattgactttagcaagttttgcaaataatttgtctccctctttaagaaaacacaacaaatggacttacacagtctctttaagaaggtgacatataggaaaaaagcacatatgtatataaattttgccttttaaaataa

SEQ ID NO: 477884 - DNA, 1000 bp, Homo Sapiens
ttttcttttttttttttttatagtttaatgtattttaatagcaaacttacaggaacagcacagaagacagacaacattaaaaacatgtacttgcatgtaggacaactcagttagaaaagtatagtgaatggatggaatctactgtatgataaaaatgctacaaacaccatttagttgccatcaataagaaatttacttgttttaaaaaaatccaaatgctggcattgtccagaaaaatttaacaggtttatttataattattataaagttgaaccgctgaaacttgttcactgaaacattttaacttgcattaatgctttacgtctccgcatttatattaaaaattcacacacaaatgaaaatggaaaaactgccaatacctgatttctgtcccctatttttccactcgcaatcatatacttaggtaccttttgaccccatggaaaaaaaatatctaacgttcagaactaccaataacaggaagaagagaaattttttttttttttttgagaatgaaatgtttcccatcatagtggattcttaagcacgttctccacgtatgcggcgtgctagctggatgtcttttggcataattgttacacgtttggcatggatagcacacaggttggtgtcttcaaaaaggccaaccagataggcctcacttgcctcctgcaaagcaccgatagctgcgctctggaagcgcagatctgttttaaagtcctgagcaatttctcgcaccagacgctggaagggaagtttgcgaatcagaagttcagtggacttctgataacgtctaatttcacggagcgccacagtaccaggcctgtaacgatgaggtttcttcacccctccagtagagggcgcactcttgcgagcggcttttgtagccagttgcttcctgggtgctttaccaccggtcgatttgcgggcagtctgctttgtacgagccatggtacagagacctccttacttaccccccttctccttcggctggagctcg

SEQ ID NO: 477885 - DNA, 1000 bp, Homo Sapiens; identical to SEQ ID NO: 246620

SEQ ID NO: 477886 - DNA, 1000 bp, Homo Sapiens; identical to SEQ ID NO: 345959

SEQ ID NO: 477887 - DNA, 1000 bp, Homo Sapiens; identical to SEQ ID NO: 345960

SEQ ID NO: 477888 - DNA, 1000 bp, Homo Sapiens
aaaatgtgctcagtgttaactttattgataataaccaaaaacaaacctaatattttatgattttaaaattatttttaagcacaaaatagacccatgttggggatgaataacatgtctgagtttgttaattttgtctgctacttttccctatatttccttgtttccttcatcctaaaatttttaaaaatgaaaactttaatcattgttgcatgtttaaactattgaatattttcttttgttaactgaagtaaaaggaaacattcttgtagaattatggaaactaataatgcagtaggacttaaaattgaatgttaggaggttcttcgttttaagaatcttcccgtgggagaagtttccatcgaactgttatatcaattttatcatcaacatttcccagcgcctgctctttacagagttctaagaacacctgctccaaggtagcctgagagaggctgtattcctccaggttgaaggtctgtttcactgcctttaatttgaaaaaggcctgagacagagggtggacatcctccacaggtaacttacatgccattaaagaggaatatctttcctgccaagcagcctgtgggaaaagcttcaaaatctctgtgtggagagcttccacctgagtaggttctttcatttttatttctagtaaataatctttaccaaacttttcagctgttgaatggaaccaatacaccttagcgttcctgacaccatgatggccacacggtcacacagagacttagcctctgacatgtaatgggtggtcaagagggcgcccctctcctggtttttaatggtagcctgaagtatctgccacatttgctgctgcccctcagggtccatcccggtgaacagctcgtctagaagcaccactgatgggttccccagtatgctcagcacgaagcatagctttctctttattccctctgatagagttttcacgggagccttaagttgctcctggagcttgagagcttccaccaatcatgaaata

SEQ ID NO: 477889 - DNA, 1000 bp, Homo Sapiens; identical to SEQ ID NO: 345962

SEQ ID NO: 477890 - DNA, 1000 bp, Homo Sapiens; identical to SEQ ID NO: 161322

SEQ ID NO: 477891 - DNA, 1000 bp, Homo Sapiens; identical to SEQ ID NO: 345963

SEQ ID NO: 477892 - DNA, 1000 bp, Homo Sapiens; identical to SEQ ID NO: 161323

SEQ ID NO: 477893 - DNA, 993 bp, Homo Sapiens; identical to SEQ ID NO: 161324

SEQ ID NO: 477894 - DNA, 1000 bp, Homo Sapiens; identical to SEQ ID NO: 246621

SEQ ID NO: 477895 - DNA, 1000 bp, Homo Sapiens
tttcactgaaatcaagattttactgggcaacttcatactgccagagtggttgggaccagcagctccactccccactgtaggccaagtagggctaaggcaaagtcagacaccccccctaagatggctatctctctgctcccagaccacgtgtgatgaggcaggatgggcagctcaggtggtgtctccattgaggcagggtgctttgaggggctggggttgactccaagacccccgcgtccttggagaaagctgcaggctctggacagcatccctcagctgagcctgagttctctccatctcatttaggcggtgctccaggtttttcagactgtgcccttcattgcttgttaggttgtgctctgaatcaaactctgagctcccagcacggagcctggagtccagatcctgcagctggccccgcagctgctcctgctgctccgtcaaggcccggatttgggtgctcagcgactccacgaggcgggacagcactttctgctcctcacgcagagcggccacctcgcactgcagctctgccaacttgttcacaggtcggtgcgtgcccagtgcctggtttcggtcttgcggctggtccatttggcgctgccagggtaccgacggcttccgaggcagcgaggcggagtcccgggtccaaggccgggcgcggggcgctggtcccatgctcagggagcctttgggtcgcggccagggccccgcagattggcggcggcgggcaggacgccggaccgggacactctgcgtgcgctgcaccggccggggccgccgcaggggccgctcttcgtccggccgtggccgggcccaactctctgagcggcgaacgctgcgcagagactggctcttggagatgagaggggtgtgcttggggaggtcccggggggccaggaagccgggcttctcccctgcggagaggctggagtggacctgggccgggggcagtgggagacgcattggcactgacacaagcacaggctggccctcctca

SEQ ID NO: 477896 - DNA, 1000 bp, Homo Sapiens
aatcagaacagtaatatccatggcttacttttattttttattataaaaacacatacaagagttttaagaaataacgaatataagacaaatcaaaaccatggtgagttattaaacccattttctatatacaaatactaaaattcccaaagtggaatatcatccaatgtgagacacatcatagcacggtccatatgtacacggcacacagagctctgcctgcgctcatctgtgaattgctcattacatgtcactgataaaaaaatctgcaagggaacttctactcttcagttctcctcttcctgatgcattgtcacatatttttaaggaactttagggatatgaagaaaatgcattaaagtgggtttctgctaagggctctgcatgttttgctctgatcaattacgcactacatcttgagaaaaacttttgcaactcatttccagcaaagatagcagaaaactctaggtttttgccaatttattttttcctagtcactcattggaacacaagtccaacaacaacagctcaggaaccaaatcatgtttttatattggtaagttcattataaaatgccactcaattttaagaagccactaaaaggacactttctgcagcaaaaaaagggctaagttcaagtttttgttgtttgacaaagacacaataatataacccatatgtcacagatcacaacagccttaagtgaaacgtattagatttagggaaaaacgactatgcgactgcttgtttctcctgtctccttgccaaacaataaggagagcctctggtctgttttatctattttatgtctttttgttttgaaacctccctttgtattctgaaagctgatcaaactatttgtgttcaaaatgtgtcaaggcacttctcaagcctcagtggcatcccaggtcagccaagctcctctgtgctcagggcactgacttcctctaggcagctgacaatcgcagacggaacgcttttggaggcctctctccgccaagct

SEQ ID NO: 477897 - DNA, 1000 bp, Homo Sapiens
tcacttgggcaggaagtcagaggactcagacaccagcttcccatcgcgggtctcgatcttcttcacaaccacggccctggtggagctggtgcacctgaaggagctgaagcctgtgccagagccaaagctggagcccaggccatagctgaggtcacgagttgtgaggcccacataggccgagctcagatcacctgcatagccgctggtggtcttcgtatggatactcatgttctgcatcccagactccagctggctctcctagctctcccgcagctttctgtaggtggcgacctccatttccaggccagcttgactttcatagctcctggtactcacacgttgcagagtggcctccagcttggagagcttggcattggcatccttaacggccagctccccacgatgctcagcatctgggatggtggcctccagggaagccccctggccttggaggccctcaatctcagcctggagctggctgatgttccggttcatcttggagatctgagtctttgtatgccgcaggtcatccctgtgcttcctagccagcgtctgcagctccacatacttgatctggtacgtgctctcagcctcagcccggctgcagttggcaacctccttgtactgcctctttacctcagtgatgatgctgtccatgtccaggagtggctggttgttcatgtaagtttcatccacatccttcttgatgaggacaaattaattctccatctctgtaggcttattgatctcatcctcatacttgttcctgaagtcctccaccagcccctgcatgttgccaagctccgcttccagcctcagcttctcctgctccagcagccgcctaaggttgttgatatagctcccgaacatgttgtccatgttgctcccagccatcttgtgctgctgcagaaggctccacttggtctccagcaccttgttctgctgctccaggaaccatacctggtctgtgaaggaggcaaacttgttgttgagggtcttg

SEQ ID NO: 477898 - DNA, 1000 bp, Homo Sapiens; identical to SEQ ID NO: 345967

SEQ ID NO: 477899 - DNA, 1000 bp, Homo Sapiens
tttttttttgagagcaggtactgtttattaaccgaccagcttagaaaaataatcatggtagacaccttagttcattcttctaataagcctgttgacctggtcctccctgttgccagcatctccaccttctacaaaatgggtggtctttttcttcattccacctcgtggagaagacaatttgaaggcccacaggaagttatttgcctctttgaagccttttccaacagtatagatctcatgaatcagatcctccatgcagatgatgccgtatttaccaagagatcgagcaatcaaagtgttatctgtcaaagcaattcgcttcttattcattttgccataaccacgcttgtagattagttcatttactgacttcagattggggtacccccatgcaatatatggctctacaatcctcagcatgttaatcgaagccttgtcgagcttcacaaaggtgccattgaagatttgacgaaggcgaagaagctgcaacacctttcggacctttgggctcacgccattgacacctctgattctgacgacaaatgccaatttgggttctgcaggtacatagaaattgccagcttttcttgccatcctcgcctttcgaatttcagttctgtacatctgcctgtattccttgtgatagtgctttgctttttcatagataagcttcctccttgtctttcgaagcgtcttttgggcaaacttctttctcaggcgcttgatcttcagctctgcaaaattccttcgctttttcttaagggtttctggcacagcaagaaccttcttctcttctacacactccatggttccagctggaaaaagagcgcagtctgcatcttgtggcctaccgaaggccactcctgcatgcgtttttccttctcctaattccaccatgtattctctttgatttgtcaatgttaatagccagtacatcaaattttggggtctctgtagaggtccacagtgtccttcttttccttctggctttgtacattct

SEQ ID NO: 477900 - DNA, 1000 bp, Homo Sapiens; identical to SEQ ID NO: 246622

SEQ ID NO: 477901 - DNA, 1000 bp, Homo Sapiens; identical to SEQ ID NO: 345969

SEQ ID NO: 477902 - DNA, 1000 bp, Homo Sapiens; identical to SEQ ID NO: 161325

SEQ ID NO: 477903 - DNA, 1000 bp, Homo Sapiens; identical to SEQ ID NO: 345971

SEQ ID NO: 477904 - DNA, 1000 bp, Homo Sapiens; identical to SEQ ID NO: 161326

SEQ ID NO: 477905 - DNA, 1000 bp, Homo Sapiens; identical to SEQ ID NO: 345973

SEQ ID NO: 477906 - DNA, 1000 bp, Homo Sapiens; identical to SEQ ID NO: 345974

SEQ ID NO: 477907 - DNA, 1000 bp, Homo Sapiens; identical to SEQ ID NO: 246623

SEQ ID NO: 477908 - DNA, 1000 bp, Homo Sapiens; identical to SEQ ID NO: 345977

SEQ ID NO: 477909 - DNA, 1000 bp, Homo Sapiens; identical to SEQ ID NO: 345978

SEQ ID NO: 477910 - DNA, 1000 bp, Homo Sapiens; identical to SEQ ID NO: 345979

SEQ ID NO: 477911 - DNA, 1000 bp, Homo Sapiens
tcacagggagacacctgggtggcagctcctatggagcaggagggctgcgacttctgtgaagccggctccacactcggggcacagatagggcttttcttccactagggttttggggttttgcccttccccatggctgctgctctctgtgggggtaggggtctcgccctcaccttcctgatctgtggacagggtgactgcctctggaggggggtcctcgggattggggggtttttcctgggtgtgggtttcttggtgccgggtgagggccacgcggtcgaggaaggaggccctgcaatctgagcagcggtagggtctggcccccagggggctcctgagatgctccaggaggacggaagagctcttccccagctctggactcttctgggagctcttcccgcctgcatggactttctggtgcagcagcagctcagagctgaggccaaagctttgtttgcattcagggcatttaaagggcttcccacttaagaaggggctgggccctgcgccttcccctaggccaattctataatcaggaaagagaaagggcttttcgttgccgtgggtgagctgatgctggaggagcacagagcgatccaggaagctctctccgcagtgggagcagatgtaggtcttggaggacagcagcccccgcctctggctgaagccctcctgaccctccggcggcttaaggggctgtccgggggcctccgctctgccctccgcagccccggggtaggaattccctctgaaagggagccttggggatcgtaactgaggaggtttgggggctgcgtgtgcgatgaggccgtctgcatttttgtaggggttttctccgatgtggatcctctgatgttgcatgaagatgccctcgtcgttgaagccctttccgcacacgagacacttgtgcggcttggctcccggcggcggggtcagcagggaggggtccccgagccccagcaggctgtcgccctgggccctacgcgctggggtcttccccctc

SEQ ID NO: 477912 - DNA, 1000 bp, Homo Sapiens; identical to SEQ ID NO: 345980

SEQ ID NO: 477913 - DNA, 1000 bp, Homo Sapiens; identical to SEQ ID NO: 345981

SEQ ID NO: 477914 - DNA, 1000 bp, Homo Sapiens; identical to SEQ ID NO: 345982

SEQ ID NO: 477915 - DNA, 1000 bp, Homo Sapiens
gcagttctgccgttttatttttcctgggatattcaaggggatgtgggaacagccacaggtgtggtgaggggaagcccccatctcccctccccagccgctgggaaaggggagaggcccaggcgccctggtcctgggttggtccagccactgtggtccctgggcccagtgggcagagggctgaggatggagcccctgggagggtggggcgggctcctaggcagggttcgggattcttcataaaaagccacgaagcttgatccccacgaagcccagccccgcggggtgggggagggggggacgcagagcccagatgagggacccggcccggcctggcccgtgggggaaagaatggcagagatggtgcccatggggaggaggtggggacaaagcgtcggaccaggtgggcaggggatccaggtgaggggcgcagggcggagaggcacggccccctgcccagcccgggcgccttcgcgtgggatcaggaaggtaaaaaacccacgagagtgtgacgggcccgggggccggggcgtccggtgccggtggggcgggcgcacggggcggcccgcgttcacagtgacctcgacgctgggtgtacagtacgggtggagaaccgcgggcccgggccgggctgggcgggccggaccggtcacagcctggtctgggcctcggggatgtagatctcgatgctgtcggcgctctcggtggccgagctgtggcggaaggaagcggcgcgcttggccgccaggagccgcttgcgcgcttcctgccgctgccggtccacggagtccagggagcgctccttcaccggcacgccccggccccgcaggggcttctttggtatcggcggagggaccttcttctcctccttaggctccaggagtttccagctgttggccttgagttgctgtagctccaggaacttgagggtcacatcctcgatggagagctgtaggaggtcccagaaacccgccaggtcctggaaggtgggcacagggaacgc

SEQ ID NO: 477916 - DNA, 1000 bp, Homo Sapiens; identical to SEQ ID NO: 161327

SEQ ID NO: 477917 - DNA, 1000 bp, Homo Sapiens; identical to SEQ ID NO: 345983

SEQ ID NO: 477918 - DNA, 1000 bp, Homo Sapiens; identical to SEQ ID NO: 345984

SEQ ID NO: 477919 - DNA, 1000 bp, Homo Sapiens
tcagctgccgtccagctgcctgagcgcgcgctcgatgttcatgcggtggcccacgcgcgtgacgcccagctccacgaagtcgtccttggtaagcgcgggtaggtgcgcgccttctatctcatggtcctcgaagcggtcgcggtgctcgcctaggtggatgctctccagccagtcgcccacgtcgaacttgctccagagctgcagcggcttctgctggaagggtcggcgtgggccgggggcgccggggccggggccggacgcgggcgagggcagcggcgacggcgagggggagcgactgcgcgcgctcacgctgcgcaccacgaagcgcacctccttgggctcgtgcgggatggagaggctggacgacttgaggatggtggggggcgtgaggccgaagggccgccctgcgccccccgcgcccgcccccagcccctccacccgctccagcgacgcgggcttcaccgggctcggggcgcgtctcgccacggggtagcggccactgggcctcaccgagtacgaggccccgccgcccgggcccccggggctgcgctgcgctgaaatggagctcagctcaccgaggctgctgaagagccggactccagccattaggggccgcaggacaagagctgacaacagccacggtgggcacacaaggaccagatctgaaacaggactggactcagacatcaccaagtgtcctgtgctccgctccgctgccacccccccagacccaaagaggagaggggagacgggcccgaagggctcctctttggaaggagccttgggagtcgggtcctcaaggaaagaccgagctgctgcgatgggcgacttcttggcagggtccagcaggctgcccaggccaccaactggttcctcccccagggaacgcgtgtccttgttcagctgctgcaggcgggagctgagctcactgatcacagttggtttgtcgtcttcaggcccagggagcccccggctctccacggggtccccccatagcttg

SEQ ID NO: 477920 - DNA, 1000 bp, Homo Sapiens; identical to SEQ ID NO: 345985

SEQ ID NO: 477921 - DNA, 1000 bp, Homo Sapiens; identical to SEQ ID NO: 345986

SEQ ID NO: 477922 - DNA, 1000 bp, Homo Sapiens; identical to SEQ ID NO: 345987

SEQ ID NO: 477923 - DNA, 1000 bp, Homo Sapiens; identical to SEQ ID NO: 345988

SEQ ID NO: 477924 - DNA, 1000 bp, Homo Sapiens
ctaaggcgcaggcgcggcaccgccctcctcggcggagcgcgtgtccgacttgagcttcacgaactccttggccacctcgtcgttgctgcgctgcgagaggattcgcagcaccgtgaggcccgtgtcgtccatgtggatgcggcggccgagcggcagccagcaggcggcgctcccgcgctgggccagctcacgcagctgcagcacggccagccccaccgtgcggtcctcgcgcgcgaagcagtagtccttgacgcacacctgcagctcatagcactcgggacccgcgtcggcgctcagcgtgaactggaagctctcattgtacttgggagcccagctattgttcttggatttggtcgcaaacttgcgtttcttgtcgctgagctggggcccaatgatgttgacctcgatgaacggccggaagatgccagaagtctgccacttgaggtcattggcagccaccactttcactgtgaccttgtgttccccagttcctggatgagtgaacagctcaacatggacagagacttcacccacagggtcttctacacccaagccctgggccgattgcgtctgtacaaaggtcttgattagcaggtcggtggcctgcgtgtagagcgacagggcatagcgcaaggattgcaggtccgggctcttctccaggaaggtcttcttgaggcccacgccacccgcgtggaaatattgcttgatggtgtccagggccaactcaacaaccgcgcactgctttggggtcaagctcttggcttcttctcgtaccatgtgatccttgagtttggacagctgacccagctccttggctgcattgaagatcatctgggttcccgtctggtcagtgaggggcggcaggacgatggttttctccatggtgttcataaccagcttccacagctccttcagcactcgcttcagcacagtcttctcacagattttggcaaagagggtcaggttgctgtccagcaggtccatgatgggctgcaacaca

SEQ ID NO: 477925 - DNA, 1000 bp, Homo Sapiens; identical to SEQ ID NO: 345989

SEQ ID NO: 477926 - DNA, 1000 bp, Homo Sapiens; identical to SEQ ID NO: 345990

SEQ ID NO: 477927 - DNA, 1000 bp, Homo Sapiens
cgtggcttttgaaacaggtatgtaggctttcttgtttaatagcagttaaaagaggaaaatgtacaagaggaataaacatgctcttttcacagaggagctttcccctaaccatgcggcccatctgtatcagtagctttacaagtaagttttagagaaaaaagttccctttagagttaaaaatggactttcctaattttctctatatatgtgcaactatctgtgtaaaataaaaatgccatttccaacacctttgtgaaaagtaattgtgaatgcaggcaaaaaaaaaaaaaacaaaaaggaagaagaagaagaagaagaagaggcaattgcagtcaagagaggagtcctgggagaagggaggctaaggtaggggaatttctgcagcagttcctagagagtgtgctcagaggcctgatgaggaaggtcatggccaaagccagtcttgggagataaaaggccgtgggtctgggacttgctgagtaagcacttgtcaagtgtacagtaaggctagactgacttggaggactggtatgcaatgagaacagtgggcaatgcaccctggaagctctacattccctttgccaacaggatctcacttcctggttcccattttcaggtcctgttcttccctacctgcaacagcttcatttatagcctgctcaaagagattttccctatgaatgttaaaatgatgcaagcagcctatattactactgaaacctaatagagtcccaaactgaactgtcccttcaggaatatagacctggtttcctcaagaacttggccaagggttcatcctgaccagaagccatacaggcttctagccatctgtgtgcttgccctcttattgaggccctccacggtacttctacatctctaggtatttgaggccatatctgaggagtctgatgggtctgggcacacatgctttgcacaagtcctctcaagggttggcccagctacaggttatagacaaaactaaaaacatcccacttttcta

SEQ ID NO: 477928 - DNA, 1000 bp, Homo Sapiens; identical to SEQ ID NO: 161328

SEQ ID NO: 477929 - DNA, 882 bp, Homo Sapiens
tttttttttttttttttttttacaaatagcacgttttatttgccactatttgaagtctgaactttaaacagattcttggactggtggttcatatccatcagctcgttcaactttagcacctgtctcgtccccagtggcttttccagaactactgccttcaccatgaagctccatgagctttcccaattcaaacttgggcttcttcagcatttttacttttctaacgaagacatcatggagaggataaatagattggcaagccttttctatgtcttttccaatgctgtctggaatcaatttattgaccacttctttcaagtcatttgtctgcacctctcggatcatgatttccatcatcttcttccggatttggcggacctgttggtgctgagcataagaggtcttccgtatctgatttttgcgttttttagtaaaaccaacacagaacagacgaagcaagtaaccatcggtagtcttgacatcaacgtgagcttcaatcattgtctgccattttttgaccatggaacacattttgtcacgggtaagatccatgccatggaagttagtcaggcagtttttaccctgaacatcttcagtaatcagcttgaattttctaaatgcaacttcatcattctgcaaatcagcaagactcacttcaaacacacgacccttgagaccatcagacgcaattttggttccttgggtcctggtgacgagcgtctttccaatatttcttatattgaacatagcaggtgctttcacatcataccaatctttcttagaaaatggatcaaccactttcttcttggctccctttttgccgcctttcgtaaggcgcttgttcttgccaacagccatggtgctggtgagagagccaaaaag

SEQ ID NO: 477930 - DNA, 1000 bp, Homo Sapiens
aggtgttagatccttctttcttcaaacggaacatccaaaaagttggcttctgatatccttgagccccaaaacaccactcatcccaccctccccactctcctacaacccaggtcaggctgggagccttttccataggaggtgatgtgggcaaatcttggggaccctgtagttcccctccaagattatcttgctctgcctttcctcaacccagaagctccaggaacaccttgggaccctcagaagaaagacatcaaagagagagaacccaactctgaaaaacgtccagcagacaggactgtgggaggccaacacaagctccttatgaacaaaggaggtgggaagctgctgcagggaccacactcgcccgctgggcctgctgatgccacaggcccacctcctgccagccctgcatcctgcttcctgccctttgctgtcccccgacccctcgtgatgtctccaccccagctcctgttataagggctcagcattcattaatagtagaaagaaacatgaacagacaactgggagatgagcaagagagtgagagacacagcagggacatgggcggggagcagggggagtagagtccttagcttcctctcaccaaccaagtctccatccagctccgtcctctggggaggacatgcccttcactcaaaacaccaagtaggagcttctcagccccctccccccggcttctcctgagagacaccccatgattctctgcccctggctgacacaagagaagacaaagagggcacaggtgagatgctgattggtgagacctccctcagggaagacgaggaggaggtaggagggccaagaaggaccagagagtctccaccttggcttagcctgggaggcgctgccatctaaggtgatgttttctcagagatcacagccagatctccatgtggtcggggtgggcgtgaggtgagcccctcctcagaccccatctccttgaggagctcaggctcttggaattcagtatacacacaga

SEQ ID NO: 477931 - DNA, 1000 bp, Homo Sapiens; identical to SEQ ID NO: 161329

SEQ ID NO: 477932 - DNA, 1000 bp, Homo Sapiens; identical to SEQ ID NO: 161330

SEQ ID NO: 477933 - DNA, 1000 bp, Homo Sapiens; identical to SEQ ID NO: 345993

SEQ ID NO: 477934 - DNA, 1000 bp, Homo Sapiens
gttcaaaaacttttatttactataaagacaaaaacaccaaaataggtacaaatactataaaatcggttcaatggggtaaaaattttaattaaaatatctcaatatatttaaaataacaaaggatacatttaagccaaattttcttaacccagagattttttttttttttttttgtaacatttgcttacacagtaaggtgctaatagaagttagcccttaagccctggaaatcttaggaatcatagtcacacagcaaatataatttcattgtgaaagtgaactttggtagaagaaaaatctataggacacctgaggtagtagaaactggaataaacagtagtagacgttatttacaacttgagtaccaaataacattaagaacacaaaaataattacacgatacaatttccagtccagctttgatccaaagaaaataagaatattacatcacatttgcattgaaaacaaaacaaaaaacaaaacaccacaattaccagcaagctgagggaactgcaaacaaactcaaacacaatggattttgaaatctacagatagtttgagtttgaaatgtggtgggcatggtgatctacaaagtaatactgattagctgaggttcctcagtttatacagtttacatttttgtcagacacagtattcatctgaccaatgatcttccagtacataaaatggcaagagtgcatcctttaaagcttgcacatgagagacttggaaacaatcttattagaattgtgaaaattctaagtagtcaaaaaaaaaaaaaaacaaaataaaaaagaaagtcaagtacaacacatttagagataccaaacttcacatttctgtactatttttaactcttcaaatatcgccaatcttccaaaacaaaggaatgtaaaatttcactaagaaacatattcacataaaaaacaaactgccttttaaaaattgtaagcaatatatccctgtaaacttatcttgtaacttattttatttccaattt

SEQ ID NO: 477935 - DNA, 1000 bp, Homo Sapiens; identical to SEQ ID NO: 345994

SEQ ID NO: 477936 - DNA, 1000 bp, Homo Sapiens; identical to SEQ ID NO: 345995

SEQ ID NO: 477937 - DNA, 1000 bp, Homo Sapiens; identical to SEQ ID NO: 345996

SEQ ID NO: 477938 - DNA, 1000 bp, Homo Sapiens
gggatagtaagatgaatagatttaatcattcttgtttgaaaaacaagacataaattagtatatatataatttatatattttatgtagtatatatactatatacagacattagaaaatgtttcctctccatgaggctgagggagaggtgaaggatggcggtggaatgacacaggcaggggctgagtggcgaagttgggagaaaaagaagaccatatcagcactccagcttgcagtggctgaggggaaaaggattccccactggctgcatctctggcccattcaacaacttggtcctgggggaggagaagcaaggaagtgaggggctggattctgcagaagaaactcccctcctccttgccgggagaactcaccactcagggagactttattgcactaggggctaccaaggatgggcagggattaagcacagtgtacatctttataaaactcacatcagaatgaaagatttcacatgggcctctgacacagtgatgaaacagaggcagacacagggcacaagggtgtgggaaatggggagatatggagaggcggacgagaagcaatctatacagaagaaacattggctttctttgttccctacagtgggacagttggtagggactccgtgtcttcactcccaggaaggttgcgggggtggggggcgtggggggagggttggcagcggtggtggcggtggtggtggcagcggtggtggcaataggaggtgtgtgtcaaggtggatgttaaacagtgtgaattcccttccagatggctccagagagggagaaaggtgcaggactgcaccgggtaaggcgctcagcttcttttcttagagagacaaatccacagggtcaatacacagccaaaagcatatactcaggattaacatatcacgctagcttccagaagtttaagatatagtcatcaacaccccccacccctacccctttcccccctccccccacccccctccccgatccacagctaagtcaaactccca

SEQ ID NO: 477939 - DNA, 1000 bp, Homo Sapiens
ttttttcctcatatttgctaaaaaaaaaaaaaaagtttttcttaataaattaagtgaggggagctgccaatggggtggaagggctgggcccgacccccttctcggccacaggcgggacctaggtccagcccaggcatgtgctggtggccccgcggcgccttgcgcgggcaggcaggcgggcggggcgtccggcctcatcgcgacgtgctggctggggccagcgtgaaggcgtcgtaggcctgagccagctcctcagtgcggtactgctccagcaccaccacgccctgcaggcctgcgctgcggcgccgggcacagccctcgcagtgtaccaggtacgtgttgcggctgccattctcacttgtcacgaacaggatgttaaacacctccacatcgcactcgttgcagtagtaggctggctcgtccttgacacggccctggtaagcgattttcttccctgcccgcaccaggctctcgcgttgcacctggcagtgcttcatggactgcagcaggcagaacttgatcatcttgaacaagtcggggtcgctgattttgaccgtgcgagccacgttccatgacacgtgaatcatgggcacgatggatttgacgttcttcacctcattccactcgtatcgttccagggccagctggtactgataggcggtgaggggccccacgttccaggcaatgttgttgcaccagccggtggcctgcacccagtgcacagtccccgcattaatccacacgaggtctccgggtcgctgcacgaagcggtacacaggaatattggatgcatagagatcatccaggattggccaccaggaacccgtcaagtagtccacgccgtgccgatcacagaaagcgctgatggtctcccagtagtgctcgtgcaccgcgaaccactcgcagtcgcctgggccaatgttgatgttgacggagcagaagttgttattctcctggtggcctggcgttcggctgccgggcaccttcatgtacagctgca

SEQ ID NO: 477940 - DNA, 1000 bp, Homo Sapiens
ttaggagaatattcggatggcttgcgtggctgtgatgtggcagacgggacactctgggtccgtcctctcgcagatgcgtactgcacactccatgcagaacaggttgtgtccgcagggcacaagggcggcagtcacttcgctctcaaagcagaccatgcaatcccgcccgccgccggggctccgcaggccgcccccaccaagtttagagaagccctggagcggctctcccggggggcgcctcgggagtccggccagctcgggtcccgcggaagtggcaggggagcggtgtgcgcccgggggcccagcgcgggcgccgtagtacacatcctgcttgcccacgccatagcccggaaagaggtacccgccgtagccaaagtccccgccctgctcacccaggcgtggggcctcaaagccagagtccactccgcactcgccgatgcagcccaggctgttctgccggaaggtggagaggggcttgcagccgggctggtgcacccgccaggcgtcggagtagcggctatcgattgctgcgtcggggctccccgccaggaagtcgttttcattgttgtactcgaggatcttgccagtgcgcaccgcgatgtgcgtctcgatctcctcgcgcgcacgctccacgttgcctggggcacccgtgatctcgaacacggggtcgcggtcacggcttggtgtgataatgtatgtgttggtttgctgctggatgcgcttgatggttgcccctttggggcccaccaccagccccaccacgcggtagggcacccgcacacggatggtcacctggccgggcagagcaggagccacaccaaaggcggcgcctgacttgttgcgggaggcacggatcatggagaagtgctccgctgctgagatgatttcccgccgggctgtggccacgtcctcccgtcgccctgtcaccatgaacactggttcctcgcccctcaccggtgtcttgatgtaggtgttggtcttggccctcaaggccttaatc

SEQ ID NO: 477941 - DNA, 1000 bp, Homo Sapiens; identical to SEQ ID NO: 345999

SEQ ID NO: 477942 - DNA, 1000 bp, Homo Sapiens; identical to SEQ ID NO: 161333

SEQ ID NO: 477943 - DNA, 1000 bp, Homo Sapiens
aaggaggcaggtgagaggccgggcgggcaccacctgcatctggtttattgttctgttttctccaaacttagcagagcagaatgtgaggccacctggggggcggctgggcccgctgcgtggggccagccagagtcattgtgagtgtgtggggccagagtccatgagacatccactgggggaagaccccaaatacaggaggcctggcaccccctcttctgcctcctccatgcccaaagcccccacagggaggcatgatgcggcaagcatgagagtgcaggtctcaaaggaagtgggggcagctgcggggccaagcagctgttggaagctccacgggagcctgggcaggcctcccgaggctgcggggcgccaccctttcgctgcagagaagttgggatgctgggccagttgagatgggtcagatgcaaacaggacctttccaggtcacttctccctgagctgtcctctttcccacggtccccatcccacgctcccctcactcaacaaccctggtctgcacaagatccatctctttcagaggaaccaagacccagacagtgaggcccagaatcccagcacctccctgcgatgctgtcctgccaagagcatctgcacagtgctggggcttctgactaccccaagacagggaggcgagagaagcctgtggggctgctagcggggaggcttgagcatggggtgaaggcctctccccgttcagctcacgggttgaggtccgcccatggccctggccctgcatctgtctgtgccaccatccggggtgtggctgtgaatcccagagggacctccagtccgggctccatgggaacagctgcagaccgtaattaggagtatgccaggccctgaagcccccgggctggagagtgaaacttgtcagaatcctcaaaagactggtctggaagcccctctccgtgggctctggggcaggcctggggtggggagcttggggggcgcagcacgggggcgaaggcgctccttggcgaag

SEQ ID NO: 477944 - DNA, 1000 bp, Homo Sapiens; identical to SEQ ID NO: 246624

SEQ ID NO: 477945 - DNA, 1000 bp, Homo Sapiens; identical to SEQ ID NO: 346002

SEQ ID NO: 477946 - DNA, 1000 bp, Homo Sapiens
tcagcagagaaaagattgatcacacttattagagtcaaagatttccaacaaattaacaagcaaagggcaaacatcttaaaacaaaaagacaatgcagaaaagaaaatacaaatgtctggcaaataagtggaaagatgacttcattcatgattaaggaaatgcagcttttaaaatcggttttcctcctaaataggccaaaaaaaacccaaaagtctgagaatgccaagtgttggtgaaggtgtagaaaaataatcagtctcctaccctcttgggagaaatgtaaattgacaccaccatttcagagagcaatttggcagtttctctcagaatactgaatgcccataccctttgccccagaaatcccgtacggaaatctacctcgcagaaatacttgcacgccatgcaatcatgttcatggcggcaatgtctgtaattgatgaaaaattggagctacttaaatgttcatgattatgggaccagctaaagaaaatatgacacatccctgccttggaatttcatgcagtcaccaataaagattgggtcaattcagatggctgatacagaatatagttaataaagtaaaaatatagtgagttgacaaagcatgaccacactttcattttttaatttgcatgtagtgtgaccatgaataacacacacacacatacacaccgctagggagtttgtgggacttatgctttttgtcatatgcttctattttttatggacttgtttttactgagcatgtattacttttagacttttataattttttaaaccaaaaacataactgagtaataattgaaaatttaaagtctataaagacaaacgcattatgtttcatttcttaagcctgagtctactttcagccagagcaactccaggctgcaagtgcagttctatgaagattgtacctttattaggttggtctcaggtattgcatgcaggcgggcacacatgccacccacacctacacacctctacacacacacaaagttct

SEQ ID NO: 477947 - DNA, 1000 bp, Homo Sapiens; identical to SEQ ID NO: 346003

SEQ ID NO: 477948 - DNA, 1000 bp, Homo Sapiens
ggatgggaaactgtttatttagtggggataccttggagtgaactgattcccgtgagcaggttttcctgtgatccgcatcctacccatggtgatttctaagcaacaaaatcagcccaggaacaatgaggccaatcacaaataagtcccagtgtggtccaatggtgttgtccagtttcagccagttccatctcgttgtgaaattaaaaaacaggatatcccggagcaaatgcgtagtttccagtttcatgacggcaaagagcacaggtatgtgggcatctggactcgtttgagcagccatgtcgtacaatcttctggccaagtgaatgtcctttgtgatgcctaagccgtgttcatacatataagccagattgaacatggcttgcgcgttgtggtatttgttggctgcaatgctgtagtgtgtggctgctgtttgatagtctttcttagtcccatagccatagtaatggtaatctccaatttttactctagcaaatgcattgccttgaatggcagctcgattccataggagaagcgccattggatacatcttctctttttcaagaatgttagcctttttagattccaaaatgaatgctgaattgctttgagctacttcataccccatttctgcaagcagtgcatactgaacaagagaagaatctatatcaccatccttataggcaaagtaagctgtcaggaatttctcagcccagtggcctagttcacagacacctttataaagctccacagcagttctgcatgatcttactactcctgttcctgttgcatacatcttggccagataataaatggcaaggggctgcccactctgagatgccaggtaaaaatatttgaaggcaagtttataatccttccatattccagagccagagtagtacatgaagcctaactggaactgtgcgtcgggccaccctttttccgcagctttctgaaagtatttaagtgcttcggcataattcaggggaactccttttccatg

SEQ ID NO: 477949 - DNA, 1000 bp, Homo Sapiens; identical to SEQ ID NO: 346004

SEQ ID NO: 477950 - DNA, 1000 bp, Homo Sapiens; identical to SEQ ID NO: 346005

SEQ ID NO: 477951 - DNA, 1000 bp, Homo Sapiens; identical to SEQ ID NO: 346006

SEQ ID NO: 477952 - DNA, 1000 bp, Homo Sapiens; identical to SEQ ID NO: 346008

SEQ ID NO: 477953 - DNA, 1000 bp, Homo Sapiens; identical to SEQ ID NO: 346009

SEQ ID NO: 477954 - DNA, 1000 bp, Homo Sapiens; identical to SEQ ID NO: 246626

SEQ ID NO: 477955 - DNA, 1000 bp, Homo Sapiens; identical to SEQ ID NO: 161335

SEQ ID NO: 477956 - DNA, 1000 bp, Homo Sapiens; identical to SEQ ID NO: 346011

SEQ ID NO: 477957 - DNA, 1000 bp, Homo Sapiens; identical to SEQ ID NO: 346012

SEQ ID NO: 477958 - DNA, 1000 bp, Homo Sapiens; identical to SEQ ID NO: 346013

SEQ ID NO: 477959 - DNA, 1000 bp, Homo Sapiens
ttctctttaaattattttattcaagaagtgggggaggacagacaaggggactgagctgagccctgagtccctgaacctcccagctcagcccccacagcaggactggactcaaagtcagagggtggagactccagccccacccagacacggttggggacagacaggacccaggaataccgactgactgtcctccaggggatggcggccgcagcacacagggcccggcccgtggaccgcccgggtggggctatttgggggtgccgccgcccttcttgggagtggtgggtttcttgccctgccagaggtgtccctggatggtgaaggcatcgacgctcatggacatggtcttggcggggatctgggtgaagcgcttgcggtccgagttgtacttgtagatgccttccaccatggcgggcgtgacggtccggggcccataccctgccagccgcgacagctcctctgtctcccccgacagcgtgtagagcgcccggaactggcagctcgagtcgcgaaagaggatcaggaagtggttggccttgcttttctcaatttcctccagaatgcgattcttctgcggttcgttcaccttgcccgccaggcagcagtgtgatagggcattgtggatgatgaacttgttggacttggcgctgggttctttgtacagccgtggacctgtgtactcgggcactgacgctggggaggaggcattgctgccattttcccagtcccgttcgcggcttccaggcaggcggcttggggacatgagacctgacggggagggagcccgagacgtgggcctcttcaccccgaggttattgtgggcctcgttggccacagtggacagtgacagggtggactgggaatagattttgctcagccgagagcccagcaggccgcgggctgggcttcgtgccagggctgagtcgtcacagcaacccgagcgaggccgggtggccctccgcccgccccgacctggacccccggaccccgcagcccgggg

SEQ ID NO: 477960 - DNA, 1000 bp, Homo Sapiens
gagcatcgcaatcgctttattatgatttccactgtgcccagcctcagggcatcagcttcttctggagcgctgtgaaggctgggccacgcagaggagcatgcagctgtagagacagggagacagggcttggggacgttcccctcagcttgctgtcaagttaccttctgcagaaaagcacatgggaagggcatgagggaccagagcgcattggattcccaagtgttgctcaagtgttctcagagtccctctcacaaacttgggtttggctgggggacagatcacaggccaacccatgatggcaggaggctaatcttgagggcctttgtgtcaccatggctatgaaaaggcctggctacttataacttgatgttcttaactgtgggttgtgcctacccagtgctatagaaactggaatgtgattgggcttcttagtcactggcccagaccagagctgaccccctttccatgctctgggtcactggggcatgtggcccagaggaaaaagctttcccttagtgctagccgaaattctgtaacctgtttattttctttccaaggttgccaaaaatagtggtagcagaaaagtaacagcagagaaaatgcccagtcccaccctacaccagggctgagctgtcaggaacaggcacgatgcgtgaatatcccccactccaggagatctcgccattgtctgggttgcagccaggggcccagacagatatcctgggcaaattcaaactaagtggtaggagaaagtagcattttttcagataagagcttgaaataaggaaaattaaaaaaaaaaaaaaaagaaaataggaattttatttcactgtaaatagaggaggggtaaaaagggactgtggtgacagtcctgaagttctggcatcaaaactgttctgccttttagggccacacatctgtctgtcttcactctgctggtctgaagggaacatgctttcaggatcactagagccagctaccagttctcagtcctgcttga

SEQ ID NO: 477961 - DNA, 1000 bp, Homo Sapiens; identical to SEQ ID NO: 246627

SEQ ID NO: 477962 - DNA, 1000 bp, Homo Sapiens; identical to SEQ ID NO: 346015

SEQ ID NO: 477963 - DNA, 1000 bp, Homo Sapiens
aagtagtttatcttttattcatacaaataatacatacacaagactgtatattgtttgaagactgaaataattttctagtgtaacaactctgtaacaaaatttaactaaatgtaacatttatgaaaatataaatctctgattgggtaattcttcccaacgatacaaagtttacataaaaacattcaatatgagctatcagttgcaaacaagttaggaaaaatcattcaagtcacttgtatactctattggcttttacatagaacattcacatactacatttaatccatctaggcatttaattcttagaaatgtgtggcatggaggttcaactgataatgacaggaatgagaatgtgttgcctaaagagctcaaaagcatagactcatataatcaactccaggtgatctgtatgtggtttgccttctctgggctaccacctccctggctagtagctaaaccataagtaacatactgaaaaacatctttcactatggacctgggtatttttatctgaatcacatctttgaacgcttacatgttaaactgctttccaagaggaaatacaattgacctggattctctatgggttacatgaatttatttttcctattagcatcaataatcatgatgttgctgaagtttttcttatactgcttcccaatgtccctatgagggctacagcagaaactatcactatctttattttgcacttcacaaaaacaacacactgatgaagttaaagacctgtctaggaatacacaatgagtttatggcagagctgggcctagagcaaatcaattccttgttcattattctagtaaagtgttacttctctactttctaagaaaactaaactcaaccaaaagtgtggataccttttgaaaagttatccaaggacatgccgtaaggaggatatggaagaaagaacaatcatcttcaccttttgagatgcaatgttttcttttaaacaggtgaattaattttaaaaaatatttaatac

SEQ ID NO: 477964 - DNA, 1000 bp, Homo Sapiens; identical to SEQ ID NO: 346016

SEQ ID NO: 477965 - DNA, 1000 bp, Homo Sapiens
gaaagaactcaaacactttattttaaggtcataagagaaataaaagtcacaatacgtttaagtcaaatcagaattaacaccgttttgctcacatataaattattcaaaccttttgctcccattaggaaagatctctggcctggttctttttcagggctgaggtggcaccttttcattcgctcagctggcagagcaaagctgatcccttggcaatccagtagtctttggaccgcttggagggtaacaggacggttaccacaaaattggttgaatgtcctgtggttgagagtgttcctgcccgggctcctgttttataaagtgggcagtggtaaagtgttgggcttggcttatagttttgttgtggttcaaaatgcaccacaggcagcactggattcatctgtccgggcaatgcatcttctatcaccatctccttatcatcccatcgagaagcatccatgaacatcccatgaacaagaacaccatcctcaggagagggcaactccatgtccatgggcagttcttgtccaaattgcactgtcttggcagcttctatcactgcagcttgatcccgataggtgggaattacgctgtatttgaaactcagctcatctataggcaaattgtattttcgagcatgattttgaagagttcctgttagaaatccttgaggaaagaagaaaccagagatccagtaggacttaggctgtcctcttttgagccacagatccacaaatgaggtcctcaggataaggtctttgacccatgatcctagtggcttcagggatgggtaggctgtgttggaccacagagcgggaacctggttgttgaggaaactgttatacactttttccatttcttcagacatcaccacaaatccagcgatggctttgttgagtgtttccagagaagtatgaattaacttcagcaggttgttaaaccggtccacttcctgtccaagaacggtggtcaaggagttcagacgtccttgaagatccttgac

SEQ ID NO: 477966 - DNA, 1000 bp, Homo Sapiens
aaccatcgatgcatctttaattcacaaataaaagctgtagcaagatgtcatctacacatttgtacaaaggttcagacgtcctatgctatgcacgatcctcagaaagtatgagcctgtcgtgcggggacgtcgcaaacgctggcaggctcacccctcgtctgcatttggcaagaagcgcctcccaaggcccccccaccctgcccagggtgccccccagagggagcaggcctcccacagctggagagagcccggcccccagaacaccttccctagaaaaccataaaaacatagatcatttgtcttcaaattcccacggcaaattccgcatttatgggcaaaatgatataaaaatatgaacctaacagaacctttacaaaaccctaccccccatctttgttgttggtcgtggtggtctgttttgttttttgcttgtggttttggtaaaaattcctgccgtggaagaggcaacctgtacctggggctcagcccttgttagctgccctcgggacagagcgggttctcgggaagggaggggactcgaggtcagccatccctgcccgggagaccccaggatggatctgcgttgagaaccccacacagatcccccacaacccgggctctgccgagaggaaaccattgtaaaagaaaagtcatcctgaatcctgaaagacccctggggcgtgcaggtaagtcccactccactccacaaaaactgcttggctgcaaagaaggcaaggtggacacaaacacaaccggcgccagccccggcccggacaggcgcagcggggccgggctgaacacaacttctgctggtgtctcaagtctgtagcaccaaatgcaaaagggagaaaagtccaaatcaaggtcaaaggcacttgcgttgctgtcgggtggtgacggtcttctggtcaccctggcaccctcgctctgtccaccgcgtggccggccctccctcccccacactccgtctcctctctgagactcccgtcctgcacagaaa

SEQ ID NO: 477967 - DNA, 1000 bp, Homo Sapiens; identical to SEQ ID NO: 346017

SEQ ID NO: 477968 - DNA, 1000 bp, Homo Sapiens; identical to SEQ ID NO: 161336

SEQ ID NO: 477969 - DNA, 1000 bp, Homo Sapiens; identical to SEQ ID NO: 346018

SEQ ID NO: 477970 - DNA, 1000 bp, Homo Sapiens; identical to SEQ ID NO: 161337

SEQ ID NO: 477971 - DNA, 1000 bp, Homo Sapiens; identical to SEQ ID NO: 161338

SEQ ID NO: 477972 - DNA, 1000 bp, Homo Sapiens
ttctgatccatgcatcctttattccattaccaaccactgtgccgcatccaagcaacagtacacaaactggcaatcaaccgcagtccagttgtacaacgatctgaggcttacagtacatttaaggcttttaaatgtggaaaaaaaaattaaaaccaaagaacccccaaatccaaacccctaaccaacacaagtagtatagcaatgttaagcatctcctatttctgatgcttatttggcgcaacttccagtgtcaaaacccaaataattcctaaactaaaaagattagtttagtgaaattttaattacataaattcttcaaagcataaacttggaatttttgtcttggaaatgttataaaatttttaatagcaaaacataggaataaaaacatattaacaaaatgtattcaatcatttacattacaaacaaggaatctgcagttcattgttgtagcctgacaaaagaaatcatatctaccattaagaatctatgcacaatgtgattgcaaatatgtacagtactttaaaaaagcctacaaggaggactttacagaaggaaagtcagctaggctctttgttaaaccaaccagacaatcaaaatagtaaaactctgttggctagtaataaatttacacttaaaaaaacccctagtttctttttgtttaagaatattccagttatatttatatggttacagttgatgaagctgtacacgagagttccagtaaattacccttcagttcatttgtccgggaaagatcagcatgttaacaaaaaataataaaggaattttcaccacactagctttccagttacactatcacagcttcacaaatggattgaacccatgtatccagtggcagaaagagagctgcatgtgaaataccgagaacattggtggcaacagggcaagtcctgcatgaatgtcagaaatgatggataaggttgagaaacagatgcgaggctactttatacagcactagaaaattgtccctacattc

SEQ ID NO: 477973 - DNA, 1000 bp, Homo Sapiens; identical to SEQ ID NO: 346021

SEQ ID NO: 477974 - DNA, 1000 bp, Homo Sapiens
cctccaaaaagttgtttttgtcttttttaaataatgtgaaaatgccacgcgaaggtttgaaccagaggcccctccaggggccgggctggggagggaaaggggagacgcgaaatggggggtccgggtccccgaagcctgcggcccctgtcttgggccaggagtgggtgaggagggacctccgctgtgtcgaggggctccaggcccaaaagagttcagttcagttccgagaaaggcggctctctatggaggggcggggggattcctgcctcatttggctccgagggggtcaggggggtcaggggagccatctggggggctggggggcgggggcccggggcctcccgtttggcacatggtaggggagtgggagggggagggcccagcctcgggggcctccccagaggcggcgtctgcggtggtggcagtggcgccgtcatccacagaggattccattctcaacccctcttctgagggtgcagcggggtcgggtcttcggggaatcaattctccacggggcctgcgggccgggcgtcgggggcccgggcgggtggccccggggtctccagcgcaggcgagacggagaagcgggagaagcacagcggggggcctggaggggggaggagggggaaatcctccgcccactcgaaactgcctccaaagccgctgtcgttgctgggaaacccatctccgggggtggcggggtggggaggtgtcgggggcgctggaggcgttgacgggtccgtgtccccctcggggggggcctggacgctcagctcgttggttggcgtctcctggtcgaagaggtagacggtcacgtccccgtggaaggagaccatcttgcgcttcctctccagctcgctgtcctctggctcgtcggccccgcgcggagacttgagcagcccccgcagcgggcgggccgcgtccgcgtcggcgctgctcaccacgacgggcaccggggctgctcgcgccctcccggggccccgcggccccgccgccgcgc

SEQ ID NO: 477975 - DNA, 1000 bp, Homo Sapiens; identical to SEQ ID NO: 346025

SEQ ID NO: 477976 - DNA, 1000 bp, Homo Sapiens; identical to SEQ ID NO: 346026

SEQ ID NO: 477977 - DNA, 1000 bp, Homo Sapiens; identical to SEQ ID NO: 346027

SEQ ID NO: 477978 - DNA, 1000 bp, Homo Sapiens; identical to SEQ ID NO: 346028

SEQ ID NO: 477979 - DNA, 1000 bp, Homo Sapiens
tttaaagtttttaaaaaacctttattattccatttaaatatggtattcatttttttaatttgtctttggtaaaaaaaattgcaaatacaaagtaacaatgaaagagataacactggaacaaagagctctattatatatgatttttttgttaattacataacaagttaaagcatagcttcctttaaaatacagaaaatctttcatctttaagaatttgattacccttaatataaataaatttaaagttttcacatagtaaaatgccataagttctgagaatattaaatgtactagttgtcctatcacagggaattatctgaaataatgaatactggtcagggccaaagaatttaccgaaagtacttttcctaaagcagaaatgacctcaaattattacataggtatttggccctgatactcctattgtggtaagctatgtaaacaatttaagtataatttggaagcctagggtggcagatatttttatccatcataactaaagctcctttctccttcagcaactgaaaagtgttagatatttatcctcatggtcttggtaggagctgtggaattctataattctgaaaaaaaaaaaggtttctatctgaatgatgtaggatctgcagcatcacaaatttagggaaaagatgaatataagcattagaatgaagcagattagaaaacaagtagctagtggtatgaataaaaaaataaaaatatcacttgaaggactgaacactgtatttacactaattatacaaaattcagggtatccacattcaaacatagagttgaaaaacaactctattatgtctaggaaagacacagagagtttctgtgacaaagagagtttctgtgtctttcctagatatgaggactttgacagtatgtcatgttttttcattagtacttttaatggagttttcttttgaattgagtgaagttgtgtaagatgcactgtttgcaacagcaacaaagagaattcacataccaacaaagg

SEQ ID NO: 477980 - DNA, 529 bp, Homo Sapiens
tgtttttttttccttttttgctgtctagtcatcctcgtcggtcttctgcttcttggtatcgacatcgtcatcctcatcatcttcagctgcccgcttgcccgtaggtgactcagcttcctcatcttcatctccatcctcttcctcaccatcaccttcttcttcctcctcctcttcctccccaccttcttcctcttcttcatctacttcactgtcagcttcctgctccccattttcctcattagcattcccgttagcaggggcgtctcttccattttctgcctcttccacaacttccttcttctcctttaagtccttgatggtgatttcggagctggcgtctacggctgcgtctgacatggtggggcacgccggtgatccgatgcaggggattaaaaagaaagcgagagttcagggactctggcgataaagctgccgcagtccgcggcggcggaggaggcgcgcggcggaggcggctgcggcgagcaaggaggaacaatgcaaagatggcttttcagagcagccagtgggg

SEQ ID NO: 477981 - DNA, 1000 bp, Homo Sapiens; identical to SEQ ID NO: 161339

SEQ ID NO: 477982 - DNA, 1000 bp, Homo Sapiens; identical to SEQ ID NO: 161340

SEQ ID NO: 477983 - DNA, 1000 bp, Homo Sapiens
tcactgctgctcagccctggcgcggtcgctgacgaagaagagcgcagtggcgaggaagaacatgccgcccaggaccacgacgaaagggcagagcatgagcgcgtagcccaggctcaggaactcccagagcggggagtccttagtgctctggcggatcaggtctgagataaagccaatgaggtaggggctcccggcgtcccccagcaggtgggaggtgaagctctgcaaggccacggcagtggcgcgccgcgtggggatgaccacgtacatgaggatgtctgcagtgatggcccagttagaaaacagcagcgtctccccgacgaagatacagatataggctcctacgatgctgctcttggcagccacgaagatcaggcagatgaagatggcagagcccagcatgcccacggcacacaccagtgggtcggcccgctgggtcttcaggcggcaccagcgcgtggctcctgcccccgtgaccacgcccagaaatcccgtaaagcaggtgatggccccaaagatgaggctgtccttggccccacagggcgggctgttgcacgtctctgctgtcttctgcacaacttgggcgcggtgcaggtagagcgggatccacatgcccagggcccccgtggcgaaggagacagccgacgtggccagggaggagaagacgtagctgcggtttcgaatcagggccttcatatctcggagccatgaggtccgggccttgagctggtccccgagctggtcggcatgaccccttttagtggctgggaccagaatgaggatgagtgttcctgtgatcatgcccaggacaggggacacccgcaatgcccagtgccagtctccggctgcctgcttcacgctggagccagtaatgtagcccaggccactgcccagtgggatggcgaagtagaagacggacagcatgagcgtacgcgtgttcttggtgaagaggtcgccaatgatagtgggggcgatggtggagtagctggcctccccgatg

SEQ ID NO: 477984 - DNA, 1000 bp, Homo Sapiens
agaagaaaattatattcttttaaagaaaatgaaaatatcctcaagggaaaaacttaatttaagtcaaatcttgtccttttgtcgtggagccccttgccccgcgcgcagacacaggctttcctgaagcgtggccagggcgcccctctcatcgctcctgagcgtgacccggggctggagccgcacggggattttcccgagctgagcaggggggtcggggggcccaagccaggagccctggaagagggagcagggcggcaactggggccgcaaacacccatcaaagtccccaggaccaattcccacagacaccacgtggccacaggcagtgccctttgcaggccccctccccaagggtgtcacccctcaccccctcctgggaccccgcctaaaccaggcacccttccacccaccagcaggaactgcgctaggagatgcaggaacacccatgtccccgccagccccgccttccagaccacaccctgcccgggagtgcgctttgcgaggtcggggtcgggggggagggcgggggccaggcccctgaacaacagacagcagctcccacccagcaatgcagccgggtcacctcgcacccctggccaaggcaggggccctctccagcctggtgacccacggcctaccctgaggctgcagggcacagggggcctccaagtggaaagctggtgatggggtgggtgggaggcagggcccgcagggaagtgacttgagcaggcacagacggtgaataaatagaagcttccacgcgggggtccggcccctgcagacagcagctcggtgggaaactgattggagggagctcccctgacgctgaccagggccacccacgcgggccctccctccacacccacacccaccccggcccagggacgggttttcccctgctcagagctcagtgacgtgcacagtgggtgagggaagaggcccaggttggaggcgccgcaggtggcaacgacgacacagtaggtggcccgccaggggatag

SEQ ID NO: 477985 - DNA, 1000 bp, Homo Sapiens
acctgtaatcccagctacttgggaggctgaggcaggacaattgcttgaacctgggaggcggaggttgcagtgagctgagatggggggcaaggatgggcaggcagtgaaaagcctcagtagataagacagataatagctacttcaagaaggtaggggcgggcagcccagaaacagggccttggaggggagggtgggcaaagaagccttcatcctactattcttaacgagtccttacaggtcattcaggagcattttggggccccaaaggaataggtcctcttgcttaagactctgggcatggagctgaaagatgctgggctccaggttagaaagggtgctcctctggggatctggcttccataaaagttcccagctactgttactgtccagaagactgaattaagagcttccaactgccaacctgagcctgtcgtccctcagccagctgtttcagcagcagctcctggtgctggctcaactggtactgcagcaacttcaattccttctgcataatctctgactcctcccacagcactgcaggagtgacagcagtgctattctgcggtggagaccccaagaagatacagccactgctacagaagaaacagatgcacaggccaatgagctctgtggagaccccaagaggatacagccactgcttattccggaccacatttccatcagtagcgttgagaagcacatccagctgctcaaaccagctgaggctcgtattcatatcctgtggcaggggagcggcaggggtctggctccctggtgtcttgtgcttgctctcctagcgggggatacccaaggtatccccaggaaaggccaccacgttagatggaaagagggaagtggggatgcaacactggggtaggtggatgcactatcagaccaaaactgcgatcctgtgactagggaaaggaaggacgctcttggggaactgggggaaaagcgggataccgtgatgatacgcagatatcaggtggggattgaaggt

SEQ ID NO: 477986 - DNA, 1000 bp, Homo Sapiens; identical to SEQ ID NO: 346031

SEQ ID NO: 477987 - DNA, 1000 bp, Homo Sapiens
acctgtactagagcccaaccacagggacattgcacagtcaggtctcatgtacttagaataaaaagcagctgcaagattcccctctgtgttgaagttttcatgtacaaatgaaatagactgcacctgcccagtctggctgaacacacaaatattttataaagggtgttgactacatgtgaatgtcttgaaacatgtaagtctgattagagtcaaaaattaaaatggtttgatatggacatttatttttcattcttctcacaaagcaatgcaacccgcattgtgatccagtgactaggaggtttcttcgttgataaatacactgatgttaaaaagtttgttggtaaaccggtagttgccaaaattcttgacctctcaggtgtctggtaaactgggcattcaaaagcatagagttctgaatctgtctggttggaagcatttggtgttttggtagaaatctttgttggcaaaaagtatatgtcgggaaaatcacagcacatctccagaggcagcgagtcttccagtattttctgttcacgattccatcttgccccctcgatgaataaaccaaaaatgtaaactccagtgtgagaggaagctgagcccttaaacgctctcctgactatgttgagtttctttggcataaatacggagaacttctcatccttgtcagtggtgttggaaatcacatggtgggtgaaggtgagggcatccacagcgattcctcgggacctcccatagtcttgaagcacagcagcaagaaaggcttgtggaaagaagaaagctgggagccagtatcttgaaggaaacccttcaaagaaattgttctctgaatcctcagggtgtttgcatttttggctagttgatggaatagactgcttccaaactgtgacaaatctcatataccgacgctgtattgcagtataagccactttggcccaagtattgaagaaattcagtcgctggatgagatcatcaatccaggaactcagtggcttacaag

SEQ ID NO: 477988 - DNA, 627 bp, Homo Sapiens
ttaaggctttggcctttattttgcaagtgatggggggcttctgtggaggagggctagggaaggactggaggcagggaggccagtggagaggatgtggtcgtggccatgtgaggcttggagcagggcgatgatgacagaggggggaccgatgctgccagattcaggataagtttcagaggtgaatggccaagacgtggggatcagttggatttgctgcggctcggcagcgacccctggcggtctggggaggcttctcctcctccttctcctcctcctcctcttcctcctcctcttcctcctcctcctcttcctcctcctcctcctcctcctcctcctcctcccctcgctggggccactacaagccgattcgccttgttccttccagacccgagggcctcagagccagggagaggacccctgatgagtgccccctgaggggagactttgacgtcttcccccgggaggtggcgggggtctgcgaccgaatgccggcgggactctgggtcagggcttctggcgggccctgcggggggcagcgaggtgaccgtgaacctgcggctcatggcgcggaaaggagccaggcggccgcggcaaggtccgggatcgcacaagtggctgcaaccaggc

SEQ ID NO: 477989 - DNA, 1000 bp, Homo Sapiens; identical to SEQ ID NO: 161342

SEQ ID NO: 477990 - DNA, 1000 bp, Homo Sapiens
ttacaggaggggtgtctctgtttggaaagccagcaccagcacccagaacacaggagtccagagagacaggcaggcactgctggccaccatctggctgtggtgggaatgcccacggcgagggagccgcagttcagtggagatgtgcctgtccaggacagggacctggagttgcgggactatgtcactctcctccaggcggacccacagatcgctgaattgccggagtcgcggcctccgctgtgaccgcctccgcttcttccggaacctctgttcggcctcactgggcgtgtcggcacttccaggccgggacacaaggggaggcagcgttgagtgccctgaggatacggcttctggtgccggtacttccagggtagggacttttggagcaaagatggtggacagagtgggccgtgtggaggtctttttactcttccctttgtggatgggtcgtccagcaggggcgtgttctacctcatagccttcacgccgcaaaacatccagcactgtgttgttgcccatgaaatgaccagctccaaaggcaaagaagaagcctttgtcagggaactcctccaaaagggccttcacccgcttccctattctctcattccgcttgtagatcagctcccggcgtaagtagctgtcaatctcctgagcagtgatgcgctcctgaggtggtagcgtggcattaataaaattgggaacctgggagctgtcatggctgaggatgacggagctgaggtccccgcagttatagtgtttgatgagatcctccgtcgtgtaggggatctgaagactgcctgctcgcaggctttcctgctgcaggagggtctggttcaaagcaaagatgacctcctccttttctctggcagaggcacctccagtctctctggaaggcgtctccccaaggttctgcacaatagcctcttctgtcttggtaccctctagaccatactgtgttcccatccttcccatccctctcacatgaatcagctgaacacac

SEQ ID NO: 477991 - DNA, 1000 bp, Homo Sapiens; identical to SEQ ID NO: 346033

SEQ ID NO: 477992 - DNA, 1000 bp, Homo Sapiens; identical to SEQ ID NO: 346034

SEQ ID NO: 477993 - DNA, 1000 bp, Homo Sapiens
tgcttgtttacattatttttattttgttttaaattatatatatacaaattagtaaactcaactctcccaaatatttgttagttcaacaataaaacagaaactcataacaaataagaaatcagatagaaaaactgttagaaacaagggatacatctgatattttagactcttcaaagagggggttgtttctttctgcttctgctaagttctcagtcttgatgggatgattaaaatgtaggataaggtcacaaagcaataactgggagagcttatttggtgcctaacgaacggccatgccctcttcttcttggagtcacagcttgattttgtttgaggtgttcctttccccagctcctgtagtaagttctgagtggtccaaactggtcttggcagtcccagtccccttagctgtggctgctgtaagcatcagcatgtgatgcaaatcttttatcttcttcaactccgaagaaattgtgttaatatttttaattactttgtccacatttagcttatgatcagtaacacgcttcttacccatctttaagtcaatccttgcctctaccttttcctgagcagggagaatttctgcaatttctctcatttcagagccactgtaaaaaaactggccaaccgtcaccgaggttctgacaggagcagggagccgacggtgaaggcgaagccgcgccccctgattggccagcttctccgcctgcggcatcctgggagttgtagtcccaggcaaggcccctacggagaaggttctggatgccgggttacaactgactcgcgcggccacgttggcggaaaaagcactgacattccttacccccagtgtgccaggcttttgcaacccttcctgaaagcccacatcacaattgttgggtattttatatccaatttccttcactttaacactgcagaatttgttgtcgaatgcaattacggtcccatctctgccagccaggttgtcaggaaagtgatcagcactggcttcaactct

SEQ ID NO: 477994 - DNA, 580 bp, Homo Sapiens
acagtttggaaactcttgttttaattgagatgtttctacggtagaggacatttggaaaacttgaaagaattctcgagggctgtcgtgtggaatcgtagcgacgttcaggggacgtaagaagcaaatacataggtagcaccacttgaacctttggttcttaaggaattagtaggcattctggtttccgctgcagcgtgaaagaagatgtagggaagagctgggacgtaagagccaggcgcacggcttccttccagaacctcctgtacagcggagtcttctccctcctggggcccacgtgccagggacccaccttctccatcagggctgtgtgagagaggagccgagtgaagacagcacctcgaggtttctggtctcctccagagtgagtggcagagagctgtgtgatcttgggtcgggccctcggggcacacggcttgctcgggggtcgggcggcggtccacagggccatctggtggccgtcccctgactctctggccgggttgttttcctcttttgcagatcatccagtcactcgatggggattaccagcggaccacctgtttgtatcaccttcccacct

SEQ ID NO: 477995 - DNA, 1000 bp, Homo Sapiens; identical to SEQ ID NO: 346036

SEQ ID NO: 477996 - DNA, 1000 bp, Homo Sapiens; identical to SEQ ID NO: 346038

SEQ ID NO: 477997 - DNA, 1000 bp, Homo Sapiens; identical to SEQ ID NO: 346040

SEQ ID NO: 477998 - DNA, 1000 bp, Homo Sapiens; identical to SEQ ID NO: 346041

SEQ ID NO: 477999 - DNA, 1000 bp, Homo Sapiens
ctagtgcttcctgtagcgattttttggtgtttcgctacaccctgttttgtcacagttgagagcacctggattcttcccgagcccgaggctacccaggaggcccggaagctcctgagtgatggcccgctcaatcttctccagaaagcaacctcccatgtaggagcactgctgggagagcagtttgaaactggaaatgggattgatgccgaagaagtccttataggcctcgcggttgggaaggtcaaatttgctgacattggtctttgccaggatggtcttgaagatgtagaatttatcgggatcttccacaatgtccttaaagaccagttctccatcactgaagaaggtcattttgtccttgtaagtctgcaggtagcggtcaaccaggagggcgtggatgcggacccggatggcgtgctggcggatgaaggcaatcttgttctccagtctgttctcgatcacctgattcaggtcttctaggagggagatctcttcttggaggaacagttcctgatgggtgtccggcttatactcttgtggccagaaggagctgacgtaaacccttgggggctctgtgacattgatgagaggggccaagctccagaagagggccccgtaaacccgcatgagcatttgggtggccagattgtcagccttgttcaggatgatccttatctgggattcacgccccttcaactggcggaagagcatctccagctctagacccacatccagctttgttgggtcaaagacgacaaagatgaggtcagctctgtcgatgaaccactggcacacgtcgttgaaggggtagcctctttcttgctgcttgcggttctcgatgatgcctggtgtatccacaaaagtgaccctctccagaagtttgtggggaacctcaatgccaatcagcttctctaggaaattctggccaaacttctcaaggggtgagaaggaacgggcgctgtcagcagccatgacgatgccctcgatggttttcagctta

SEQ ID NO: 478000 - DNA, 1000 bp, Homo Sapiens; identical to SEQ ID NO: 346043

SEQ ID NO: 478001 - DNA, 1000 bp, Homo Sapiens
ttatctcatgttttctaagggctgagaaatgtttaaaagctttgccacattcttcacatttgcagggtttctctccatatgaattaccttatgtaaagtaagttttgaggaccactgaaaagctttaccacattcttcacatttgtaggatttctctccagtatgaattatctcatgttttctaagggttgaggaattgttaaaagctttgccacattcttcacatttatagggtttctttccagtatgaattatcttatgttttctaagggctgagaaatgcttaaaagctttgccacattcttcacatttgcagggtttctctgcagtatgaattaccttatgtacagtaagttttgaggaccacttaaaagctttaccacattcttcacatttgtagggtttctctccagtatgaattatctcatgttttctaagagttgaggactggctaaaagctttgccacattcttcacatttgtagggtttctttccagtatgaattatcttatgtttcctaagggctgagaaatggttaaaagccttgccacattcttcacatttgtagggtttctcttcagtatgaattactttatgtctagtaaggtgtgaggaccacttaaaagctttaccacattcttcacatttgtagggtttctctccagtatgaattatctcatgttttctaagggttgaggactggctaaaagctttgccacattcttcacatttgtagggtttctttccagtatgaattatctgatgttttctaagggctgagaagtggttaaaagctttgccacattcttcacatttgtagggtttctccccagtatgaattgctttatgtctagtaagatgtgaagattgcttaaaagctttgccacattcttcacatttgtatggtttcttcccagtatgaattatcttatgtttcataagggttgaggaattgttaaaagctttgccacattcttcacatttgtagggtttctttcca

SEQ ID NO: 478002 - DNA, 474 bp, Homo Sapiens; identical to SEQ ID NO: 346044

SEQ ID NO: 478003 - DNA, 1000 bp, Homo Sapiens
gcaagtataaaattttattgaaatgcagcaatgtaaacctctttaagtttctcctctcccgtggaaggagagggagaggaaggcagtggaactgaggctttgccccccgggctggctgacgtagatctgttttcttctgcacaggggcgcaccggcttggaatactggggaattttctctgtgcagttctgacgtgcacaatacagaggctgatttaatttgacagcaaagtaacactaagccccgaaaataaaattaccgagatgtaaaacagcgtcaaaactccaattagttttgtatccttgaagcttctgaaggaaatctaaaaggctcccgtcacgacgagcaggcatcagttgaagctgtacagattactaaaatgtaaccctctaattgaaattgctcagagcacaatatgacaagaagaatcagaggaaaataagtgaatttttccctctcaaaaaatgactcattacagagagacagttctattaacttttaacaccgttcctttgcaagaactagaaaaaccgacagtctcagagatctccacagcaaacgcaccaggcacaagagcatgtgcttgcatcatctgaccataaataagcattgaccatttgtgcaacatttaaaagtaatcagcatgtcaccggatcataggcattttgaagtgtatttacaactccaccaaggacgtgaattactctgaacaagcttcagttttttaatgtatctgaattttgtctccaaaatgaacagaagtatctttgtgcccagttcacacccccgtctctttgtcaagctactccaattatcccaagtgtgctctccaccttggaagcaaatcctcagtttactaatggagaaagccagttgcctcgactgtgtggggtccacttgtggagaaatgtgttgatggtggctttcttggttagtgccatttgattgcagagaggcagtgggggacaggtgcagaagacgaggctgggagtcaaggccc

SEQ ID NO: 478004 - DNA, 1000 bp, Homo Sapiens
ttagctgctgcagggcttggtggacacctctctcctcacagtgtggtggagctcctttctgtgtgtccgccctctggccactccgagagccttgagggtgggggaacagggtgttcccctctccacatgtggcccaggctctaaccctctaggagcccccagggggtggacccataaagcaatgataccaacgatgacccccactggctgcactgtaccctggggtacttcctgcccaagccgctgccccacaaggaagtaggaatgaaaaggaacagggcagggcttgcaagagtgggtcccggtgaacgcaccatctgcctgggattccagaggcaagggtcgggggagtgcaaggaagatgataaaaactaacgtcccattcaccagtttaaggacgtacccattcaccagtttaaggacgtccccattcaccagtttaaggacgtccccattcaccagtttaaggacgtccccattcaccagtttaaggacggccccattcaccagtttaaggacggccccattcaccagtttaaggacgtccccattcaccagtttaaggacgtccccattcaccagtttaaggacgtccccattcaccagtttaaggacgtccccattcaccagtttaaggacgtccccattcaccagtttaaggacgtccccattcaccagtttaaggacgtccccattcaccagtttaaggacgtccccattcaccagtttaaggacgtccccattcaccagtttaaggacgtccccattcaccagtttaaggacgtacccattcaccagtttaaggacgtacccattcaccagtttaaggacgtacccattcaccagtttaaggatgtcaccattcaccagtttaaggacgtctccattcaccagtttaaggacatacccattcaccagtttaaggacatacccattcaccaggttcaggatgtaccacttgctttcaagctccctgggttttgaatagtggagactgagg

SEQ ID NO: 478005 - DNA, 1000 bp, Homo Sapiens
ttattttttgagatagggtcttactctgtcacccaagctcaagtgcagaggcatgatcttggctcactgcagcctcaaccaactaggctcaggagatcctcccagcccagcctccttagtacaggtgagtgccaccacacccagctattttttctctagtttttgtagagattgggtctcactttgttgcccaggctgttctcaaactcctgggctcaagcaatccttctgcctcaacctcccaaatggtgctgggattacaggtttgagccaccgcacctggccagtttataatgttcataatggcttttggagcaggaaccagtgggtgctgcttcttgtctgcaagatgaggagcctcctctccccagaagtgaggcatcttttaccacaagggaggctttgcccaaacagtcaccgaaaggctccctggatacgcgttctgctgcactcatcctcttgaatgcccagctccagggaggtccatccccaggcctgatggctatccccatctcttcatctctgataacattttggcttgatttgcagctcatacagtgaaggctttgtagccctgggaaatttctaaagtccccctcgcagacattctcgctgcactgggtacgcatctgtggggtgtctgggtgatttctgctcatagtcgactctgaagaaatggtcagagatgaaaagataaggtgtttggacagctgcctgaacccttggtgtaagaaggggcgctcacagaccgggatggcagaggccatgtttgccactgtcctaaagcctaaagcagcctgtggaatgtgggtggggtgaactggctgagtggctgtatcatagggcctgttggagagagtcctttgaggtgtttctgtgtcatggacaatgctgcctggaggagcagtgctacacagaggcttggatgacagccgagatctttctcctggtggaccccgatcaccatggcctgaagaggctgaaggccagggtccaaaga

SEQ ID NO: 478006 - DNA, 1000 bp, Homo Sapiens
tcacagacatctcagggtggagtcagcccctgtgccagccaccaggcacacagagaggtaggggccaatgcccccactatccaggagcccacagtctcccagaggagacgcaagggagggctcatcatcaccctgaaggtctaaaggcgactccatgtcacagccagaacgagggacttccaccaccgggattcgagaacctgaagacgctggccaccagagagagtcaccaggcgccaatgtctgtggcccgcggcccatcccagaggcgaggctctcggtatccagggccagctcgacctgtggcccgcagccagcctcaagcacactggctctgttggcagccccaactcgcacacccagtctcgtctccccggcggggctcaccgctgctgcgtgggcctgtggggactcctctctgctctcccactggctgcagcgttcataagtcccccttcccccaacacggtgctcggtgctgagtaaaaatatacacacgcacgtggagcccaaaaccatatttgtcctagggattggctcatgcaagaggaggtgatcccaggccaggaacaggtggacgtcgggagtccagaaaggccacagagggtgctggatccttacaaggtagtgaatcgacaggttctcagatgagcctaaaattaagtacaaaatatgctggcccgccacagaccccggggtgctctccacatacatgtcactcagcaaacaggagaacaggaactctgttggtcctctcagctcaggggacaggcctgaggatgggacccctgttgggccatcttcaagggcctggctgggatgaaggggacaggtggccccccgggggggcccgtccttcaggcccgacaaagtctccttgctctgggacaggtcccgggccccctcctcctggggttcctggcaagacgcctcatctgctcctactcctgctgcagcccccgctgccaactccctccttcctgagggccccagggtccgc

SEQ ID NO: 478007 - DNA, 1000 bp, Homo Sapiens
tcactgagtttgtcctccactctcaaatggcacacaggctttcttgcatttatagcaggccgtacgccatgaaaaattaatggctttacaccatgggcatttccaattcactggaactggaaatgaggcaggcttctcctgctgctgggatcccgagactttattcacttttggtttcttggccttctgcctctgaggttgccatttctttgggctttctctgacaccatggctcctgctgtcccccaggggagtgccctggggcctctctggaccttcttctggtttgcagctcctgctaaacaccagggtggccatcccctgggccctctctcggcttccttcctggctatagcttctgttgtctccctggaggacaatcctctggggcccctctgggccttcttccttgatatgacttctgctgtcccccaggggagtgtcctggggcctctctggaccttcttctggtttgcagctcctgctaaacaccagggtggccatcccctgggccctctctgggcttccttcctggctatagctcctgttgtctccctggaggacaatcctctggggcccctctgggccttcttccttgatatgacttctgctgtcccccaggggagtgtcctggggcctctctggaccttcttctggtttgcagctcctgctaaacaccagggtggccatcccctgggccctctctgggcttccttcctggctatagctcctgttgtctccctggaggacaatcctctggggcccctctgggccttcttccttgatatgacttctgctgtcccccagggggacagtccactggggcctctttggaccttctggtttgcacctcctgataaacaccagggtggccatctcctgggccctatctgaacatccttcctggctgtagcttctgctgtctccctgggggaccgtcccctggggcccctctggaccttctgatttgtggctcctgcgaaacaccagggtgtgcatc

SEQ ID NO: 478008 - DNA, 1000 bp, Homo Sapiens; identical to SEQ ID NO: 346046

SEQ ID NO: 478009 - DNA, 1000 bp, Homo Sapiens; identical to SEQ ID NO: 346047

SEQ ID NO: 478010 - DNA, 666 bp, Homo Sapiens
ttagtttttgtagccttggctggccccttggcctctggcatactcgaacttccggcccttggagcggacgtagggtttggtgtggctgtgtggggttcccagggccttgtcgaaatgccagtacacctctcgacccttgcgaggacctgagagcaggacggtgccgcagaccttgggggagtccagggccagctggtcgaaagtgaggttcttgccccccaccctgaagatgtggctgcgggcccggctggtcacgcccagtgcacacaccttcagtttgggcacctcctgaacccacacgtcatctgttatggttcccacaaccacggccgttttgttttcctggccaggaagcttcattttcgggatcatccgggaaagggacagaggtggctggttggtgcactcataaacaacctcttcagcactattacctgggatccggacccagagcggcagccgcgcccctccgccccccgcgcgaccccgggtccgaggcacgctcccagcggagcggtcctgcgcccccgccccctccaggagccgcggcgcgcacagccgggctggagcgcgcacccggcactgaggcttcgctgctctcggagcgctcagaccgcggccgccgcagccggcgaaagaggcaaagtcccgcacgccggaggacat

SEQ ID NO: 478011 - DNA, 1000 bp, Homo Sapiens
ctatcttccatgaagaggcccgatccccaagggacccagtgacttccgcagaaacctcttggctctgccgaggtcctcctgtggagggtcctcctcgctgtcctcctcagagctggagcccagggtgggggctgcgggcacagggtgcaggctgtcttcacaggctgctggctgcccagggcacccgagtctgcttggggacttgaggctttggttaaaggaggcagaggtcatgcactcagctgccgtctggtcacaggcacagagcaacttctcacacaggctttggcccccacacttgggcgtatgatccacacacaccaccggtgaccaaggaagcctctcaagcaggcagcccagccttctcacttgctctaggcagcagtgatgggacaagcagcacctgtctaggtcatcccttggctcgcctcttccttcttgtccacagtaacagccataagactcaaattcctccgggcaccgggatgtcagacaaaagagcatctctccaagctgtggcatcacctgcatgttgtccccacttcccaggtgcaggaaggtgaatctgtcacaggctttttcagtggtctcctcaggatcattttcaacagatgacactgccagccccagagatttaatgccagcagggacaagggttacaattttagctgtaacccttgttgcaactatctctgcagatccttctcctgaaagggctgtcaggctggtgtctgtgggctccacaggaaccactggagtctgagccaggcagaaggaggtgtccagaaggttcagggaagagttgaggctggatcgagccaagcactctatggcagccttatcacaggtacacagcaggtgctcacagttgtccttggactcacatatgatcttcttgctgacacaattgacctctgtgctaagtttggcggggtcttggagacagtccatctcagcggcctcctcatagcacctgcggtgctggaagcagcagctgtca

SEQ ID NO: 478012 - DNA, 1000 bp, Homo Sapiens
tcaccaggccctgacaccctgcagcgtggctgccagatggccctgcggggtggcattctggccaccgtgtccgaagcccgcgctggccagtggtgtgtgtggcgcaggacccgagggcgcgcccgcgtagcaggtgccgtagcctgcgccgtagggtgctccgctgtagcctccgtagcaagagtagggcgacactgctgcactgtaggggctggggaaggcaggtgcgccgggcccggggcccaggcagggcttgccatcgcgcaccaggacgggcacagctactcggcgcggcgttagagggtggccagccagttccagcgacttgtcctggcgctgtctcttgcatttgtagcgtcggttctggaaccagatcttgacctgcgtggacgtgagctgcagcgcgctggccaggtgctcgcgctcgggcgctgacaggtaccgctgctgcttgaagcgccgctccagggccagcacctgcgcctgcgaaaagagcacgcgcggcttccgtcgttgccgcgccttgggctgctccgagcggccaccccgcacgctgtcgccgctgttgccaacgccgcgctctggcaccctggtcccgccgccgaggggcgaggccgcgttcaggccgggctgtggctcccccatccgttccgcgtccatctccaagactgcctcacagggacccccaggaggctccgaaccatccagctttctgtcaccgccgccgccaccagcgttgtgaacctctgaccctcgcggctctgcgtccattctcaggtactgaaagttttccgggctcttccgcacccgcggatgtggcgaagccgcggggcagctccgctcgcgctccagtcgcaggatgtccttgaccgagaagggggtggaggtgacggggctcagcagcatcccgaaggcggatggggcggggccgaggaggtccgggtgaggagcggcaccctgaacttcccgtcttgtcgctgcaggccccgcagacagaccc

SEQ ID NO: 478013 - DNA, 1000 bp, Homo Sapiens; identical to SEQ ID NO: 346048

SEQ ID NO: 478014 - DNA, 993 bp, Homo Sapiens
ttaggattctgggtctcgcagtccacacagttggagttcccgcatgtttccgatcaactgcagggccatggcctcgctttggctcctcagcccggacttgctcttgctgctctcgcatgactgcaggctggccaggatctggctctccatggcttgaacccaggcatcccgctcctcatacatcgtggcttcaaagtgccacatttggccagtgaggggcacaatgataaagttttcttcttgtccttcagcagtgccggacaggccatggtcttttaagttgtttgtgcttttcttcctttggtgcttctttctgttggcctgaggagagtggggcgtgtggagcttggggctggtggtgctggagatactggggctggagcatagggagtcatccagccctgtgtctgaattgggtgagatgtgtaaactgctcatgtccttggttaggccattggttttagagctggagatgcgcgcacaggcagatgtggctagcagtggcctcttccctgggactttcacagtggttctcccaaggtcaatctctttaccatgaatattcttcatgtaatcatgtaaatttggatggtaggtcagcacgccgttgtcacatggggtgacatatttctttttccatttcttcagccctttgccacttagcttgaatagcatgccctgtttaatggggatggctctgcccctcctgatgctgtctgcacgattctccaggcccttcttctctttgtctgggttgctccctttctgagaggtaaacaggttggaccagcgcttggactgcttgcgaacgggcgtgggtgtgttggaagtgggaggaacatcgatccgaagttcctcctggctgatgctgggagtcgatggaatggaggaggaatagtcacttaaactcccacctccattacttgtctggttttcattctgcaacttgttgagcagggacttttgttctaaacagttaaggagcttcgacat

SEQ ID NO: 478015 - DNA, 1000 bp, Homo Sapiens; identical to SEQ ID NO: 346050

SEQ ID NO: 478016 - DNA, 1000 bp, Homo Sapiens; identical to SEQ ID NO: 161344

SEQ ID NO: 478017 - DNA, 1000 bp, Homo Sapiens; identical to SEQ ID NO: 161345

SEQ ID NO: 478018 - DNA, 655 bp, Homo Sapiens
taaatgtataattaaattattattgactttagtcaccctgttgttctttatccattcatctgttgatggacatttaggttgcctccaaatcttccaagccatttcatgaagccagtattttccagctaatagcttacaggtgagccaaaatcttgcccataaggtggctggctggaaattatgtgaccaaatgagctggatggtccactctcagcagtgagcagcctctagtctttatctcatcgtgctgtgtgggctggagacagaaacgctgcgtggagctgagcctttcagttaaatatgagagcccccatctcctgctaggagtcctcattggcaggatccaaacagaaggcaaggggcaagagcaagtcacgcccagggccatagaacagggtggagggtggagccagtgaattaatgtcatggcccgaggaggccaaggccagtgaaccagccatctctcacaggttggtgatccagttagttccatccatcacaccatttatttgctccagagaaatgtttggcaactctttgttgtatagttgggcatcccccttatattatctcacttgcgcactcctttgtttaagagatgtttattgaacacctcagccggaaaagcaaagcccctgctctccgaggctcggcg

SEQ ID NO: 478019 - DNA, 1000 bp, Homo Sapiens
ctatttaaagttttcatgccggccaatgccttctcttcggtcactcatgctgtgttttctataggcctgcaatgtctttctcccattgttttttccctctttatcctctacatccccaaatgtccttctctgggaagcttttcccttgatggtagccaggactacctccattatagcgcattgtcttggcgtcagacccctggcatcctctcgaatcatgtgctccttcagtttggataattgtccaagatctttagctgcaatgaaaatcatctggggtcctgtttgatctgtcagaggaggaagaacaatttgtttttctattttgttgagaactagcttccataactcttttaaaactcgctttaggactgttttctcacagatttttgctgagagacttaatgttttgtccaaaaaatccataagagatcttaacacaatctctgcatccattgctgcactgttcttattagatgtggtgtttccatttgctctcatttgatttagttcgaaactcatctgttttatacactcttcaattataacctggaaactttcaccataagtgacgctgagctcatccaggaccccactgagcttaacctgaagttcttttagaatagtactagcttcagaatctagcacattttccttatcacaatgtgaactgaaatcacttgatacaattgcagcatactggagcagcactttattgatagtctttgcaaatcttctcattaagtgagataatgcttcaggattagggcattccagtttcttaataatttcaaagctctgattcagctgagcaaagacatcaaccacggagcaagaaaagagagcatgctcagatgtctgctggaatccatcttttttgtctcttcccagtgctccatgaaggaattccattgacacatcttcgttttcatctagccattgcatgacaaaaggttcaaaccacaaggagtattcaggaacagcatccttgaaggcagga

SEQ ID NO: 478020 - DNA, 1000 bp, Homo Sapiens
cccattctcccacctgtccctgcccagctgcctttagggtaaaggagaccccttcttagagcagctcagactgtgctctgcagagcgccaggcattctgggggtgtctagcagtggaggacagtgcccccgccctgactccatccagggaaggtacccgctatctatttcaaacactgcttccctgaaagacatcacttggaaaaagggagccttggctaaaggagaacatgaaaagccactaattaacaaataaggaggcacccaagctacaggactgattcctggatggaaagagggaagccgaggccatttagtagaagatgcccaggcgggccccctccagatcttcttgccaaagttcagggcagccactgaaccgcaggcctgagctctggggagggcttgcttcactgagctggaaggcggcgcccggtccctggtcctctgagttgggcaccacctctgcactgtggctccagcacctcccgggggtctgaggctgcagtctctggcatgatgggtggggcaggagagatggagctcccagcgacagacagggctctggagacacagagagaccctggtacactgcggccagctccaaagttgctggggccgccgtccagggcactggtgggttccggggctctggggacgactgcgtccagggacagccttggggtggcgtccaaagagacgcgtcggaggttgtcccttgggacgaatacgggggcgactgtatcttggggcagtaagggggtgttgcccagggatccgtgtcgtggacccccctccccaggcgctcgggtgcggcttgggggtcggggcacagcgggcagccccaaggggaccccgcgtccccgcgctgcctgcgccggcactgcagactctcctcgctgagacccagcacggccgataggtggccgatgtagcggatggccaggcgcagcgtctcgatcttggtcaggctctggccggccggcgccaaggagggaggc

SEQ ID NO: 478021 - DNA, 1000 bp, Homo Sapiens
tttgatgtgtgatttaatcttttatttgtttataataaaaaatagactgatatgtaccctctgatgggcacatgcattctgggctatctccaattaaaatgagacttggcgggtggggcatgaggggctgcatctctgggcaccctagtcctcttgtaggtactttcccaggatggagtaagagacagacctagacaggcccctctggatgagcaggtccatgcatcggccatatttcctggcgaagggcagtgtaagctccacccagctgtacaggcgctcctgggtgtgccggtcatccttgaagccggtgatggccagcaaatctaccacaaactgcttggggctgatgtgcagggtccacagccgattggccagggagaccaccttggctgtgatggctttggggtccttttgcctgatggaatccatgatgatgtcagccaggaagcagtgacatttctgtgcataaaacatctcttcccaggacagagagaaactcaggaaagtcacttcttggggctggggactggctgtgggtgttgtgtgcctgaggttgtccatctccgtggtatagatgatgctgtcctcaaagaacatgcagaagccatcgctgcccaccacgggggggtgagtcactttgaggataacccctaggctgtccacctcactggcctcgggcagaggctgctcaggggcagggctttctctctccttggtcctctgcttgctccagtccttcagggtgccagctctttttgggggtaagtatggcttgaaggttggctctggccccttgtctttcgctccagctccagcccctgcctgtggtcctggatccttctctgaggctgtggaatgggctttccaggcagctgaggtgctgggctgggaagcagcctcgcttcccaaggggagctgcagggtggcctcctccaaggggctgctccgtgtggctgtcagtggctggaattcccactgtttgcaattgaccatgtcc

SEQ ID NO: 478022 - DNA, 1000 bp, Homo Sapiens; identical to SEQ ID NO: 346054

SEQ ID NO: 478023 - DNA, 1000 bp, Homo Sapiens; identical to SEQ ID NO: 346056

SEQ ID NO: 478024 - DNA, 1000 bp, Homo Sapiens; identical to SEQ ID NO: 246628

SEQ ID NO: 478025 - DNA, 1000 bp, Homo Sapiens
cagggagagtcatgcgtttattgttcaaccagggctttctacctgaagagcaggcagtggggtggggagtcacaggtgtctgggtatgtggggccaatgcggttctttgtggggatggacacagggctgtggctgaggttgaggatggagctctttggggctgtagattcagaggacattaaagatgggctgaggtacacaggcaatgaggagaaaggggttggtaaagagggtgggttagggttgaggcgcagaagtggagctgggactggtgacagggatgggaatgaatgggtttgggaacagggtattgagagtggggaagagagaggcaggtaggagtggctttgggattagggagaggatagggaatggggttggaggagccctgggggttgagaatgaggtaaggattgtggttgtggttggggatggcattgggaatggggttgaggccatcaaggagacaggtttgggtacgaggtttaggattttcttctcacttgggattcaggtgacttaggtcaggttcaccaagtgcctcacaggagctactcctgggattgtggttttggggagaggggaggatggaagatgtttcttggggttcttctgacagggctgagatcactctgggccccaggaaaaccctcctgggtgactgcaatctcaggtgcctgaccctccaaggtcctagtactctgtctcccagtcctcagcagccagtggtgtttccaggggtggctctggacctcgagcttctttcttcccatcctgggcaggcagtgttggtggtgatggcagtgtcattggtggggtcctggggccagccccagggccccccgcccggcccctctctggctgctcagctctcccaaggccccgtcgatgcaggcctcggccccagcctggcctgtgcctgacttcccagcctccgcgtcccctgggaggcctcctaactgcccccggctgggagtggcctgcctgggagcagcagggg

SEQ ID NO: 478026 - DNA, 605 bp, Homo Sapiens; identical to SEQ ID NO: 346058

SEQ ID NO: 478027 - DNA, 556 bp, Homo Sapiens
tgaagacgatgaagaagagctttatttagtgttagaagagctcagaggagacctgtagtgggttgttactctctgtaggcagatcatcccttgagtattcagctctcaacagagagggggccctggagagggtggctcctctctgcaggcagggtgttcggatgtctgctggtctttgaagctctcgcagaaagggtagcttctctcttcgaagctcttgcagagagggtagctcctctctcaatccaaagtccaccagggctccatacactgatgccgacagttgtagtagcaacacttcttgaccccctgcaactcttatcacgccagcgcataggtaagagagtgaaagggcagtcaagatcaaactctgggcaatatcccggtttccgtgcagctgcactcctcaagactccaggctgggtcattcagaggcaaaggaggatgttcacagagagtagaaagaagccgctcagcttcataatgcaagaaaacggtgtgggggcacctggaggctggacctgtctatgtcagctttggcggggccccatcaaca

SEQ ID NO: 478028 - DNA, 1000 bp, Homo Sapiens; identical to SEQ ID NO: 346061

SEQ ID NO: 478029 - DNA, 767 bp, Homo Sapiens; identical to SEQ ID NO: 161347

SEQ ID NO: 478030 - DNA, 1000 bp, Homo Sapiens; identical to SEQ ID NO: 346062

SEQ ID NO: 478031 - DNA, 1000 bp, Homo Sapiens; identical to SEQ ID NO: 161348

SEQ ID NO: 478032 - DNA, 1000 bp, Homo Sapiens; identical to SEQ ID NO: 346064

SEQ ID NO: 478033 - DNA, 393 bp, Homo Sapiens; identical to SEQ ID NO: 346065

SEQ ID NO: 478034 - DNA, 1000 bp, Homo Sapiens; identical to SEQ ID NO: 346066

SEQ ID NO: 478035 - DNA, 1000 bp, Homo Sapiens; identical to SEQ ID NO: 161349

SEQ ID NO: 478036 - DNA, 1000 bp, Homo Sapiens
aaaaattatttccttttattttgtaatagtttgattccactgcaaatatacattctctaagtttattagatttgaattacctctgagaattataatagcttggccagccattttaagttatccatttttgaacaaagggcctaaacaatcattgtaaaacatatgtttgttaggcaaatttcacaaaccatttaaaaattaaggcaaacaagaaatatataaatacaaatatcagggttttttaattctaaatttttaacactaacttaaataccatttgactggctctaaaaatcatggccattctcaaaatatgaagtagaaagttaccgcaaatataaactttggtataatttatacctatttcactaaacatttttaaagttttaactttggataaatataaagatgccaatatttttataattaatttgaaaaatgtataatgttctaaaactcagacatcaaagcatctatttctttaaatttattagttatatcctcaatacattctccagcttttaattttatcccatcaattacaagatagtcctcttcatagtggttttcaaacagactgcctgcaggagcttctgggctgcatttagataacttttctcccatatttatttcctctccatgtccttcttctgattcatcaggtgtggctgtgggttgcagtgcttgctgcagcatttgctccagctcttttagtaaaacttccgtctcacagacaaccctgttctcctttgataaggcatcatcagaataaacattttcaaaagagcattttaaaattgctttccttttcctttttctaaatttgggcttcttcttttcaatattatttttagaagtctgcttccttttcttgaccagtgcagcaactttgtcatgtgtttcggatttatcttgtagttttgataggcagcacatttccagtctttgctcatgagaatatccatagagtagacatgcttcttgtagtgcacttttatac

SEQ ID NO: 478037 - DNA, 1000 bp, Homo Sapiens
gcatttcacgtcactaatttggttacttcttaaaaataatattaaggttccttaaaaaaataacttatctttaaagccctttctctcttgccctctttgatatttaaggtatacaggatggtgaggggtgtgccaggacagtaaggcagggggctacagtgggcagagtagctgggggagtcaggcagacaagggtttcagtcctgcttctacagggcaagctatttatcctctctgaaggtttctgtacctgagaaatgggcacttccatgcccacctctcaaggatactgtgaggagccttgcccagagcctggtcatggtaggagcatgtcagttcatccgcctaaagaaacagactccagggccttaggctggctcaaggggcagaggaaaagacaatggcaataagaccctctggagcttaaaccaaaccactgatgccagggagccagccagccacccttccctgctgcagtgtgtgacgggacacacagatgcccctgcgcccggctcctctctatggaggtttaagcatctcttgagcagttacacatcacttgccccttcctctcaccttcccccatctgtgggatattggtgcaggattgtggcatctgtgcacgtgaatcacacaccccaggtgcaggggctgacatggagcactgtgtctgggcggagagcctcggcgtgccaggtgtgcatccaggcctcttctgctatcaggtgtttcccctcggcctaggcgggacccttctgcagctaggaaccccgtgcaggagtgcagctggcctctcccttcctcactgggtcacagacatgctttactcatgtccccttagagcctcatgctctggaggtgccttccccacccccaaacgcctcctggaaactgtggagactgtgtgacctcaaccttgtgggtgcctcctttttttctcagttagaacaacaaaataaaacactcttaatccactccatacggaagaaacccatgaaca

SEQ ID NO: 478038 - DNA, 746 bp, Homo Sapiens
tggtgcaggtcttcctgtagactagacatcccagtcttgccttccccttgataatgcagtaagggacccccattttacgacacagggcaggcagaaaggtaaccagctcgatgggatccacgtcgtgtgcaatcaccaccagctgagctttcatgttctccaccaaggtggtgacggtgttaactccggctggaaggacaggtggtctcttgtctgtacttgtgggccagcttaagcagctgagtagctgtttggcagtccagggcctgggcgaactggtcaatcgcaggaggcactttcagccgcttacagaggatggctctctgccgctgcaacctgatatagcagggccgtttcacaaggtgggcgaggtctcttttgggttggatgtcctgtccaatgccaaaattcttaggccttttctcaaacaggggattcaccactttcttggcctcctgcttcttcatgaccgcaggggccggagccaccttcttccccttggccttctttcctttcggcatcttgagcggcggaaagagagagacgccctttttctttctttctagactctcgctcccatggacttttggtaggtgcactagatagcacacacggttttcccttgaagcaaggcatttctgtctggttgaaagcacactcacggcctctaaatgcttgtcatgcagtctgcaaacaagatgtttaaaggaagttgaaaactcatgtttctccttgtggaagttcat

SEQ ID NO: 478039 - DNA, 761 bp, Homo Sapiens; identical to SEQ ID NO: 161350

SEQ ID NO: 478040 - DNA, 1000 bp, Homo Sapiens; identical to SEQ ID NO: 346069

SEQ ID NO: 478041 - DNA, 1000 bp, Homo Sapiens; identical to SEQ ID NO: 346070

SEQ ID NO: 478042 - DNA, 1000 bp, Homo Sapiens
cttggttgtgttctttgattagtgcctgtgacgcagcttcaggaggtcccgagaacgtgtgcacagtttagtcggcagaaacttagggaaatgtaagaccaccatcagcacataggagttctgcattggtttggtctgcattggtttggtcttttcctggatacaggtcttgataggtctcttgatgtcatttcacttcagattcttctttagaaaacttcgacaatagcatttgctgtcttgtccaaattgttaattcagcttaactatcattcagctcaggaagatgactcagggccttatccataccttcaagtttgctcttagcaagtaattgtttcagtatctatatcaaaaatggcttaagtctgcaacatgtttctgaatgattaacaaggtgatagtcagttcttcattgaatcctggatgctttatttttcttaataagaggaattcatatggatcaggatgtttgtctttctttgtatcagtgctcagctgagtctgcagtgcttcagaggcagctttcattttataaaaatctatgatttctccttccagttgttttttctcttcctcgagcttccttatctcctcctgttgaatcattttaagatgctcgaatttgtcctgcagtttgaccacataattgaaccttcgggtatcttgaattgcacttgagaagtctaaccgattaaaggtttctcccaaggtgcaatagccatgccttttgagtatttgtgtcatttctaaaatggtcctttttctttttttggatgcatattcatgctcttcattattgagtatttctccatcttcgctatttaagataatgctgtgactgatgttacaatggttattctctctttcaagtttctgactacaagattcacaattcttccagccatcttctgtcttaatccaactccatccaggagatctccagtcctgacccaaaaatggcatagttctcctagcgcgcctgcagcccccagtcttc

SEQ ID NO: 478043 - DNA, 1000 bp, Homo Sapiens; identical to SEQ ID NO: 346071

SEQ ID NO: 478044 - DNA, 1000 bp, Homo Sapiens; identical to SEQ ID NO: 346072

SEQ ID NO: 478045 - DNA, 852 bp, Homo Sapiens; identical to SEQ ID NO: 346073

SEQ ID NO: 478046 - DNA, 1000 bp, Homo Sapiens; identical to SEQ ID NO: 346075

SEQ ID NO: 478047 - DNA, 1000 bp, Homo Sapiens
tgttttgtttttttttaatttgggcagagagatctgtgtctaaaaaccgacagaaggaactttccctgcagctagttcttgcttcttctactggacttctctaaaagccacatccttctacagaatccgtctacacagaacaatatttgaaccaattcttgggtctcctgttggatgtcttcccatggtttgcccaggacactctagtgggtgtgaagatgtcatattatactggactgtgaagcgagaaggtgatatttaagccactaaagcttgtggcagccaccaaattttccaatgccttctgcaatcttgcatttaactggcttcaccgccattcccacccccacccagtgggaaaggctttaggagcatttggtcaggtgggggtgctgtcagggtttacggttcaccttcaaggaagccctgggtgcgctgactccggggtggggggcacctggcaaggtagcggggacccccgtaggcccggagaagctggggcagcctttgccacgtggacagcaaccgcgctgctgcaagttcccgggcgtgcccgtcgaaagcggccaggaggtcaactggggcggcttccctcagtgccttgggcaggggacccacctcggcagccgccccaccagggcccaggacgcagtggaagagcgtatggcgtcgcagcaggcagtccctaaggaactgcaccaactcctccaaacaccttcccaggtgctcctcgtcccagccttgcccaggggcccccttgcgcagcagcactgccagcagcactgtcttgagcacatatgaggataggatgcgtccccactgggtggcggccgctgagtccagcccacgggcccccagatcgcgcagagccttaagcaactgcaggcacttgaggtagcaggcacctggagctgcccgttcctgcagccaactcagcagcttctgctcctggcgtgctgtgttcacaccccacagtgcctccgcacgcaggccctcaggg

SEQ ID NO: 478048 - DNA, 1000 bp, Homo Sapiens
ctactgggtcttcttatcttccctcgggtaagatggcggaggctgcttcgtgggcatggagacgtggtgtggtttgcctgggttataataggtgctggcagctgcttttgtggccctggcttcggctgcaggagtgcagggaacatctgggctgaccggaggttccatgggcccaggacagggcagtggcgggggttgcacataccccatggccctgtccatcttgggaggtcctggatagaactcaggggaaggtggtggagaagggcagccaggagggcagggatacattccactagtgactggcgggggaaagacacatgtcctgccaggcacgtgagagtggccgtaggctccactgagggcttcacccctggacgcttgagatgtcacctggagcacctgctgtccagattcagtggcgccccctgccgtgaaggcggacttgccggaagcagagccttcccagccaccgcctgcttcggtgttcactgttcccttgatgcagtttgtgtcaaacacaggctgcttgatctcataggccttcaagagataaaatgacattacgaaggactgcgtggcatccttcgccctggacagaaagatgaaaggggtaaggtagatggtgcctttcttggtccctttggaggcctctggcacattattcatgtcactgaacgtaagtttcacatgatcgtagggcattgggatgctctcagtgttgttggcgatcactctgctgccctctgagtgactctcgttgagcaccatatctttccgaaagcagccccgagatgccccatcctgcatccgctgcccttcacgttggctgagttttcccgtcagcacataagtgagggcctcttgtgggccccacactgggaaggccaccttctctcgcacacatgcatctgtgtatccaggcttcgtgcacatgctcttgcatgtaagcagctgcatctctaatgatttcttcctattccaggtgaagacagcagtc

SEQ ID NO: 478049 - DNA, 1000 bp, Homo Sapiens; identical to SEQ ID NO: 346076

SEQ ID NO: 478050 - DNA, 294 bp, Homo Sapiens
ttaaggtgggggcatcacacagtgttcatcagctctcccagacagatgcgtttgattcatcttttcaaagacctggatggctgccatccctgcccagtagctgcaggagtggctggtgaagatttctaccagttgcttcccattagccttgtctacctctgtctgggggacggtctgtagctcctttcccagggagattgttctgatcagagacttgaacttgctcaactcatcctggctgagctgctccagaagagcctgcaggttgaagtccagctctgcagaagatgccat

SEQ ID NO: 478051 - DNA, 1000 bp, Homo Sapiens; identical to SEQ ID NO: 346077

SEQ ID NO: 478052 - DNA, 1000 bp, Homo Sapiens; identical to SEQ ID NO: 346078

SEQ ID NO: 478053 - DNA, 1000 bp, Homo Sapiens; identical to SEQ ID NO: 161351

SEQ ID NO: 478054 - DNA, 1000 bp, Homo Sapiens; identical to SEQ ID NO: 346079

SEQ ID NO: 478055 - DNA, 1000 bp, Homo Sapiens
taaaaacataagaaaatttattaaaatttaaaggtaaaaacatagtttcaaaagatttagtcatatgaaaggtgtgatagagaatggatgctttcttgaaattcaaaatcacatccaagagtatcactttcagaatgttctagtggactggatttacttttatttgtcttggatgaaacagtcactattctattttctttcttgacagaaacgtattttttcaaagacctacttttaattggttcattaaccaaagaactagtttccctagtttctttgcttttctggttttcaggacagtcagatcaggaatgcaggtcctttccagggtgttgcttatcagagtgttttttggtatattcacctgttttggtctttttctctgaagaagatctgctatttctggacaactcctcttcttttctttgacttccagttccagaagtcgcatctggtgaaggagaacacattctagcaatgaatccttcaaaagactcctgccgctgctcagtagctgggactcctaggttgttgctggaagttcctaagccctctggagtagaaactgggacaggaaaggagtcgagaggcaaaggaattctagcatcacctgtaattttctgaaacttcattagtgttccttcattgtaagctgactgcatacaaatagaaacctggatattttgcatttgccctagggcattctgcttcggttctggtttttcatcttcaagcgccttcttttcttctttaggtggattactaacagtagaagtcatctggggatgacctagtaattgaaaatctgactgatctatcccagccattgtggcaagctgcccaagcccagcatctttaaggagatccaagaaagcatgaaacttctgaaaagaattctcaatgctgcccaaaacaccttcatcatccaggatcatatttgtcaatgactgtgcatgaagggcttcagacaaagagaaatttatatttcttaactgggcat

SEQ ID NO: 478056 - DNA, 1000 bp, Homo Sapiens
gtgttattcaagtttaatcccaataacataagacatagaactagggcatatgacagatttgtaatagtgaaaaaaatagggctggagagtaatttgcagttggctgtcctgtgacccacatatacttagcaagtgtggacctgcctgatccaccggcaaaaatagaaatccctctggccatgcgtttgtgggtttcagatgttgtgcctgccatcagaaacactcaaagccctctcgtttgggttttgaaatggactctggtggagatgctgtgcctagggcaggaagggggttccttccagtctcctggccctccttgctctacactccatgcctttccttccccctgaccctggtcctctctccctgccctagtggctctgatactgctggctggggaaggagcagtcccaggccctggaggtgagggcagggttgggtatctcccctctggctcactgcttctcctgctgctgtgctgagagcacctcaccctggggccgggaacattcgctgttgtctgaaggactctgctcctcctccagctgttggtcatgtgcttggccctgagcccgccttctctccagcatctcctcaaaaaagatctgacagctgaagccctcccggatgccatgctgggcgtgctccagcagagcgtccagggagggcaagaccctgcagcaggccacgcagcgcaccccgtagttggtggtgaccagccagtccggcggctcccgcagctcctgcaggcagcactccagcaggtctatgtcctcgggctcggggctgcagttgctcttgcaggcttccaggtcccagcgcatatcggtgttggaagccatttcgaaggaggagccgttccacctctgcctcttgatgaactgggcttcatggatgcggggcttcctggtgaccggctcgaagccggcctccgtctcccaggccacagccacaccccgcacagtctgcacgtgcgtgtagaaggcacacacactctgcg

SEQ ID NO: 478057 - DNA, 794 bp, Homo Sapiens
tatatgatattaagagaaaatcactgagttaggattcaggaggactgaatgtttgttttagctcggctgctacatggctatttgattttaggcaaagtggtcacttcatctcttggattcaattcctccatctgttacatgggggtcacagcatctgagatcttttccatctttcagtttctaaagacaacaggggcagatttcacagctgttactgacaagtggggagattgtgcaggtgggtcatgtagacatgctccttcaggctgagtcttgcaggagtgaggaacttcacacccaaataactgctgagaggaacagtgccagtgatggcctccatgcctgggagtctttacagcaatgtacacaggactaggagggcaacattgcaaaacctcataatcttgtagccacttcttgaaagcagaaatataataggacaatttccatagcagaattttacttcctttagcctccaaaaagatcaaagaattcccaggcatctctacagactggccttcttcaactggcctttctagccctttaagaatcagcattcttatgaatataggcttctttattctgagaaagactgatagggtacctgctacagctcatgaaacgtttctcctaagactgcatctctcctcctggcttcaaaccctttcaggccaaatattttagggaggtctccgaaactcctcatgtttccgatggagagcaaccttctctctggcttctgcatcacttacaacaggatctacaggagagtggagggcctgtctcacagagcc

SEQ ID NO: 478058 - DNA, 538 bp, Homo Sapiens
ttttttttttttttggctggacttcttcagtagtgctcttgtacatttcccttcagcatcacaaaatgtatagttgtctcttcttttgcgaccttaatcaagaagtttcaccacatggttctctgaagaagtctggatactgagggatgacacgatccctgggttcagcctgttcaccatctcaaagggatcggagttggcatttagctgaatgtggagcaagaatagacagactgctacgctgctcttctgttcaacagcctcatcacaaaggacaggttcaacttggtgcagggttttgtgcttgtcagaatagaatcctacaaaaacatagacaaatgtcatcatgaaagcagatatagagcctgtaaccttcatagaaagggctttggaaaaaaataagtcacaggttactgccttttgacatatccccacaaattggccatgaaagctgtttccatggtgattttacatccagccatgacctctaattctcttagctttccagattcatctttccatttactataaccttcaa

SEQ ID NO: 478059 - DNA, 1000 bp, Homo Sapiens; identical to SEQ ID NO: 346080

SEQ ID NO: 478060 - DNA, 555 bp, Homo Sapiens; identical to SEQ ID NO: 346082

SEQ ID NO: 478061 - DNA, 1000 bp, Homo Sapiens
taccaaaacttcacaaagatagcaccaatctcacatgtgaagatagaggcaagaatcctacataaaatatcaataaatataatctagtgtatgaaaagactggtgcaccaaaaccttaagaatgcaaagttggtttgatgttaggaaatgtaccagatttcattgatcttcagttgcacattttttcatcttctcaaagtcaggagatatcttccagttggtggcatcttaatgattaattagcacttttctttctccgtggtatacaaaataatgttttacaatcaatgatgtcttcatttcatggaaataaagtatgtgaaaactcacaccaaaaattttttaaaaatcatctcaaaggatgtttgaaaggcatttgaaaatattcaacacctattcctgatttttaactagcacaattccttaacatgacatagggcatctatttcattaaattaaacttttaaaacaacagccaccattatagttaaatgtgaaacatcataggcatccccgttaaaaccaggaacaaaaaaagcacgcacactaccaagactatggttgtttgttgtggagcttttgaccactccacaaagccctgggagccctctgattcgtcatcttcctccaccgagctccactcctgggaaagcccagtctcttgagaagacaggtctttctcatcactgtcatggctggaggccccaacctccacagcctcccagtctttggtgcaggcgggatgaggaggcttctcccaggcccggctctcccgaggcagcagagtcttggtcctctcaggctccagcagcccccgtgtctgctcaggcctgagactctgcattgccccaggaggaggtggagcttctgagacaagcttctctttctcctcctgctccagggtcctctctggttctccaggcacaagattcagaacctgaggacctccccaaccggaccctgtctgggctctgcagagctggcgccgcactgactgcgg

SEQ ID NO: 478062 - DNA, 1000 bp, Homo Sapiens; identical to SEQ ID NO: 346084

SEQ ID NO: 478063 - DNA, 1000 bp, Homo Sapiens
tgaaatatgtctagattttttaatatgggcaactaaaattgaaaactattgtgggaaccaaacaaacacagggtctcctactggttcctccacatccagaactcactccttccgatgagaagagaggcaaatacacacacgaagacacacacccagaaacacttcacacacgtacacactcgcacatgcatgcaaacacacgtcacatacatgaccaaatgtgtgcacacaccaagacgttcactggccgggagaaacagtcaagatatttacaaagcagtgtggcccggacaccaacccatcacattaggagacaactgctgcagagctggaggaagatcctgttggccctacagggtcaggtattgaagctttgttgccagatcgtgggagggactgagcagcaagagtgtcggcagggaggcccctggtggactcgggggaatagctctttaaccaccaggaagaaggaatggctcttaagccaccagggagaagaacttcaatattttggaaaacaacccacgcctttgtgttctggtgatcgcccctttgcctgaggaggcctacatatccagctgctgcacacgctctgatctgtgagcacacatcatgtacgtgtccacatgtgttctaagcagcaggccaggacctgcctctggggtccagcacagccactgttcccagtaggggaggcacaaggcacctcaaggtaagggactagactcggggctggagtggcccccttaccttcaccacgatgggaacccttgggacaggctctcggtagcagaggcggaaggagccatagtggccatctttgagataatacaccagcttccggctgcctccgggctccagcacagccctcttggcaatgatgttgacagcggccatgcagacagactccacatagaagcagccaggctctgcgatgaccttgacaccacgctcctcagggaggtcctgggccagggcagcactgatcactctcgccaac

SEQ ID NO: 478064 - DNA, 1000 bp, Homo Sapiens
ttaatattccctggcctcttggaactgcttgatgtagtcctcgtccgaggggctctctgtgcacttctgtccgttgttgggaggccgggcctcgttatacctgctccagtcacccttgcagataatccagggcaggacgtccaccttgtagtggagctccgcggagaactcggtgctgatgaggttgggcgtgcccgcccccttgcccctggtgatgagctgcatgttgtcgccgtagcagcagtgctgtgccgccagcgtggtgctctccagggacagcatggagcggatgcagtaccgggcagtgggcttgtagatctccagcttctccttgggcccgctggcgtccttccagcggaagtccttgcgcttgatgcggtcgaagatgtcggccgtgctgtaggccacctcagtggggtaggagcaggggcagctgggcaggtcattcatcaccttgtgcatgtacttctttaagaactcgcttttgcagctcatccagcgctcacagctgtctgtgtcaacttcaaacagtttggtggcattaaactcctcgcttcccgcaagcagactcacttcggtggcagctgtcctaaaagtgtcttcaattcctgggcagtttggacggtcacaggtcctcgattctgttgcagtgcacgcgtagccacaagaccgggtccgtttctggttgccgttcccgcaggtgacgctgcagacagaccagagactccagtcaccctcgccatctgtggaatcatattctggctgatctttggtttcaaaagtccggtggcctggggctgtatggtcccaccccctgggggggttgaggaagttgctgtcgtctgaggtactgtcgtacttgtagtcctggtccccgctgtttgccctggccaaggacagggacctctgccaccaggcccgccagtcgggggatgggactgaccagctgggcttattctccggatgctgatctttatctgcttcagagtcaggaccgtcg

SEQ ID NO: 478065 - DNA, 566 bp, Homo Sapiens; identical to SEQ ID NO: 161354

SEQ ID NO: 478066 - DNA, 1000 bp, Homo Sapiens; identical to SEQ ID NO: 346085

SEQ ID NO: 478067 - DNA, 1000 bp, Homo Sapiens
aaagttttactttgcgtttactgtgggttttggcttgaggatctcagcataaaagcagctctctatctctttgacaggcaaaaactcaactaagaggaacaatgacatacagagagaactataaaactaaacacaaaggaaagctctatcgatttcaagtggctacacgttttgctgaggctcaactctggttttgccgggccaggtctcaggacctcagcatcacctcctgcctcagcctggttgttaccctttcttctgggaggcttctgcttcctagaccttgagaaggtctggcagacacagcttaggaaactgccaaagcagagtggtggtgatgccaaggatgtcactgcaggagaagagggcctgggcttctgagccaccgagagctcacaggactggatctgacattcctgatgcatcacaccggaaccctcttcctgcagatactgtaatctgtcctcatggagaaggtcaggagtatcttcctgggcactgagtagagttggctttttgtctacagcctcatcttcttcactttgtggtggtgttgaaggtgttggaggaacaggggagcactgggcctccattttctccttcctccttctttttgtccttgtggccttcttatgatgcctatactttttgaggagtgggtctagctttctcctctggactggaagcatggcgggatcatgtgaaacctcagccacacgactctctggtgtcccctccaatggctcttttgatgatttcacacttcttttcagagggtctttttcccgtagatgaaatctctcttctgtatcctgagcatctgctgatgtgtgatgtgctcaagtcatcgagaacatgtcttgggatagagattggagattccctatctttttcattgatgaatttttttttgacccactatggtgaccccagccagctttgcaggaacaaggagctcacaacacaaggaccaagagtcaaatgctgaagaaagtagtta

SEQ ID NO: 478068 - DNA, 580 bp, Homo Sapiens
tatatttgaaatgaattttgtttttatttgtgaccaaacaactaataatacacagcactctcataattagtataattacttaaaatatggagaaattaaagcatgcaaaagtttttcaaaattcagcagtgttcttattagtaactgatgtcatttacacttctctctgggttgcccaggcctctcattatgttattccaatggtagggcagatgttacaagtgactggcatctgtttgatactggtttgcaaaggagcctctctgtatttcagttcctccttgaatcttctttcctggttgcaaaattgcctgcaaaatgtagtcttttagaagagtggcagggtgcccatataaaattggcatttgggttagacaaccggaagtcttgtaaagcaaacactgatttctcttggatgaaagctcaggagtaggcagaagatggcaactgaacatccatggaaatgtagtaaatgcaagttggatcctgaccagcttctgcagatcacatacatgcatctgtactccccagtaacttttctgctcctactgagaggctctgagatgttccacagtccttt

SEQ ID NO: 478069 - DNA, 859 bp, Homo Sapiens; identical to SEQ ID NO: 346086

SEQ ID NO: 478070 - DNA, 1000 bp, Homo Sapiens
ttaccttaatggtttctttggtgtgaataccagattgaagataaatgttatccttttagccataatatcataagatttttcaatcatatataaagctacacaggattccaacttagacttcatagcttcagattcaaattgaatttcatactcgaattcatgtattttaggaatttcattgggatcctcacaaaaattatgtgaatttctttttggaatcactaaaacttctgtcagatctggagtaagactaaatccgaaaaaaccagcattcagtatgatttctaccttctcttctgcccgcttcctggactgacattgtatgacaactgggggagatttaggaggtggtgcttgtgggagtccaacaatagggtatatccagtgtattgcttggatttcttcgctgtcgattcccacaatacttttaaattttatatccaactcatcaaaattgtcaataggccaatattttccatttgctttcgtcatctcaataataaccattgttttgtgtaatttcataatttgaggtataaataacaatgagatatctatatttcctttaggaggcagtgcaattccttgtatttcactcggagaactaaatctgaaggcagaactctcatagatgaagctatcccagcaatgatccatgacaagattcctgggatgttccacacttgtcagtattatatcaatgaggacatcttccattgtgggatttttgaaaggtataacaatagttgactgaagaccaatgcgtgtggttattctttccgtgtctagaggctggggaaatagtcctactccagataagtagaatttccattctgtaaactgtttgaagataagtattcgtaacttatgtgtcctaactgcatatattttatttgcaatattgccaaggtcgcactgtatttctggcattgtggttggttttggtaattcaatagttaacttcagtaaataccagaactcttcagccatttcaggctga

SEQ ID NO: 478071 - DNA, 1000 bp, Homo Sapiens; identical to SEQ ID NO: 346088

SEQ ID NO: 478072 - DNA, 1000 bp, Homo Sapiens
ttctattatctctttaattataccttattatgccatgtcttatttttaggcacatcatttagatttttgaagaaaggatatgaaaatggggaagggttctccaatatataaaggcataagaaatgtcttcagactctctggatccctgtaaacatagtctatgtagctagtgtctgatgattcaacttcccacatacacgtattccagaacaaacagatcagtaaatccaggcaaactccatcctggcctccagctgctgaaccaattgtttgtccacgtggtgacagaacaggggaagtaggttgctggggaaagctaggggttctgccagagaggctgtaggcatttgggctatctcccaggcaatcagaaccaccatgtctgtccaagctgtatggtcactgttgggttcctctagggaagaatgcagcgataccagttgctccccatggctcagcagggcatagagcaaagatattccaaactgattctgaagcaccacggtgactggccgctctgaggagccaggtggcaacagcgttaatccctgaagtccttggaggagttcgtggagggtcaagtgactaatacatttgcccagaggtttgaataacatttgtagggcctgatcagccacatccctccggaccaggaggggcagatggtgggtgatagccaaaagaatggtaacagcctgatcctggggcaggaaggggagcagccgggccaccagggccttccccttcctcacagagagcacctgcaggaagccatctgctgcctcttccaggttgttctgctcctgggtctttaaggtctggaagagcttctcaacctggttgctttgctgctcagaaaagcagggcggtggaggcctatacttccagccttcctctatttctagtaactgaaggaacatcttctcaatccggtataatacccgaagcctctgactgcttgcagcttctatatcctgctcttgagttccatggggtaccg

SEQ ID NO: 478073 - DNA, 1000 bp, Homo Sapiens; identical to SEQ ID NO: 246629

SEQ ID NO: 478074 - DNA, 1000 bp, Homo Sapiens; identical to SEQ ID NO: 346090

SEQ ID NO: 478075 - DNA, 1000 bp, Homo Sapiens; identical to SEQ ID NO: 346091

SEQ ID NO: 478076 - DNA, 1000 bp, Homo Sapiens
ccctgtgcacagaatgcctttattcctgggctggcgtctggatgtggaggacacagggaatcacagtctccggtggtgggggaggggcagtcacggcccgggtccagactgaccagtgtgtgcgtgcagagaccaggtggggtgatggagccagctgggggtggtcgggcagggaaccaggctggtctccaagtgcatgggcctggatagggccaagtgaagccaagtgaagccggtctgcaaggggcctgcaggggggtgaggtccctgcgtgggtgtggtcagtgtagccactgggcctggcctttctcagcggccctgagcctggagtctctgcatctgcagaatctggctgagaatccgctgcacatcttcatccatctggccctgaatggcatataggaggtggcttctgtacaaagccaccacgctggagtggtccctggcagcttcctgcagctgctgctgtaaatccttcacctggtcacggagagcctccacctcaggggtggcgagggcggccggctgctccttcaaggcttccttaagattgaagacttctttggagagttctgtgatcttcttgtccttctccttggccttgtccagagcctcctgggcccggctctgggcctggcgagccctttccgcctcggtccgtagcccccgtagctgctgctctgctgtggccagctgtgcctcggctgcgtgtcgctcactcttcatgaacagggcctcacgctgcacctggaagacctctgcgctggtcttctcatgccgccgtcccagctcctccagctgcccctccagctgggccacgttggcctgcagggtgcccacgatgcgttcgtgctccgagagcgccacgctgcacacacgctcccgctccagctccgcgcgcagccgggcggcctccttgcccgtggccaccacctcctgctccagactggctgcccggccccgcagctccagggcctcctcctgcagccggcggtgctca

SEQ ID NO: 478077 - DNA, 1000 bp, Homo Sapiens
attttaaaaataatttattaatttgatctcttcatttaaagataatatccaatgcctccaagttcccacccaagaattctgttggatagggctggaaaagttctggagaacattcttccagactctctaggcatcatgtcacaggatgtcctcgccacagccagaagagtgactctgagtatatgaatgaggggctacagtggactgtccagtaccttttccttggtcaccattgctaagcacatgctccagcctctccctcaggcggtcattgagactgatggactcctccaggcgctggcgcaggttctgcatctcagcaagattcttttccagcaggtcggcccctatgactacagtcactgaaggatgcacttcctccttgtcaagctgtggagacgtgctgctcagggagtgatgtggggtagaccgggtgtggttgctgcaccagatctggggctgagtctgggaccgggcatcccacttggtctctaggacttctgtcactttactcatattatgcatttcctcccttctccaaggagatgatagacatccgtgtcccacaaaaaccagctgcccctgttccttctgtctttctgtgctgaattttctggcaaggctctctgccagctggcttcctttggccagctgctcgcagtagtgctgctccatatagtggtcaaagttattgctctggagtagctcctcaaaggtctttagtgtgttcttgacatgctggatgagaagagcagaggccactctcccaagcttcatcttctgccgtaggtgggttaactcttgagcctgatcctgaatcaaggaatgatacttcccgctttctgtagctggccctgtgggtcctagcttttcaaagacttcaaacagaattcctttaaaccagattttatctacttcttttcgaagggagtgctggtttgccacaaaactccatcgtaacggtccctccctgccttggcgccttcggagttcggactga

SEQ ID NO: 478078 - DNA, 1000 bp, Homo Sapiens; identical to SEQ ID NO: 346092

SEQ ID NO: 478079 - DNA, 1000 bp, Homo Sapiens; identical to SEQ ID NO: 246630

SEQ ID NO: 478080 - DNA, 1000 bp, Homo Sapiens; identical to SEQ ID NO: 346094

SEQ ID NO: 478081 - DNA, 585 bp, Homo Sapiens
cttttggtatttattatgccctctttcagaatgagatttaaaatagttcttttaaatctacatagctccaaagaaataaattttggacagctgaagtgttttgttatctaacatgtttgtcttgatatgatggagtcaacatttcagtaaaatgtatgttatatgataaactaaaacttttaatatggaacacataccagcatcccccatacaccaaccaccaccatgaatataaactaagcccgttcttagtatctctgactttagtgttggcatgtatacacggacaggaatgttactgaaagttgtctctatcatggtgacattttcatcagatgtaggtgggacttcttgaaagctcacaaagaacgttgcagtattcatgaaatgattgattcccaagagttcaactaacaaagccaaatttgttaccattttcacaggtgtagctatccacaccagtcaccagagttcctcaatattatctgagagaggagtataaacataatatgccccaaggacccctgcaatcagaaacaaaatagtctttcttcccatgatgtttcccttctgctctttctactt

SEQ ID NO: 478082 - DNA, 677 bp, Homo Sapiens; identical to SEQ ID NO: 161356

SEQ ID NO: 478083 - DNA, 1000 bp, Homo Sapiens
ctgggagcagatgagtttattgggcacatccctcactgaagggcttgggtttggtccccagcagtgcctgttctggggccaggcccctccagtcgtgtgcccaggctgtggtcctcaggaggccctgtcttggagctcaggcacaggtctgggtgcatactcctcgctgggggtgctggccggagccttaggcgagcttcaccaggcggcccagggcctcagcagccctcgtccgcacctcgggggccgggtccttcagcaggatctggagcgccgcaatgagctggtccaggtccacctgcggctgctgcctgggctccgagtgcagcaccaggaacccggtgaacaggggtgcagcagctcggacgttctcccagctgctcttgaagtagaacaggcaggtggtcaggagacggcccagcaggtctgggaaatggtgcatcaggtgcttgcaggtggtgttgaggaactccccgaagtgcagggctcggccctcctgcaggtgtttctggaaagcagctgagagctcctcacatgccagattggggccacacatgcgcagggcaaacctgcaggcgctggccacggtggcctgagggtcctgcaggtgcagcagcaggggcgccagcccgcccaccacctggtccaggaagacgtcctcacagtctccgtggcagaccttgttaaggtgcccaaagaggcggatagatgccgtccggaactccatcttctcactgtcgaagaaaggccggatgcggatggccacgtgcagcagccctgagcgcaggtcccaggactccaccaggtgcaccagcctcgcaaggcccagcatggcctccagggccactgggctgtgagggttgtccccgtcgtccagcccgccaatcatggctgtgaggagctgggggccgtgggttcgcaccttgtcagggcagccggaggccaggttggccaggccgcggagcaccagcctccgcacgctggcgcatgtgtccttctg

SEQ ID NO: 478084 - DNA, 1000 bp, Homo Sapiens
gcatgggtttgtttcttttaatcacaagaagtctctctgtgggtgctgagctcaccgtgccgcaaggctcatggttatgggtggctggtccccagtcagtctcgtgtggcagtcgggaccttctacttccttgccttcgctttctttcctttgctcgctctttggggcttcagggcttcctcctggcctgcgtggctggtgatggggggcgggataggggtgggggcgttgaggttcagagtcttcttctgaagcttcaggtccaagatggcgaatgtgttctggatctggcgctgcagcagctcctgcaggagctccatctgggtgtggactgcctggcagatgaggctctccaactcctgtctctccaggacctggccgggctgcgcaggcgcggcggcagcgaacgccttctgcagcgagttctcccgctccaggcgcagcgcctctttcaggagcagcacgtcggcgcgcttctgtgcctcggcctccgtcagtgtggccacctgctgctcgtggatccacaagtccctgtccatgccctcggccagcgggaggggatggggtggcatgcacacctccaggtgggcaacggtcaggtcgacctgctggtcctggcccaggacatactggtagagtttgtagtggcggatgaaggtgtggtggaagtagtcacagagggccagcaggtgggtggtgttgaaatggccccggtaatctctaagcttgttccccaggatcgtcacagcctcagtaatggagcagcctttggtttcccttagcagctcttctgtgaacttgaccacctgggccacctccacccatgggaagcctttgcccactgcaaagatgatgctctcgtagagggtgtccagcaggatgctcctccgggagtctctctgttcgtcaaactcctcccagttcagaagcctccgcaggcgctcccgaccttgtggtctctgaagttggaagacttctttcactccctggggtgttaaga

SEQ ID NO: 478085 - DNA, 1000 bp, Homo Sapiens; identical to SEQ ID NO: 346095

SEQ ID NO: 478086 - DNA, 1000 bp, Homo Sapiens
tcagacatcaacttccatttcttctccactgctgcagtctgaagagttactgctttcttcctcttctccatctttcttcctgttctcttctggttccatggagacatgacagtttacccaaatagtctgtgatgaatctgttcctgcagcctggagcccttgcccctccccaaacccttcttgcagaccctttgttgatgaggactgcggatctgcttgtttcaacctggggtccgggcctcctgtcatggccatattcttacccttagcataggtcgattctttgtatgcagcataattttcaggtgacaaagtcttgagccagagatccaatttcaccttgtattgcttctgcagctcctcagcctggctcttaaaatgatccttctggctctgcgggatgcgttgccagcgtctgccaatctctaccatgcgctccctcactgacaaatgttgcagctctttacttgaccaggaatcttggtgaaacttgtggtatccattcatggggggtttctgaggctctccatgaaattttaccttcttgaaaaatcgatccgtttttggaagagacctcacttcttcaatatttttctgaaccttcttttgcactttgttttgagtcctcttggagacaccagatttcttggccttctggactaaatcagggtgttcttcactgaatcgagcaagtttttcctcaaattcttgctttgccttctggaaatcctgaatatatttctgtttcatctgctctgggagttccttgtatttctttgacaggattttggtcagttcctggcttctcatcccagggtacatttgggagtactggagccaactctccacgaagaagcgattataagcagtaaggggcctctttggaaagtctggacggttcctgcttttttggcttttgttcatctttttaacacatttcttagcttccaggactaattctttcaaagtaccgaattttctcaagttgcaagaaatctct

SEQ ID NO: 478087 - DNA, 669 bp, Homo Sapiens
ctacccattccctcgttaggttggaaaaccagtctgaaaaaataaatacaatctgtgaccatgaaaaggagcaatcacttatttttcccatatgttttgaacattatttttaaaaatagattgggaatctggagggtaaaatgccgggtcccttcccgagcccttagagcccgaacgttgtcgaatcggtcaatgtccaccccgctgctcacctctgtcccagcagcgccggggccagcgcgccctcccgccgcgtctgcggagctgcgggaaaagcaggtccccggggggtatcgagtgtccagggatatccacgcagacatccttgtagaaaagaaccaaaagcaaggcattccgagtcctggcgggggttgagcggccgggcggacgcctggctatctcttctgggagtcgcgcattcgatcgcattcaggttaaaatttaaagcccctggatcctgctccagtcgccagcctctccattccagagttttctaccttcagccttttccaaatgcggccacgctgaaactgggagccgccgcagtgattgggggaggcaaagtggaacgtaataaaagtgactaaattggatgagaacggtttctggaccttctcggtagcaatttaaaattcagaagtgtttagaagcaatttacaacgaagaatg

SEQ ID NO: 478088 - DNA, 1000 bp, Homo Sapiens; identical to SEQ ID NO: 346096

SEQ ID NO: 478089 - DNA, 416 bp, Homo Sapiens
gtcaaaatggtaaaagggaaaccagagagaaaacagcagagagagatgaaaaactcagcctctttaaattctgtcctttccgtgggtggtcagtgccaacgtcactgctgtgacggccgccctgggaattaatccagtgtgctcagaggtacctgccagccggctcccggtgcctgccggatctttgtgcaggtggcgtgtgctgcgatggccaacgggggctggagggcccgggatggctttgtcctgtctgtgggctctggatggggcaccgactggagcccagctatcctctctctccctggccctccagagcccctctccagcagggtaggtgggtgtcttcatatggcagcaaggacccagatcagaggctggcaccgtgcccttcacagcacgtagtgatcagagcagtc

SEQ ID NO: 478090 - DNA, 694 bp, Homo Sapiens
ttcaaagtgatttgatcaatttggcagaataataaattttcaaatgatcctgcactaagaaccagcaaatttgctagtacaccccagattccattcacccagaagtgcccatcaccagcactggagccaagtaagtccactctggtgtttgatgtctcagccagcatgagaaggaagacatctgatcgtccatcaacccaagggcaggggtaaagtgacccaaggacttcaatgagactgcatgtcttcctttccctttccctggaaataaaacaaaataagagaggaaggtgcactctccaacattcggctgcacaggccaggctgcgttcctccgccaggcatgtgatgtttggacaggggtgctattttctctctcagagtccatctgtgactgggtgcggtggcgggcatctgtaatcccaactactcaggaggctgaagcaggagaatcgcttgaaccatgcttgggttctgtggtcaagtccagaagaggcacgtcctgctcagggccccatcggctaccctccgtccccagtacctggaactatgtatggcaccagccctggggcaggcacgggccttggcttctgagctccagggatgccccagaccccctcccttagcttctgcttcttggcctcacatccaactgctgcaacggcacctctgcacctgctggtgggggtgacgc

SEQ ID NO: 478091 - DNA, 491 bp, Homo Sapiens
tttgagtctccaataaacatttattttgtttttgagatttttctaaactgctttttaccatggtaagtgaggtgccttctgctgtcagtggtcctggtcacttgcagctgctatttccgtaaagaactgtgtaatgctccacagactacctgcagtcactgatacaaccacaccacatccatgctggatcacaactacaaaggaataactctgtgaaaatgcagaaatcacccgtcttctgtgtcgggcacgctgggagctccagaccagagctgttcctatttggtcatcttggaatggaatagcctgaaagaagtattggtaatgaaagtgcttacttgtcagcatggtggctcttgaagcccaggaaggtgttaccagaagaaagtgactcatttcaattatttacaaatttagcactcatatcattaggttattttttaaatcattaactcttaataaaagcatatgtaacttctgtgtctatgata

SEQ ID NO: 478092 - DNA, 1000 bp, Homo Sapiens; identical to SEQ ID NO: 346098

SEQ ID NO: 478093 - DNA, 1000 bp, Homo Sapiens
acagctatgacatttcatttatttctctatataatgcaataaagtagatggattaaccgtgacgtttacagatggagcaggggagaatgaagaggcgtcagtttgggcatcaggctggatcttcacactctgacctcactctgctctatcctgcccagtgttgcttcacctgatatcaggggtgcaaggcaaccagatctgacaccagtttcagtttagatcctgcctttacctgggtgtgacccgggtccatctcttcagctcggcctctgctttctcttcataaacttttggggttagtcctcggatgatctctaaaacatggcccaggtgctccttgccagtagagtgtagccggatttggagggactggacactcagtgtgaacaagacgaaggcctcaggaggcagtaaaagccaggtctggcttctttcgtgtagcctggggctgagtcgcaggctgagaaatccagtctggccagtagggggctccaccaagcgcagtctcagaatgcccaagagctccaccgtcgcccggggtctccaccaagcgcagtctcagaatgcccaagagccccaccgtcgcccggggtctccaagaggagtgggtcgtggtgggcgttgaagggccgtaaaagacgagcagcccgcgtccgcgtccgtcctcccgggtctccagtccgcaggcggccgccgcctcggccccgccctcccacctccattcccggccccgcggacccgaacggtccctctcgcaaccgatctgctggctggggcgctggggatgcgaattcctagaagccttaagaggctgcccagcgttggaagttcgtatccccaagaatgctggaggttccggctcacacaccccctccgggcacagagtcagctggggggtgctgggagggagaacgccccgctcctcaccccccatccccgtgcaccctggagcccagctccatacgttcggccaccccaggcggactcggggtggccgggt

SEQ ID NO: 478094 - DNA, 1000 bp, Homo Sapiens; identical to SEQ ID NO: 346099

SEQ ID NO: 478095 - DNA, 1000 bp, Homo Sapiens; identical to SEQ ID NO: 346100

SEQ ID NO: 478096 - DNA, 1000 bp, Homo Sapiens; identical to SEQ ID NO: 346102

SEQ ID NO: 478097 - DNA, 1000 bp, Homo Sapiens
tcagtccttctcctgggcagtgctgtcctcagagatgccctgggcagccagttcagccagcacattatccaggtaattggcatctgggtagccatggccagtgagattagagccaaactctgtcttgtggtggacctcattccagatgacggtgtctgactcgcctgtggtgctggaggtgccaatggcaaaaatgaggcggcgatcccaggccacgagcagcagcttcagaacttttctccctttctcgctgtccggaaggtaacagtgtcgtgggaagcctcgggcgctgaaactcttcccaggattcgggtgttccggtccctgaatgccgggggggatgctgtagatgatccggatggttttgcagtctgggtggccaggcaaggagtgggggatgaggtggtactccatcttccctggaggttgggtgcctgtcttcaccccataaatggtcttgcaggttggacactgcaaacttccatccatgggtctagcgctgtgataagaacttccttctctctcactgatgggagcacacttcaccttgttcccattgttgtacatggcaaccaagcagtagatgtggtagacgtggccgcatctggacagcttccctaccaggtcaggttttaccgtaggctgcgggcccttgtagcctgagggggccgtgaggcgttccatacagatggtgcagtcctcatctggtgggtgccggactttctgtagatatttttttagcacttcctctggggttttacctttcttggcttgttttttggtggtcttgcggcttgtgttggaaacccctgggatggattttatttcactcttgctgacggggggtgggtgtaggaccagctttggtggcctggtgagacacacaggcagccccgctgcactcatgaggatcccagtgattcctgccaaggcagggttgacaggactggacccatttaggttcttcactgggactgtggggaccccagaggcgatcagc

SEQ ID NO: 478098 - DNA, 1000 bp, Homo Sapiens
tcacctccggcccatctcgctctgtctcatgaagtggatgttgttggcgctgtctgacagttctgggtactgctcgacagagatcacgaaaaagccgtcgtagccttgcacccgccctgtgctcagcacctgctgcttctccccctctgtccaggcccgcaggccttcctccccttcccgcagtctctgctgctcgcgggcccacgcttggcgcacggctctctgccgggccagctccaggacccgtgccttctcctcatccaacgttgtcccgtagcgtgtgttcaagcacagtgccccgtactggagctggatgtctgtgtagcgtctagtcctgccattaagtactgtgttgatctgggacacagtgacgttgaccccattctccagggttcgccgccccccactgaggcccaggatggccaggtcaccttctgaaggtcctggtttcacaaagtaatgggtatccaccccatcaatggtgaagtgcaggttctctaggtagtgggcatggttcaagatggcagcaacccttcgcccatcctcattggccacactgatgatgtctgtggtcactcggccatccttcaaggcaaacttgacccccttgccaaagactgagccgctggatgcaaacttcttggtctttggagcctgctggcagctggtgattgtggagccatagagctggtcaaaccgttctaaggtgacaaaggccttgagctgcttctgtacttcacactgtaccccgaggatagacttgctgttgtcccactcctgcgttttcatctgtgtgtggatgagctcgtaggagggttccatggcatccatgtctggtttgggataaccagggatcacgttgtgtagctggaatccaaaggtgagcagccagctgttaacatctgtcatgaagcacttgatgtcctgggagttgctgatggggttgttgtttttgaacatatagagattaaaaggcatgacgttgctgctactaaggtgc

SEQ ID NO: 478099 - DNA, 1000 bp, Homo Sapiens; identical to SEQ ID NO: 346103

SEQ ID NO: 478100 - DNA, 1000 bp, Homo Sapiens; identical to SEQ ID NO: 161357

SEQ ID NO: 478101 - DNA, 1000 bp, Homo Sapiens; identical to SEQ ID NO: 346105

SEQ ID NO: 478102 - DNA, 1000 bp, Homo Sapiens; identical to SEQ ID NO: 161358

SEQ ID NO: 478103 - DNA, 658 bp, Homo Sapiens
tgattttcttcttttgggtttaatgttgtcaaatggggtataaagttgcctgcatgctcctcagtaaaagttggttcttggggactctgcatcaagatgaggctcattactcatcccttggcatatcaattctcactttctactcagagacatacagaaaagacttccacatatgggactagacctcttgttctcagaaaattcagaatttctttagagggcaccaaggtagatccttgcaatggcagctgtggacagatgtgctggcatcaggttgccatgtcaataccctctctaggcattcatcgtagggagccatggagaagcagaaccacctgacatgcctccttcagtgttttctagtggtgttcctttgaccagagttcctgagcacttttttctgagctctagtttccctttcttgactgtagccatccccatgtcacccacaccagcagcgggaagtctgttcagccgtcccttgatccccttcacggagatgatatacaggtttttggctcctgtgttgtcagcacagttgatcacagctcctaccggaagacccacagaaatccggaagttcacaccagaggacccaccacgtcctcgcttccacatcttgaacgctggaaagaaggaaaaaggacatagattttga

SEQ ID NO: 478104 - DNA, 1000 bp, Homo Sapiens
tcaattttctgagatatattttatatgcacacgcaaaaaaaccagaaggaaatgtgagcagtgggagaatgggtaagtttcattgttccctttccatttctgagtttctaattttctgtggagagaaagcccatgatacatcatggtatttgagagggaggatcctaaaatctaagccctggagctaaatctgccatcgttgctgggggaaatcactccagcactctgcctcagtttgctcatccataaaatagaaacacatccttccctacctcaaaggagaacagaatctaacagcagcccacatgcatgccctccggctggtttatgctcttcctgcgcagtagggctgtctatgtccacagccttatgccctatgccctctaaaaccctgagtcaggtctgagctggagcattctgcagccctcctcctgcagcagccctgctggtttccaggcacataggccttggcggccagcagttccccctccggccacagcctgcatgcggtgacacagtccagtgtgcccagaatgcactgccggccagcacccgcagcagcccgcagctgcgcaattacacacagctgtctgggtgtggcgccccctgctccaccacctcttggaagtcttcctggatgcaccatgaatttcctgctggccagcaatgtcctcggcctttgggtgacccaagatgaagtcctggagggtgctgaccacacaaggaggtaggggcatggcagctgaatgcagccaggttgaaggcgatgggaggctgggagtgctcaggccgagatgctggtctcttggcagaggcaggccgcgagttccttggctgacatcatgcccatggccctgataggcccatgtccagtcttcatgacacctctgactggaagaactctctcggcacagccttttctttcggggtcccaaagtgcctgtgagcaggcagctcccgatctcctctctgtgacacccacagactcaaaaacacccat

SEQ ID NO: 478105 - DNA, 1000 bp, Homo Sapiens; identical to SEQ ID NO: 346108

SEQ ID NO: 478106 - DNA, 1000 bp, Homo Sapiens
tcaacaaaggctgatgtggtagtaggaggtgcaggggtagtgtccttcgagtttggccagctctggaaggtggtagattctccctgacgggttgtagagccggcaggggacagtgttgtgtgtggcgatccagtgctgttcaacagggactgctgtggtgctgggaggtgaaggtgttgtgtcacttgagcttggccagctctggaaagtggtagattcttcctgaaggccagtgcttgtggagctggcaggggtcagtgttgtgtgtagcgagccagtgctgctgtgggtgggtgtagatgcctccacgaggcctgaggttatggtgtcgtcaggtaagagtgtggtttcagtgtcgcctgggctgctgtggaaggttgtagattgttgaccaagggatgaggctgtggtactgccaggggacagtgttgcctctgttgagccttggctgctgtgggaagttgtaggttcctgactgaggcctgaggtggtggtgctgtcagggaacgctgttgtgtgcgttgagcctggttgactgtgggatgtgctggattcttcgctgacgcctgagcttgttgtggttgcaggtgagagtgttgcatctggtgatctggggctagtgtagaaggtggttgatttctcactgaggcttggtgttgtgggactgccgggtaaagttgttgtttcggttgagcttggactgaggcgtgagggtgtggattctccaacgaggccagaggtggtggagcgggcaggtgagagttttgttccagttgagcctgagctgctgggaaaggtagttgattcctcaccgaggtctgcggttgtgagtgtggcaggtaaccctgtttgggtggaggctgggctgccggggaaggctgtagattcttcagtgaggcccgaggtggtgctgtcctcagtgaacagtgttgtgtgagttgaggctggccggctgtggaaggttgtaggctcttcacgacgaactgaggttgtggtgctg

SEQ ID NO: 478107 - DNA, 1000 bp, Homo Sapiens; identical to SEQ ID NO: 161359

SEQ ID NO: 478108 - DNA, 1000 bp, Homo Sapiens; identical to SEQ ID NO: 161360

SEQ ID NO: 478109 - DNA, 1000 bp, Homo Sapiens
tttttctcagcatctttattactgtgttcgactccagtgctggacactggatggggtggggtggggtcggagatgtcaaaaccaagaaatcccttccccactctgggcctcagtttccccctctgtcacacagggaggaagacttcctctgcttccttcatcaggacaccgtgaggttcaaaggttttcagcacagagtgctcagccaggagggccacccagctgtggtccttgccccagagggctcaccatctgggagggagacctgcgccctggcccaccatcagcaactgacaagaagggcagttgggtcatggcccagtgaccaggcaacgtccgtgagcctctcggccatgggtctggcttcatcaagctccgtcctggaagttgacagctggtcgtgtggggcaggagcgtccacagcccccattccgggcaggcttcttctaaaccttcatagaatcatagtccaaggcccctacccaagcccagagggcagacagctgagcccccttctttttgaccctgctgggatcttcaaagagagctagtgctggagtggaagggccagagctaagagtggcagccacgtggcgactccagtgagctggtggcagaagcctcctagggccacccagccaaagtccagagagctgtgaagaggtaggtcagcagacacggtgggctggtccaggcacagcaagggggccacgatggcttccagcatctttagctgatggtgcccagtgtgggctacggggaggccggctgactcagagtcacgctggggaagatggcgacaaagctctcccaccttcttcttacctgttggtaccgcctcagccaccaccggctgcctcttcgctgggcttggatcagctgctctgtgtcccccaggctccccggcacccgctcctgggcagtggcatctggcccttctgtgcctctctcgaggccctgggacctggacttctcttgcccctgtctgaggcttagcgcc

SEQ ID NO: 478110 - DNA, 552 bp, Homo Sapiens
ttttagtccagtctgtttactgtgctttctccatctcctcctcccattagtcagccatcggaactgggaaacctccttctttccccctctgcactcttgccacaattcatcttgtctttctgcagccatatcttcttaatacagactgaaggtcctgtcattgagaatagagtgatccataaacctggtcatcgcgctttttatgagacaatggcgtgggctccggatccatggcatggtttcctctggacgcactcctggatcatgggaccaccagaagctgaagttctgagcatcagtcaaggggattctgaagacctgattgggaaacgtcttcaacaacaccttccggacagcttcgtggtatcttgtgtggctattctggtgcacggaataattcccatcttttgagataatggggggaagcctagtaggctctggttccttctggtttgtttcttcagttgtgttccttttcttgttctgaaaggaattttgatatcccaatagatacaagttgaagaaggccatctcagatcctccctggcctct

SEQ ID NO: 478111 - DNA, 866 bp, Homo Sapiens
ttaagagcccgttcggggcagcacattaggggcaaacagcctggatgcccagttgcagacacacttccatgcctggaggagaagattgcgtctgagagcaggaggagctgctggaactcttcttcccagccttgttttaatgctcttgagcatcaccttcacagagatataccccaccagaattagcacaataaacaggccctgcagcagcagggctgtggttccggcgaatgagagaagcctctctccagcgaggtacaggagtccagtctgaatgccctggtctccgcctccatgtttgccaccatgcccaggactaggggcagcatgggatctgctggctggggctgtgcttgtcaccccctccctcccacttctctctccagccacgttttcagctccagcattaaggccagtggctacagtaggtgccatgatttcaggcagctcctggctgggctggtccttggctggagctccctccacctccagcgctctctctggagggggctcttcccatgctggctttggctcgacagccggtgccgcaagtgctgctatgtctgcgtacggaccaggagcatgtgtctgtgcctccatgggctcccgaatctcctcctggacaaggacaatgtgcagaggcagccccgatgggatctctggtgtggcctggccagctagggcctgccccgggctgtcctgtggtacctgggtgcgccttcttacaaagggccacaggcgtctggggtgagggatgagccttcttcggcattgtcggaaaaggctctcactccctccattcctgaagcagcaacctctcgaagtggggaagcaacaggagaacatcttgctctcttgagcgtctc

SEQ ID NO: 478112 - DNA, 1000 bp, Homo Sapiens; identical to SEQ ID NO: 346111

SEQ ID NO: 478113 - DNA, 1000 bp, Homo Sapiens
tcagtaggagtgaatggctggggggacagtggcacagtcagcctcgttcaaagttttgtcaattatgggtctatattccacagtgacctttttcagcggtgcctcaaatctgtcgggagttgatttaaatctggcctgctcctccgcgttcaccatcagcaaggccagcccgcagacctgggcggggccgtgtgggtgctgggctgtggtgagaacgagctccacactgaccttcccagtgccgacgtccacataggacagggtgtgcttcctccagtgcacctcaaagggcttcttctgttgcccctggatgggcttggagtgatcatactcatcaatctgcaccttgtagtcttccccggcgtgcgcgccccgtgactccttccccgcctctgctccattgacggtctgcagcgcacatagcatcaggttctgcagctccagggtctccaccaggtccgtgttccagaccattccctgcagaaggcagggcccaacagtgtgcacagagcccactgtctgctcaccccggtcaaacgtcttcagatgcttcaggtctccatagagcttgctgattttcccacaaccttcttgcaacaagcttcccacacggaacacggcagcatgattttgcgttgaacacatcctttccagcgggatacagccagggtccaggacgccaagcagactgcctgtgaggcaccacgttccatacggctccacggccaaccaggcagcactgcctccccacacccctggcgggactcctgatgtggggtctggtggtgaacgtgacacgagccagcagcccttctgcatgctgagtcgcagttccgatgttcttatgcttcttccatcagcaaatctcaatttgtcaagattcgtgacagattcttccccagcatttggtttaattggagggactttatctctgtcctgttcttcgtgcacataagactcacactcccacacacggtattccttttcctgcacattattt

SEQ ID NO: 478114 - DNA, 1000 bp, Homo Sapiens; identical to SEQ ID NO: 346113

SEQ ID NO: 478115 - DNA, 561 bp, Homo Sapiens
aggctcaggccccaactcatgttaaagagtgtttgcattcctgttcacttgaggacaggtaagaactaggctgtctgatccccagtcccgccccatcccccaaagtaatgaggctcagtggcggctgtcccattacataggaggggtgccaaggcccccctcacaccacaaacttgttcttggctagggagttgctcttggtggctgtgtctgcatgggcctggtacccaatgatggtctttggggagaggcccaggcgctctttgtatacacgcccaacgtgcagcacgcccgcctggttttccgcctccctcgtccacacagcgatcttgtcccccttggtgcggatgttgacgacggccccacatacctctctgctgtgttcctcaaagctctccccgatcagacacagcagcgtctccagccacagccggtccagctcaatgtggcgctgctgcttggccaggctgaccagccagcggccaccccgtttattcctgctgtcctcccacatgggctggatgccatcctactctgtccgggctcctgtagagcatttcc

SEQ ID NO: 478116 - DNA, 1000 bp, Homo Sapiens
gcggccgccctcagccgggctccctcccagtgccacagatgcccacagtgcacagatgcccgccgggcactgctgaagctgcttcgtcacagccaatggtgagtgtccaggtggggctccgtggctatggcggaaccaggtcctccccgtccactgtgcactcggtgccgccgggctctgcaggctcttccaggccacccgcgccacctccagcctgcggagactccggaggaagcctgcttccaaacactgtggctaccagcccagaggcttcccggacgtgggtgggagaggctggtccagatttctggctccttctctgtgagctggcacagctccccaggcagggctctcttcccagggttctgggagctgcctctctgaaccaggagtggttccggctccccacgcccctccctccccttgcctggcccagctactctcctgggttcgtctcctctggaagtcattcctctttcagcttgccttacccagcctgactgtggtctccagacactaatggaggtactgggtgcctcgcaaatgcttctagcctccatgtccccagctgcaaaatgggtcacaacagcagctgctttaaagttttcccttatgatgttccagtgaccagcactgagccccaggagcgctgggaaatggtgagagagagtgagttggggattggcctaggtgaggctctcccctgcgtctgctcagggcctctgccctactgtcctgcccttgtccctctgagcccagtctggaagtcggggagcgacctctcccgttgtacttcatctcccctgagcccgcggcttccctcctgctcgctacttgacactttggttcacctgagtttccctcgcagagcctggagctggtggccagagagcagaggtgggtgggctgccactgtgggctacaggctgggcacgaagcgaatcctctgggagtaggcgaggtcaacgacgtacaggagcaggttgacgtaggtgaagat

SEQ ID NO: 478117 - DNA, 1000 bp, Homo Sapiens; identical to SEQ ID NO: 246632

SEQ ID NO: 478118 - DNA, 1000 bp, Homo Sapiens
aggctttattgaatttatttgctttgcatatatcttaaatcaaaaaagttaaagaagtagaaaagttgtcagaatatgcctttaggcatttaaaaagaacttaatctcttcatttaaaaacagaactttgttgttaactgtggaaaagaaattgttattggagagttctcagagtgagaatagctgaatacaggttcactgtgaaaaaaaggaagggaggtgtaacagctgtgttgttaactgtggaaaagaaattgttattggagagttctcagagtgacaataactgaatacaggttcactgtaaaaaagggaagggaggtgtaacagctaatctaccaggagtacccagataaagggcatctaccttaatatattgttcactatgggaatacaaaggaaataaaattcactcaatcaaaatagcattatcaaaatggcaaaggcacagtatcaggaaaaatagatgttatatagagaaaatgcaaaatttagcatgtaattgtactgtgtcacattataccagcatcaacaaaacccagcaccaagtgtttagctctgacacctcactacctctctggatttttttgcatggggcagcaccccactcagaatataaaggcacagtcagatgtccaggcctgcatttctgtttaagcaaagcagcacagtgtaacagaggcagacacagtgataactactcagaagtcacttctgggtctcctagaaaaatgagctaggtttactgcccagacatccaaagggagctctcccttagtgtttggtgggtttgggggatggaatgaagagaaagacagagaaaggaagatttaactaacttctagtgaacctagatgagattctagggtggtctgcatctcagaaagccagccaattaaggaactggctctgggggtaaaggtgcctacatcttcatcctcagccgaggagttattaatggaggctgtgctacaaaagaaaaagaccgtgtggcaagatg

SEQ ID NO: 478119 - DNA, 917 bp, Homo Sapiens
gcttccaagtttatttctgggatctagggaggagctggctgaaggagcggcctcccgaggaggtgtccgacctctggcctggggcctggccaggcctgaccctggtctctgtggtcgtggggcaggtcaggcagcttgaagaggagacctgccttccgggggtttgggtcactgcaggcagagacagctcgagtgagcagcatggggcagccgcctcttccctccccgctgccatggctgcccgcacacctgagcagagccacctccggcagggcctggctttcctcctgcagggccttcacttcatcctggatggcctgggcctcctcctggatggcctgggctccctccttcaggctcttatacaataaggtgggcaggttctgcagcttctcccccagggccaggttgtgcacttgggtggtgttcagtgactcccgaagcctcatgcagtcattctgcaactgcctgatctcctttgaggtccgctgggggccccagtcctcctgatctaagaactggtactcctggatctccgagtccgattcagggtcttttggctcagtgggctcagaggtgttcaggagtgtaaacaggaacgtgacggtgggttccagttgttctgaggaaggtggctccaagttccgctcctcggaagcctgagggcccttgggttcttgctcctcaacaggctgcaccactggcttgttggccagcttggagtgggctctttgtctgcccctaagagacagttggtacgtgaggaggatgagcagatagacagacagacaggactggggtcctctcagggtcccaccagccaagcacagacagatgcttaattcagacttggacagaagatagctcaggacctggatttcagtcctgctctgctgctcataggtggggcagtccat

SEQ ID NO: 478120 - DNA, 883 bp, Homo Sapiens
tgctgaatttattgttttgtaaaggcatgggtttttgtgtgtgaacttctggagacaaaagaaacatgaattgtgactataatttatcccatgccatatattccctattctacacttaatgtttaattaattgctcttatcaggctctgtggcagcattttacctttttgaatagctgctcattttccctacatttccctacatttcagcgctctctaaagggtactattcttcttgtgtgacagatgggcataactttacaagaaagggatttagtcattaacacccatgcaaacagattattcttgctaagaaaataccttgtaaggacacaagagcagtgtagcttttgagagaaaccatatctcatacattaaaattgcaaaaacactttcagattaattgctgtttattagaattgtttgtggggagtgaggatgttgaagcagaaggcagatcgtagaacagaggttttattataaccttccaaagtctggaggtggcagctgctggtggcaggtatagcagagcacttggagacatggagtgggaggtcagcagtggtgatggattctggagatactggatcaccatgagcagagctctcatttctctcccagctagaagtggcagctactgtttgagaactgaaaggagcccacagacaatagcacaaattcatagcttctgcctttaaccagctgggggtaagataatcttttaccttgctgaattgcaccagccatttcttcagttgcattctattttcccagcccaaaatgacttggctctccaaggcagacaaagcagactcccactgatctggaatatttgtgagaactgaggtttgagggatgaggcaagagtcccacttgtgagtcat

SEQ ID NO: 478121 - DNA, 1000 bp, Homo Sapiens
gggggaggagctgtccctctgaggcctttgggaatcggctgtgccaggcatcctcagccctccagctaagcaacacagagagccaaaagaggctactagagacaagaaggccttcatggggccactgcttgtgggggatgtcagcagtggggaggagtgaagcaggaaggaaccgggagactggatggaattgctcccttcacacggtcacacatagccacacatggtcactgggaccagagtcagctctgtctgggcagccaggccctcagtgcaagccaccagcccatctggaggggattagtgctccggccaacaaggtcagctggccccttcctagctggagcctactcaaccttgccaggaagtcagagagctggacaagtggagcccagcctggggaggtggaagagagggaggatggagcatggtgaagcacaggtggcctttttggcagccccagccctggctttggaacagtctgggcagtgtgccaacccctcttgccactgtcgtcccattgaccctcatgaatgagttgcgaaggcagttaccttcagcctcctatggataaatattcgaggcccagagagggtaagagacctgcctgcgacccctcagcacttctgtttctctctggggtcttgagggtacaataaagacccctaaggcttcctcttctcgcaggaggtccaggcgcagctgtgggggagggtgcccttggtgtcttctgtccctgcagccagtctgctttctactcggcagctcctctctccctcctgggatgagatgtgcacgcgatgatgggattccactaggttccgccgtgtctacctctcgcagatgttggggaagtgcttcccggcgtctaatcctcgctgttcccccctccaccggcgcccagcacacccgcggcgctccgctcccgggtacccacagctttctggagtggcgccggcggcaggagagagctagagccgactgagccccagaactcggg

SEQ ID NO: 478122 - DNA, 798 bp, Homo Sapiens
aattagaattttaaaaatgctttcatgtacttacacccccaaattaccaggtaatttagaatgttctttaatcacctcctgcgtagatgtgaggggcctcttaagtgacagtgtccaagtgttaggccacaggaagggtgactaaagggccattctgcccattacagttaacactatagtggttcttcttcctagcgtgtcttagcttgggctgccataaaataccacagactggtggcttaaacaacaggaatgtatgttctcacagttgagttctggggtgcagggctctcttcctggcttgtgggctcggctgccttttcgctgtgtgctcacatggcttttcctcggtgtgtgtgcacagagacagctttcttcttgtctcttcttgtgaggccaccagtcaattatgcagaaggggaagcaaacatgtccttcttcacatggcagcagcaaggagaagtgcccagataagggcatatccttcatcctggattctaaaatgaagaggatgtggcacagagttgtggccaacctcttctcgggacatgggccgactgcttcacatctcagtcagcagagacgccagagggaaatgcaggaccccggctccacagctatccaggaaggtatctacttctccgccctcagaagtccttgcatccacccctgaaagggtgattttcacagttaagtccatcgacagggcctgctgcgacaatcaggacaagggcctctgtcctcaggaaaccccctcctggcgctgcgggcctgcttcctggggatgcaaccgccatg

SEQ ID NO: 478123 - DNA, 1000 bp, Homo Sapiens
ttctcaacttccatgatttattaatgtaacgagaaagtacaattgaatttcaaataatgttgatgctattctgaggtgaaaaataagcttcagcggatgttcaaatcaacagaggagcttcaaaagttaatcatcgatatctggaataaatctggaaaaactgtcttcagaatgtttgtttttctttatagaaaccacaactggaaaatctagcttatgatgaaaatttagaagtaatggagcattaaactgcatcagcaataccatacacaaagaaaaatgaccccacttctcgtaatcctacacattttaaaaattctgcttcatcatcattcactgtgtgacatcttccatgatgtctcctgagttagttggttatatttcaatttcctgttgatgggataaagtggagaaagtgttaattgccccatgttccaattttccccatggaatagcaccagttcaagatcaggtggatcagcatagacagaaaagacataagggtaattccactgcagagggagcctgtaccatttctgttgccctttaattggcagtgaaagacacaaataaaatatttgatgtttcaactggaaaatggccggggcccagttggaaagcaatgaggttcttcttttgtttaactgaagacaaacagattctacttctacgaattcttctgataaaatactttccatagtggagataactattttctgggaagaacaatttagctagggatccaagtgacatttgctgatgatctaactgtgggaaagttgtaaaatgacaaggattattagaagttttccagtacatatcatagattattttgaaaacggctgaaagtactccccttttttagtcaccttttgcaatttgactttgaagttcttctcatcaagtggtagtttatgttgtttgtattttggttcagttcttggcttcataaaggaatattgtagcatcagtaactgctgtttcctggcgtccgccggct

SEQ ID NO: 478124 - DNA, 1000 bp, Homo Sapiens; identical to SEQ ID NO: 346114

SEQ ID NO: 478125 - DNA, 790 bp, Homo Sapiens
gacagtccttctttccagtttatggaaataaccagtgaagatgaaacaggtatatattttcttgccaaatattgattaaaatggatgttttagttgagagaaaaaatacagtttctctgtttattcttctcaatatctcttccctgattgatgcataggacctctagctcgggctttcctcttagtttagaagttgaataccatggagtaagaggggtgggtgggtgagttgcaggagaccttagaggcagtgctaacttttgacaaaacagtgaagtagttgaacagaagaagaggcaatttctttctagaatttccactctttctccctctctcactctctctctccctccctcccccaccctctctctctcacatgcactcatacacacacacactcacacacactcatgcacactctccactcctttctcttcctttgcctccccatggcctctcctgaatcttctttttattctctactatctatcagtctatcttatggttttatttttttcttaaatatccactgataatattaaaagttatgatcccttcagaattatttgcatcttatctaggactcaagaccaaaagccttaagaacttaataaaagcaaagcaaaaaggttacagaaaaagaattgatttcacccttttctagctcctttgctttctgctgctctgcaataggcaggtggaggaggaaaggaagaaacgaaggaggaagaagaggagaaggaggaggaggaggacctggctccagctgcccacactctccttggatgct

SEQ ID NO: 478126 - DNA, 811 bp, Homo Sapiens
ttagttttcaaaggaaccgctttcactcagctgtactttggcgtctcatcatctgtctacaaggagtaacatttaaaaactactgagtgaaattagacctaaacccaatataggaatgtcaaggggtttctcccctatatcacagccttctcatattctaaggattccatagagaagttccttttagagctcaaactcagaaagagttttctcaaacaggtcatttgtttttattttatggatacaccaaaattttataatgagttgtgtttctattttggctttatcttccagaaacttagaaccaaatatgcagtcctcttctagcaactgtatgagagcaggtggtaagcttctattttattgcccttgttttcccttgactccaaatcttctttcatccttttgtaggtatattggtaggatactcaaattctctgtcacggtcctctttcagagtgtggatagccagaatacaaccagagatcctatctcccaaagcccagttcatagtcttctgctgctgcaaaaccatctcctggcccaacaaagccttcagacagcagatcaaggcaatataggtaatatcggggtctctccaaatgggaaaagaattgcttcctgctaatctcaggcagcagcaccgcgtccacatccatttccacactgatctgccagtgtgatgcaaagagaagtgataatcttccattttcaggccatgccttcataaaggtactgttggttcaactttcccctttccattttccttcaaattggaggttggacatggtggtagtgagtcatcttcaac

SEQ ID NO: 478127 - DNA, 777 bp, Homo Sapiens
ttgcctttcaaatacttttattaaagaactggtggggaagggaaaagtgtgacaattcagagtaggaatgaggatgggcattaaaagaaagggaccgaaagcccaggactgagcttcacccacctgtcagcatttctgcctgcctggccagcctgtctgcctgcaaggccttggccagtctctccctggctttcttcaccctcctggcctgtctccggatatctgcaggagtcaccaattggccagagaggggcggtgggagctgacaacccattcctggggttggcccccctgccacagctggaaaccgcccaggggtgggctcaagcgggatgcgcacacgctcagcaccagctctgtccagagattcaccggccgtccccggtgcaaggatacttaagacgctctccaaatgcagtggacttgaaccttctccttggctgctgcagggctgcagggcctgcagtctccggtaggcgcagagttgctgcggcttctccaggtgctcgtccccttttctgcgtctgacctggttgtcaggatgagacctgatccttgtcaccggcctccggaagatgcagctggtgagtctcatggggagagcagacctcgcagctcgtctccgatgggccttggccatgtggatttctcgtttcttctgtaaagcccagggcatcatgtttcttttgagcttccccagaacaggtgggctcggaaaagaggtgaacgcaggctctcccatagccgtagagtttctcttgctgaccccactcttga

SEQ ID NO: 478128 - DNA, 938 bp, Homo Sapiens
ttttttcacgcttaattcactttatttttcttgtgtaaaaaccctatgttgtagccacagctggagcctgagtccgctgcacggagactctggtgtgggtcttgacgaggtggtcagtgaattcctgatagggagacttggtaaatacagtctccttccagaggtcgggggtcaggtagctgtaggtcttagaaatggcatcaaaggtggccttggcgaagttgcccagggtggcagtgcagccccgggctgaggtgtagcagtcatcgataccagccatcataagcagcttcttaggcacaggtgcggagacgatgccagtgcccctgggtgcagggatgaggcgcaccagcacagagccgcagcggcctgtcaccttgcaagggacggtgtggggcttgccgatcttgttcctccagtagcctctgcgcacggggacaatggagagcttggccaggatgatggccccacggatggcggtggccacctccttggaacacttaacacccagaccgacgtggccattgtagtccccgatagcaacaaacgccttgaacctggtgcgctggccggcacggatctgcttctgcactggcataatcttcaaaacctcatccttgagagaggcccccaagcaaaagtcaatgatctctgattccttaatgggcagggagaagagatatatctcctccagggacttgatcttcatgtccttgaccaagcggcccaacttggtgacgggcatccactccttatcctcggccttgcctccgcgagctccgcggcctcggccccggccccgtccacggccgcgaccccggccccggatgccactgccgaaacctccgcggaagccaccgcggttccccatcccagggccaccagggcctccggaccctcctcgctgcaccggcgtcatccgccatttggtgttttct

SEQ ID NO: 478129 - DNA, 1000 bp, Homo Sapiens
cgcgcccggccgaatatgttaagaattcttatcactagaatactgctttgaggcgctcacagtactttccaaaagaaactacccacctcaaagagccctgcacagcccaagcgacccatgagtgtggtagccatcattttgttagccactgcttggccatcatcaaagtattcactcagagtggggaaattacttaatatcaatgatattaacgatttccatggatttagctttgtaacacacaatgcacaagggtcttcagatgtttgctttttacaccaatggtaggaaattgtcattcttccgattcaacacgctggcggatgacgctttagtgaagtgtgactacctagaggagcaggaaggcggctcccgattctcactgggccagcctcttccagaaggtgcaggctactcttctgacaggagatcacaagtctggcaggctgggcaagcgctctgccctttaagccactgcttaaaacaccctttgtgatacttgtgcccacatttgagcacacgcacgttttttgatttgaacacctcgtgacatatttcacaggaacttgcacccagtgcaaccctcacagggacatcttctgctttctgccccttggttttgggtgatggtgcaacaaccgccaagggtgggccctgggaggacctggtcacgtgggcggcagagctgggctcataagtcctcttgtcctttcctgggtttggctttttctttttctgttcatctagaatgtgttctgtcactctttggacaatttcatcaatactcaatcctgaaagtgagttcttgtttttgcttctcacttttttaataaaaccagcaagctcagtgctgttgtaacatgggaataccactgacaggtgctcaataatactattgaatggcttttttggagactggcttgaacatgcagcacaccctggaggaacaggctgcttctgatcagccgcagggctttgctctgacagagctgcctggcca

SEQ ID NO: 478130 - DNA, 1000 bp, Homo Sapiens; identical to SEQ ID NO: 346122

SEQ ID NO: 478131 - DNA, 1000 bp, Homo Sapiens
aactcttcataaataatttattgtcattaggatcctaagtgccgaagacaaaaggcctaaaccggccctcaggacatgaacattttagaaagttccattcttaatgttttaaattgggggaaaaaatctattataaaggggcaaaggacacgataaaaccacagaggactcagcatggggacctcattccccacgactgaagtgtcataagaaaaggatagagttggaggaagaatggctcgggaggagtcactacaagagatgatcctctttccagcgctgcatttggaaggctcaagagtggctgctcttcctgaagaaatatcgaaacgggaagagagagcttagaaacccaaagaagccggtggctgctcgctccttaggtggaggtgagttgtgctgcaggggtgggacaattcgccctggcaggctgtgtccccactcagaatcttgtttctggacatcagtgatatcagaggccagagtctcctgcaatccttgttgggtttttctttccctatttctcctggtttccacagggggcttctttttgctggggccttggctggaagtccctatcttggccctgtccagccctggcctgctgggggagctgggctcgtccatgtgttttcgtttcctcatcacagctcctactgctttcttctcaactgggacctccagctcctgggtgatgacttccttattttctatctcttctcctctgatactcttcccatatctgattttgaatttatacacattgggtcctgcatgaagaaacctcgtctctggaaacgggtaggtaaagggttttaaactcattgctcccaaacgatagctgttttatttctcctgttctagaatctctgtccacttaaggtcgtctctcagccccaggtggttcccaggctcggccaggctatgtctcacacactgactaggggtccttcggcctcagaaaagtggccccggacggaatacccactaagaagtgctc

SEQ ID NO: 478132 - DNA, 1000 bp, Homo Sapiens
caacttacaaaacataattttatttaaacttgtatagataaaaatctaccaaaatttaaacaaaaactttatccaaatcctttcccacaacaaaattggacatcatggaaaaaaaaaacattcagataaggttcccatctttctaccatcaactggtagatcctgggaggatgaggtgtaagagataaacgaggagagaagatactgatacccaacacaatttgatcttcagtgttgtctcatcttgaaatgacttaataacagagatttccataagaatcaggattcatttttgacccaaaaatggaagcttccactccaaagtcacaaataaggtttctggttttatttttagtgtgaggtaaacagtatattcaatattaaaccaaatggtaaaaacacatggatggtatattaatgcagaccttccattattaagtatattttggaacactcatggatttttcaaacatatgttggaattagaaacctgtaaaatctgctgcagtgtgtaatagctatttgtttgaatgtcttggcagtgcctttttagtagctaatgttcagtgtaatcttgtgcctttttagtaattaatatattaaatataatcttgtctgagtttttaaatggtctgttcttctttttcattatgtaggattagatgcccaccaaaattcttgtaaatgaagcaggacccgatttcaaattctgtctatacacacaatatttggtcacatagaccgctccccaaagtctgcaaaacactgcctactgggcaggcttacagtgacagaaaagtatgagaatacgagatattatttttataaagactaaaatcagatttaggctgtctagatagcttattccagaaaacacagatttaagatttttcagtgattcttgccttcacccccccttttcctccccaacgagataaccatttctttcacaatgatgaaccatccctttttatggaaaaatggctttgtttctccatcg

SEQ ID NO: 478133 - DNA, 1000 bp, Homo Sapiens; identical to SEQ ID NO: 346123

SEQ ID NO: 478134 - DNA, 1000 bp, Homo Sapiens; identical to SEQ ID NO: 161362

SEQ ID NO: 478135 - DNA, 1000 bp, Homo Sapiens; identical to SEQ ID NO: 346125

SEQ ID NO: 478136 - DNA, 1000 bp, Homo Sapiens; identical to SEQ ID NO: 346126

SEQ ID NO: 478137 - DNA, 1000 bp, Homo Sapiens; identical to SEQ ID NO: 161363

SEQ ID NO: 478138 - DNA, 1000 bp, Homo Sapiens
tcagccaaagtggccaaagaaatcctgttcctgtgattctgacatcatcagcctctgcacgtctatcttcccttctgccacttgttgtctgctctccgtgactttagtaagagcttccttgtgtatgtggatgatgtccaggatattggtctggtgtccctgagacagcaccaacaggtccatggctgggtccaggtcctgcctggactgattggcaaagacctcactgacagtgtggaagatctctatactgaagtgaatggcctggtccagctccaaggcctggctgaggctgaagaagaactggcggccttctgatgctctttcagagtccttctcaagatggcctgtggtctgcctcttggcatccaagaagcccacggtgctgtagaagccctcagtcaagtagttctggcagttatttgaggtctgagggtttgaagtaggaattcttacggtcattttgggaatatatttactgttgagtactatactagtaagattttcaacacaaggtgactcttgacctcgccttgtaggaagagtgctgagaaaatatttcacccactctttctccataaggagcttggtgctgatcattgctattttcttattagatttcgttaatttttttgacatggaattgttagcgttcaatgctgctgcaaaggcttctttatattcttctaatttggttgtaacctcttcataagtagttttcattttggagaatttacattccacatctttaagtgtgagttccttcatatttagtgaagccgtattatccttgtttaactgctctaattgtttttcatattgtgcttgtttctgtaaatggatttcttctaatttttctactgcctgcattgccctttcatctagctccaatttatattcttgtagtttactaagttctaccatattgttttccatgtgtcttaagatttaatatttcttcttccaacatctttttatcctcctcaagtttttcacattc

SEQ ID NO: 478139 - DNA, 1000 bp, Homo Sapiens
tgcactgtgtgtctgatgcctcgctctcaaagtcggggtcatccatgacgaaggacagcatttgtgcagtgatgggcccctcggggtcactctcggacgaggaggcctgctcacccttccctggctcaatctcagcagggggcctggtgctgctgcacttctccagacctgtgccaacagaggcaccacctggtcaggggggtgctgcagccctcatgggagctgtccccctctgtggcttcgaagctggtatggaggaccacttggtctctggctctgagcactgctggggagctggggcagggccttttgggggatccgccacttctgcttcctcctcacttgaaagagtgatgtcttgactggggacagggcccgcgggcggcgggggactcccacgtggctggtctttgaggtccacatcgtcctggaaccctgccaccatcgggttgccgcccagggcctccccatcactgtcgctgtcctgctgggcagccttggcccccaccttcttctcgtccctggcgggggttgtgtcttccaggaagctgcggtccaggcggtcatcgggaacaaagtcctccacactctggactgttgctggggcctctgcggctgggactggctctggaggtggaggggctgcctcggaggcaggtgacgtcccaaacagcctagagatgatgctacgccgtggggcgggggctgaggggcacgcaggtgggggcagggcctctgagggtggtacaggggtcacagaggatggtggggcagcattgaggggcagctgtggggcaggctggggtgtgccggggctagagctccctgtggacacggcgcctggaggcaccactggtgactgggagcctgaggatggactctgccccttggccgccagtggggacgcatggccatgactgtgagcctccatcatctccaggaagctggaaggcagaaggcaggtgagaagcctggctcccctgcctctccctgaggccct

SEQ ID NO: 478140 - DNA, 1000 bp, Homo Sapiens; identical to SEQ ID NO: 346127

SEQ ID NO: 478141 - DNA, 1000 bp, Homo Sapiens; identical to SEQ ID NO: 346128

SEQ ID NO: 478142 - DNA, 798 bp, Homo Sapiens
cagcagcatggccacgacccactcgcaggccgcagagacgctacgcagcgagcaggcgtggaggacgatcaaagaaggatactggccacaatgaggatggtgcagacgctgcagaggcccaggcggaggggcccaatccaggcagccccgggctggggcagcctcttcagcctccacaggaggagctgcagccagaagtagacgttacccaagatgaaggcaaggaaggcccctgccaagtgcgtaggccgctggttcttttcctggaaattgcctaccacggaggtgcccagggcacacagaagacccgtccataggatcagctggttaggccaccttctgacgccccagtcccggagctggtggtaacggacaatgcagatccacgcggccagagcagctcccatattgagcacctggctgaagatgcagctctgaggggggaaggatccgcagatgctgatgtagggaaagcctttactgaggtccacagtcctgttggtcactgcaatggcaaaaacgatccagacgccagagatagcccagacagctaggaagacaggcatcagcgacaggtagccccacatgccgggctctgcaggtgaaggatcggggctgaggctggacacctgtctctctcacacctctccaagcttcctggggctctcagtcctggagctggggctgggtgagctcagggaagaagggctggcattcggggtggggctcaggcagacatccggccacgggtaggttgggtgtctggagcctgaaggatccttccagaagctagggctg

SEQ ID NO: 478143 - DNA, 1000 bp, Homo Sapiens; identical to SEQ ID NO: 346130

SEQ ID NO: 478144 - DNA, 1000 bp, Homo Sapiens; identical to SEQ ID NO: 346131

SEQ ID NO: 478145 - DNA, 752 bp, Homo Sapiens
gaaggttttatatttcaacctctgtgtttcttcatgaacattttcccttaatgtagtcatctttttgatggtcataaagtgtcattcagtacactttcagtaccctcttctaatgaaatggttgacaggtatgaaaatactttttccattagaggttccccgagagaaggcattggagagttccttttcactagagaatcatcagaaaaccagtcatcagctgcttctatactttggctgtaataagaatcagatggtaatgttgataagcttaatgtaacactgctgcgatttgttgtggagctggtctctgagggatcacaaatgatattttttgttgcaagttggggttcatctttagaatgatctttaattgcttttatatgtgctgcttccttttttctttgctcctcctgtaattggaatctcccagtatgaaaatttcgagaaataaaaacacactgagaatgagatttaatcttcgccattgatggtctttgcctgcatctctcatcaattgctttaaatttggaattttgaaatatttctcttcgtttgcaaatcaggaaccacaaagctgatgccaaagcaaagaaaccaattcccaaagtgacagcaccagcagcaagaaaataggtcaagtaattaaaaaaacccatgattcaagtatttcttatcttatacaagctcttccagagaatagaaatagatttctggttgttcgtctaaatatattttcctcttcttcccag

SEQ ID NO: 478146 - DNA, 1000 bp, Homo Sapiens
gagacggagttttgctcttgttgcccaggctggagtgcaatggcgcgatctcagctcactgcagcctctgcctcccagttcaagcggttctcctgccccatcctcccaagtagctgggattacaggtgcacaccaccacgcctggctaattttttgtatttttagtagagacgaggtttcaccatgttagccaggctggtctcaaactcctgaactcaggtgatccacccacctcggcctcccaaagtgctgggattacatgcataagccaccgtgcctggtcttgaattggttcttacacaatgcagagaagtccacattagtatcctggatgttccgtgatgggaagggactctgattagtcactgagggtgcacagggaggaggcagaggcctcagggttaaaggcaggtgtgtctgactcctgggcatgcacactcttccccatgtcagggcttctcagtccactagatggtggtagcacccccccaggttgtgccaaccaaaaacatctctagacattgccaaaagtccagtgggggcaaaatcactcatcttgggaactactgccccacatcatgctgccccaggggaggtgatagtgggaagaagtgctggctagctagctgggcattgaactcaggtgtcccacagggcaggtgagaggctgtctgtatgctgctgtggtggagataactggttatcccctgatatctgccatctggtttctctagtgaaaacttgcagctgggcgcattgctgccagaaataaagactacatctcccagtgtttcttgcagctaggtgtgaccatgtgaccacattccagccaagtagagataagtgaggtggccaagttcctgactgtgcacttaaaggggagggtcctgctcccctttcctgccctcttttccagtctggctgcctagaaggtggacctggtagcaatgagatcagtgaatcctgggtctcaataccagggagtctctgtattgcttgg

SEQ ID NO: 478147 - DNA, 1000 bp, Homo Sapiens
ttagcagaaggcctctggacccatcctggaggggtccgggagcagagagagcagctcagtcaaggtcagagccacaggttgctggaccttctcaaattcctcatgtactgccttgattttcatcacatgcagaaagatctctccattggcaacattaaacttcactccaaactctccccctggtcctccagggcagtggctggctgttagaatgattccaccagctgccttgatcttcctgataatgcaggagaccgcaggtgtcgacaagacgccattctgtccaataatcagtcgtccaatcccgttggccgcggccatcggccccacgacctcgacggccgtcctgccgaagaacctgccgtcgctgcccgcccccgtggtgcggccctgacggtcgcgcaggccgacggacgacagcgcgctccggatgaagttgggcgggtagctgcgctggccctggaagaggccggtgggtcgccggtgctcgcggggcgcggtgggcactgtccgcaccgggatggggctcccctccgcggcgcctcccggccggtcctgctgcggctccggggccggagggaatccgcagccggccgggggcctccgccagcctggcttctccgctgccagaccgcccgagctgccctcagtttctccccaagtgggactcactgtcggggtgtcccacaagcccgatcccagagcctgctggcccgaccccggcgacgcctccacccgcgctcgccgccctccggggcgcaccctccgccagaaaacagccggcgggcggcgagacttcgtgcagagtgcgggctcctctccggcgccaggcccgtcccgtctccctgggagtgcgcagcctacacgcaccagtttctcaaggctactgtcctgaaatatcctgctgcttctccttccccaaatattgtccacttcctgagagtaaggctgacttgccgcaggcttataaagtgtttggtcacagtaagacaactgtgag

SEQ ID NO: 478148 - DNA, 691 bp, Homo Sapiens; identical to SEQ ID NO: 346133

SEQ ID NO: 478149 - DNA, 1000 bp, Homo Sapiens; identical to SEQ ID NO: 346134

SEQ ID NO: 478150 - DNA, 1000 bp, Homo Sapiens
cacaacaaagaccacgccatttatttacaaaggccagtgtgggagctgggggaggcagggagggaaagccacacagacatcttctctggactgcttgggaccctttcccacttggagcaaactctgttcctcttgccgtcatattctcagccatggggtcggtcctccaagcagctgggccaagtaggagagggaagaggtgatatgagcctcctctgtgctctgacagagcaatgtccaattccagatcaaaggcatcattgccaccctctcctctccttcctcaaagaaaactttctggcctggagggaaatagttaagaactgaaaggccaggggctctggaggaaaaaaaccctctactattcccacaaggcagtgaggggtgataagggtgctagtcacagccctgacagcttcagaaagggtacccacattacctctgggttacccagcatccagagctccaagggacctagctctcccagatatatattcctgcaatggactgacctttttacccacttgtctctggtggtgggagagcactctgaaccagaaaccaacaaggaatccacttcccacccaacttaagagtgtatgcacacatgtggatacacatgcacctccccactactcacacagaccccaacccccttcatgtcttttgaggggggctcaaattactggtgcctggggacacaagcaagacctgggtccatggaaatgtgtgtgtgtgtgcatataagcacatgtgcttgaggaactaaagccaatatgaccccttgtggggcgtggcgcttagcttcattgagctcctttcttcagtttaaattccattagcatctctaagtctcttctgccagcttgggcctggattcttctgcctaaaagagctacgagtgcttctgctccccactgttaattccaacttccaagccttttactcaggctgtctcccccattcccctcctccgaataatctcattccctcctctttc

SEQ ID NO: 478151 - DNA, 1000 bp, Homo Sapiens; identical to SEQ ID NO: 346136

SEQ ID NO: 478152 - DNA, 1000 bp, Homo Sapiens; identical to SEQ ID NO: 346137

SEQ ID NO: 478153 - DNA, 1000 bp, Homo Sapiens; identical to SEQ ID NO: 346138

SEQ ID NO: 478154 - DNA, 1000 bp, Homo Sapiens; identical to SEQ ID NO: 346139

SEQ ID NO: 478155 - DNA, 693 bp, Homo Sapiens; identical to SEQ ID NO: 346140

SEQ ID NO: 478156 - DNA, 1000 bp, Homo Sapiens
tcagtgggcctcttcttcgataggggagcagccagagaagaagctggtgttgctagccagagctcgtttctttttcttccctggaggcttattttgttggtattctgttgctccatgtttcgactctgggaggtcaaaaggggagggagctggagcagtcttctttgacagcacctgctccatgtcacacatctctttcaggatcttgctattgggggtggcacagacagggttaaagaagctcaatcctggggtcacctcggtaggatcctccagtttgaaggagccttcggaatcctgggtctgttcaacagtgcccaagctatccttgccttgctggcggttccgacactttgtggggtcacagctacagtccacaccacagtctgacttttgcttcctgcacccacactgcttgttcccacaccagcccttgcaggaacacccttggatgttcttcctggacaccttgactaattttgttggcttccattcctcatcatccccctcatcactgtcgccatcaccatcaccatcttcatgctcattcacagaatgctctgaacaatattttagatcctcgatgtccatgctttgctccagaaacttttctttaacacgagaaggttttggcttaggtgggatatattcaaaagaagagtctggagatagaagggtatcattaggaagatgtttctgtctgctggctacctggaggaggatcagtttctgcttgatgatttcattctcttggagaagctgctgattttgctcacacacttctcgcatcttctcaagttcttcatcctgacactgcagtgtgctcaccagctgttgttccttttcactggctgatttctctaactgcttctctgccatttggctttcctgcagctggctgacaaggtatagcaccttctcttggtgctgttgctccattctgaccagctcagcttgtaactctgtctctatctcagaaaaatgattttgttcctcaaat

SEQ ID NO: 478157 - DNA, 720 bp, Homo Sapiens; identical to SEQ ID NO: 346141

SEQ ID NO: 478158 - DNA, 1000 bp, Homo Sapiens; identical to SEQ ID NO: 346142

SEQ ID NO: 478159 - DNA, 1000 bp, Homo Sapiens
ttaggagtataaggcccccaaatcctcttctttggtccagttcccatattcaagattatagtcattcctctttgatgccttaatatccaccaatgaaatcaggcaatacagtgaattcctctgactctgaatgttggcaaccctcagactcaacccttgactttgatttttggctacagaagccctctgtctcagttgcaggggaggggtcagttgcagctgcagtggtggccccgacagttttcttttgcgggacctgtggccggcagctctgggtggagaagacctacttgatccaagaactgcaggatccttgggctgcatgtcctcccccaccatcagcaagcctggagagctgggcaggtggtctttacccagcaccttcaaggccgccttctctggccacagggagcagcccggaactggggcagggagcactgttggaagtgggtcaggcttcccaaagggaaggatgccaccagcagggctgtgtgaactggcgactccatggcccttggagtagaaactcactgcatgcacctgggccttgtcagtctggttcttttctgtcaagctcttgaggtggacatttccctccaagggcctgggattgtaccaggaggaagtgaggtttccctgagtctccaggggcctagaggtggaggctgcttccccattgctacaggggcccattttattgtcctcctgcccctgggtctctacctggtctttcacctccgttgcttctttgggctcttctgccctcacctccatcttcaggagcctggctgggatcacctgctcatctaatgaaggaagttgaaggttaaacttgcctctgagacgagggatcctcacggggctgaggtgtccaaacatcatggagttgcgagcagacagcatgggtttcttccttgagggggggctccagaccacaggaggcaggaccttctgtggggtgcccgtgttccgagagataagacacagcctgacaggggcg

SEQ ID NO: 478160 - DNA, 461 bp, Homo Sapiens; identical to SEQ ID NO: 346143

SEQ ID NO: 478161 - DNA, 1000 bp, Homo Sapiens; identical to SEQ ID NO: 346144

SEQ ID NO: 478162 - DNA, 1000 bp, Homo Sapiens
gggaagaggaaatacatgtgacttggaggaagcacttggatatagctttggttgcttcagggaaagcttcggccccttaaaattaggtttttcctcccttttctcccctatgggtctgttggggttggcatcaaagaaggcaagtaggaaggaaagaaaaagaaggtgggcatcaggcagaaagagttaattagaccagtcgtccccatcaaattcagaggagtcatcttctgagtcactgtactcaacagcaatgcgacgagacaagatggtggccacgtcattgcccacgacatcccacttctcttgttcctgctgctcctcaaccctgcgcagctgaaaaccttgacagatggctgaaagcaggtcgctatgggcatcgcttatggcaggcaaggaggacttgggcttggtggtgtcagaaagcggtggtggtacagcaggctggccatctgcaccagtgaaagggggaggagggggccccggaggaggaggcaagttgtcctcggagaaggaaggagaaggtgaagaagcagagtctgactgtgatggtggtggatagctacttgcatccacgttttcaacacagccaatgctgccattctggtacaccaaggtgggtggatacccaaaaggccccagcttttctttggactccacaaattcttgccccatcttaattttctcccactcttccttacgtgtcttgattttacgtgggtttacattccctcgatttggattatctttcttttctttcctgtgctttctcttctctttcatgatatccctggtgtcctgcagcatcttcttcttccaaagatcaaagaagtatgaagggtctgtgtagaatttgagtgcctctgttccatcgtccctgtaaggggtaagattgttgagagggggaggagtatcacaggtattgtatgtttctaagacaggcactgggagagagtttctgtcaaaaagcttctggtcttgaatggtggagcttctgaag

SEQ ID NO: 478163 - DNA, 1000 bp, Homo Sapiens; identical to SEQ ID NO: 346145

SEQ ID NO: 478164 - DNA, 777 bp, Homo Sapiens
ctagcgtttcaccccggaccaggctgggtcacccagtggcctctttgctcccccgccccacccttcgtgcgccttccagagccgccatcgaatctctcttgctaacttgcagcgctctgggggttctccagacacaggcgcaggagggagccttcgtcgaggaaagttccggctacctctgttggggaatttgctttcatttttcaccgcgggcgaacctggccaggcgggtttccgaagcactggcagaggtgggggctgccaggcactgccaggcagcgagaggccgctcgacctgggggcgccgcttgtccagcctccctcggagggcagacttgcagccacccgggcactagaaaccacctcgagtcctgcgttgggccgaggtgtcggcgtacacgcgagccgggagccgtttcttgcaggatgcctgcgagctggatgtattcggataaatgcagcgcaaacgacagccagagaaatcccgtcgattctccgcacgcaacacgccccgcgaggactcgcggcggcggggtggggtggcgggaaatctcccgtgttagaagttgccgccgctggtctcgggtacccggagccgcgcccgaactccgcgaccccaacagaccgaggctcccagaggtggaagggcgtctctccgacaccgagagggcaggcgcacactccaggcctgcgcgcccctctcggcgccgtggccgggaagggcggagagcccagcgctcctcgcggtgttgagccgccgccgctgcgactgcccat

SEQ ID NO: 478165 - DNA, 1000 bp, Homo Sapiens
ctcttaaagtgttcatatctataaaaagggtgctcattttatagatagcaaagctgaggtccagagcagttatgtccacacaattagtaagtgctgagaatcaatcctgggttggtctctctctgcatccttctgtggcttctgagggagagactcatgtgtgttactggggacacagcgctggcacacaggctggttccagaggccaggaagagggaacttggtcttggaaggctttgcagtacaccagctggagaggcttcctttgaggagaagctgacctcttccaggtactccccagagattcctttcccagtataaccttagctggggcctccctggcaatgaaggcaagaacttgctcatggggagagctgctcctcattgagagttttatcagtgagattccttgattatcaagaggaaaaaattgcagcaggggagatgtgacttagattccaaagtcttctttggcactccttaagggcagggactaatcctccagggactaaacttccagcaaaataggcttaatgaacactggagactctcgcaactagtgatgactgtggcatgtgtagctctgtgagaacatctgtccagctcagttggtgccactggaaaatgacatggaaatgtggtgtggccttgagccaggtccccctctccagggttttggcccagttttggcctgtggcccatccaagtatcttctctgtgagatgctgctccctgagccagtgcctggcgcacacagccatgagatcatggggcggggtaaattggcaggcccccgatctcccctggagctgtggcaggtgcatgttggagctctgggcttggcgcctccgtaatctccctcctggccccttgcagggaggtggctcctccaaccagccagttctgccttttccacctaagtccccagactccaataaaggtggaacattggcccaatccatggcatgaattcttgagattagacttcaagaaggacttc

SEQ ID NO: 478166 - DNA, 1000 bp, Homo Sapiens
agagaaacatgaagtgccaggcaggaggcccaggggccaggaggggccacggtgctcccaggcctcgcatctacccatttcagccttctaagatctgcagccagaggtccaagaacaggcagaggaggcccgtatgggggtgctgcagcagagggagtggggttaccagccagcggccaaggctcacaggagcaggacctcccaggccacgcaagggagaggacatttccagtaacggcgtttcagaattcctcctccctcggggtccagggccttcctctgctccgaggaattctcaggccagtccctgagacaagacaggctggagggaggcatgctgagcaggcagggcccggtgtgggaccctccgcgggaatcgtccgagcagcatccctgcagggagctgtccaatggagctggggcctctctgaggcagtggcctgacaggctgggccacccagggccgccacccgggagccccaggaccttaggcatgtccagctcaccttgcggaaacatctcttgactgccgcagtgggtgtggctgcagaattcccatccgtctccacgctcctttgagagcgcacagcagaactgctgcccgcgcagcctcgtgggtccctcctgaccacggattccatggccacctttctcaccaacaccaggaattcctttgtaccctggctcctccactgtaccctcagcccctcgagctgcggtggaaatccttgaccttggcctacacaaaaacagatgcagatcattctcacatttgctggccggctgggctgagtgggcctggggaatgagggctacaggggcggtcctgggcagtcttgctgaggcttgccagcatctctccgcctccttaacttcccatggtccatgagcatggacttcaggaattcctgatggggggtgaagagcatgcagcagggtgtcccaatccctgatagaaggacacaaggactgagcctcatccaggaatccagggctgcag

SEQ ID NO: 478167 - DNA, 574 bp, Homo Sapiens
cagtcagagtgggatccattttttaattacaaaatctaacaaaataagcacattctaaattaagttcctgcttgtggtccattgcaccattgaactgggtggagagccttccacatgatgattcagggacccaggctccttctgacttgaagtgcagccattccctggggcttcacagtcctggctggattctttatctcgaaaatcaatttccaccaacccaagctcagtattcattcatagcaggaagctggattcagggtgcttttccacctggaaaagagttttgatggtcaactccagtgagttggttgcaaatattatcttttacttggacctcagagccatctggcataattgagactgcaccactgcactccagcctagggacacagcaagacccacgttctcttcctccgatgcttgattccacccggggttcacaataagtctgtgcaatgtgtttgttgaaaaactggttctcactttcttccaggtgtgcagggtttctgagccaggagcagttgaggagtgggaagaacatctggaaagactgggagtaaggacgccccat

SEQ ID NO: 478168 - DNA, 787 bp, Homo Sapiens; identical to SEQ ID NO: 346146

SEQ ID NO: 478169 - DNA, 833 bp, Homo Sapiens
ttttcttttcctcctttattttcattacaggcgtacagaaattgattaattacaatctttagttcatgacttactcttattattgatttgtaaatggcttgcttttatttgtttagttacttattagtaacttactactggtgaactatattttaaaacaaaagctaagctttttacaataattgatatctccttgcattagttttttttattgctgcataacaaattactacaaatttagcagtttaaaataatatccatatattttctcacaggttctgtgggtcaagagtttggagagaacttaactgggtcttccataccaggtgtcacaaggcctaaatcatggtgttgggcagactgtgatctcatcttgaggcaggacaaggaaagctccctcagttggttggctgaatttgtttccttgaggctgtagatgtggaagcttgcatcttcaaagtcagcatcatgtcctttgcaggaacattgacgaagctggagaccattatccttagaaaacaatttcaagacattattcttcctttcttcttcctgctctctccctccccactctcttctactcatctgaagaacataatagtagcagaaggtggggctcctccggcagatactggatcttgtcaggcagaaaacttgattaatttttttaagcagtaagcagaatcataggaaatcatttccttcatgcaagcctggctttcctgggcagaggtccctgcagccttccgcagtgtatcgtgtccctgggtactcaagattagagaatggcgatgacttttaccaagcatactgccttcaagcacttgtttaac

SEQ ID NO: 478170 - DNA, 770 bp, Homo Sapiens
tgagtctcacaaacatcatgtagggtatgttaattattattataaaactttgagaagagtgtatttttccctctaggaactaagctcctttagaaaaaataatgtgaatgtacttttgtactgttacaaggtagtactagactgataaatatgtcctcacaaatggacgtagcacttgaaaggttttggagctatatggctctgtacatgtcattattatattgtttttaagtgaatatcattttctccaagcccatgcatatgtgtataagcttctgttagaggtaaacaggtagatgacaagttgtttctttgcttaaattttagttgcaaggcaaatttcctaacagcctctgttccatgtacacaacattttggagtttgcaaaagggccatttgagatcgaattctaaaattatttcatatttggtacatctcaggaacttggtgtcagaaaccttcaggcagtagtcagtcttgtctgtttctagagatctgttttggagttgattcatggattggtatatggtaaagataaagcacttggttccaatccctggagattctggagatttagagaagtgggattgctgaatcatatggtagttctattttagaattttccttggttttaggaaaacacatggcaccttttaggaagtttgcggaaggaaacttcttgtttttcttccaatttctttgtgcagctaggaaattttggaggttcctcttgttttcccacactagagggagagggcatgagtgagact

SEQ ID NO: 478171 - DNA, 1000 bp, Homo Sapiens; identical to SEQ ID NO: 346148

SEQ ID NO: 478172 - DNA, 1000 bp, Homo Sapiens
tgacagtgtttgctcacgtttgtactgtttatgacagacaggcatgtgttacctattttgaaaagttctaagaaaaataaaaggcttatactgcacacagcacaagtgatttacttaaggacaaattggcacaatggtcccacatggaatggtaaacgttcaaacaccaggaggaagaggaggccctgctcaccccccagatttgtcctcactgggccccaccaaaactgtgccaccccctcaagcccccaggagcttccttaacctttgaatcaataaagagacctaggggtggggcagggtggaggaagatcaagctacaagaggctgccaccttccccagcacacctctcaagacctctcaagactcgggaagggcccccaaaccccaaacggggccgtttagtgcttccacgtgttgtacaggccctgggaacccttctcctgcagccacctcaactgtccatctgcataacggtgggcgtgccccagcctttgtggcccaaggggactcaagtgtgtgctggccatccctcttctcacctgtctcaccctgggaccagcagtgggcctgcgggcctgggcctgcaaactgagcccctcccaacctggggttctgccctgtgtttaacaagcctgcatcccaaactccaggcccagccctgcgccaccctaggcagccctggcccctgtggtcaagaagcaccctcagccaggccccctttgaggcaggcaaggagtggccccaaactcctccaccatggcatgacacccccaccccacccttctgggacttccatctctgccagctcagtgtgcccaccagggcactcacagtggcatacctcccccgggttgctgcagagaggaagggtcgggggccggaagcagcagcagcctgtgccaggacaaggacagagatctgggtgcctgctcttcccggaagtgctcagtgaaaagtacctagcaggcttgagaacaagggagggggcagaggggt

SEQ ID NO: 478173 - DNA, 857 bp, Homo Sapiens; identical to SEQ ID NO: 346149

SEQ ID NO: 478174 - DNA, 1000 bp, Homo Sapiens; identical to SEQ ID NO: 161365

SEQ ID NO: 478175 - DNA, 829 bp, Homo Sapiens; identical to SEQ ID NO: 346151

SEQ ID NO: 478176 - DNA, 916 bp, Homo Sapiens
tcagtcttaatattctttattaaagatcaaataaaaacacaaaaaggagacgcagcctgaagaacttcctcatggcagggggcccatctcttggaaaaatgactgtccatttgctttgtcttgtgtcctccccattagaggttcccggagtgctccttggcaacatctgtaatcacacaccctcagcagaaccctgtgagagtgatttttctttaatgaaaaagatcagagcctcagatgttgaatctgttgttgccttgctcttggacttcccagtgttcagaactcctataaaatcctgcgaaaccaagaacaaccaacactgcgaactacttgctgatgccagtcttgctaatggtataattttcctggctggttcttcctctttccagggaccctcatcttcatctcttttcaaccacaagcatttccatgaaggcacctggatcttctcttccatggtaaacccctttatcttcaactgcttcctgaattgttttgccccttccaggcctcaacagatatctagaagtgccactgccatatatgtaaactgaagagggaattttttcatgaccagccttctgggaatcgcagaatcgcagaatgtgatagatctggaatactctccacagtctatgggctgatgtcatgtggctctctcataaatgggaaggagccaacagtctcagctctctctcctctcaaaagcctaactgttgccaggaagaggcctgagaggtcagcaaagcaaagattagaatattgaaaaggtcagcatagcaaggccgcttctttaattcacaccgcatattagacattaaaattctaggtcctcactcagttacgcatggctggggaagcctcaggaaacttataatcatggcagaaggagaagcaggcacctttttcacta

SEQ ID NO: 478177 - DNA, 1000 bp, Homo Sapiens; identical to SEQ ID NO: 346153

SEQ ID NO: 478178 - DNA, 885 bp, Homo Sapiens; identical to SEQ ID NO: 346154

SEQ ID NO: 478179 - DNA, 589 bp, Homo Sapiens
aattgacttaggttttattgggcaccagagatgcgctagagaaccctgggactctgctgcagcgtggaccccgaggtgggattattacggggtcagcgaggtgcgggccatttccatgatgaagatcctgtgaactctggcgtggatgcttggaccccacgcgtggtgttccttctccatgaccctccggaagctcatgcagagtctggagctcgtgggccctcaggccgccttcttgtccttggtgtggagggactcagtggcctccgggaccctgtctgggcatctccctgggccctgcagcatcttgttcctcccctccagctgctcagcccatcccacgcggagcttgttcagagcgcttctgcgaaccctgatgtcctcgttctgcaggtgtcttgcgtgatgctcgatttttttctcccaaaacatctttatcccgcctgaatcgtatgctactcttccaggattcttaagagtgaggcttttactcatgttttttccaaccatttctcagtgacgggcaggttttcctgtctctgttgagggtcctcagcctgtcctctccggggtgcacgcctgtatctcg

SEQ ID NO: 478180 - DNA, 1000 bp, Homo Sapiens; identical to SEQ ID NO: 346156

SEQ ID NO: 478181 - DNA, 913 bp, Homo Sapiens
ggtggggtgtgccctgctgggtcgcacagggctgccccctccactggcgtgtgagtgctctgagcctggggccttggcttggtcatggtaccctcgcacctggcacagtgcctggcatggagggagtgctaatacatgtttgttgaaaggtaggtcgggcttgactgcgtctgctcaggaggtggcggggcaggagtgagtcttgtgaagtggagctcggcactgcagcccctcacacacttgggagcaggtggcgcgctgttctcgaggagcaaacgcgctggattctgacgcctgacctgacgcttggtgtcgccgggatccttcagcccccagcatctgcgggctggcaggttctgcctgcaggagtagagccgggctccgtggagcaggatctctcggaagtgcaggctgcaggagttctgctctcctctaagggcctttgttcctggtcagccttcccctggtgagagttggcacagttagtggaaagggcacaggctgcctcgagccctgggggctggtgctgactttccactggtgcagtctgaccttgaaaagtccctttccttgtgatttcctttcatgccaacagagaggctcttctgggatgagtgtggtcacggcggggcctttctgcttcactccatccctcccgtgtcctgcagctgacgggacccccggcacacaggccaaggcagctgaagatgatgtctctggcttcgttgctcttttgttggttgaagacagggtatgggtgacatttgattcagattgggtcagaattcggcgctgtgatgtcgtgcgcagctccggtctcctgtgacttcccaacgcaggggctggagaggagggcatagcctccaagcagccctcagcaaaccaaagacccaaggcagccagacaggcaaac

SEQ ID NO: 478182 - DNA, 673 bp, Homo Sapiens; identical to SEQ ID NO: 161366

SEQ ID NO: 478183 - DNA, 487 bp, Homo Sapiens; identical to SEQ ID NO: 346159

SEQ ID NO: 478184 - DNA, 1000 bp, Homo Sapiens
tggggacacccatcaggtcactgctgtctgtccaaaccccaaatcgcccacgtctggcccggagaactgaccggccatcggcacggatgcggttgcctacatctttcatcagcacatcgtgcagctcggtgacctggcacttcagcccaggcgcctcttcctcccctgtcggggtagcagagtgcagctgacaggcaagcccgacgccggaccccgccctgggctgtatgtcccagcccccagccggcgccccatgccaggcccaccctcctgcgtctgctcccgaagctccagcctggccatagccagcgcctcctcggccttctgggcctcctgccgcagcctgtccacctgggcctctgtgtccttgatggcctgcagcgtgagcttggtcttgtccatgcacctccactcacactggtcgtgctctgagatcctccggctaagctcacagtaggcctgttgcagctgggtgggcgtacgggcaggccctggcaaggctccttgtgacactgctgctgctccctggtcagctgttggaccttgagggtcatacttccacaccgctcagcctcggcctccttgtgcctctgggcctcctgggcccggcgctgctgctcagcctccatgttctggagcatggcctccgtgaggctcaggtcccacgagcgcagcacgctcaccactgtgtccagtgaggccacctctggggtccacacccgctcaggggtgctcccgtcctctgcgtacacccgggggtctgctccgagcttcaggagcacctccacagctgccaggtggcccccaaaggctgcacggtacagcggcgtcggaccgaaagcgcccttgctgttggggctggcgccgagctcggcccgcagctggatggccaggggctgcccgcctgcggccgcctccgacagcggcgtgttcccgtagctgtcctcgcactccgccagagccacgcgtcgctgcagccgccgcgcctcgcctgcctcgt

SEQ ID NO: 478185 - DNA, 1000 bp, Homo Sapiens; identical to SEQ ID NO: 161367

SEQ ID NO: 478186 - DNA, 1000 bp, Homo Sapiens; identical to SEQ ID NO: 346161

SEQ ID NO: 478187 - DNA, 1000 bp, Homo Sapiens; identical to SEQ ID NO: 346162

SEQ ID NO: 478188 - DNA, 1000 bp, Homo Sapiens
gtgccttgacaagaaccggtttatttggagtctctgaccgggtgacgccctctcccaaggacaggctgctggggatgggtgtggtgctggtgggggccttctgcctggctgggagcgggggcggctgccctgccctcgctgccaccctctgccctccctgactctggggatctcctcttctctgtgctggtggctgcctgggcctcttgcccccatctcggcacaggtttccgtgccctcctcgcccctgatgggtctggtcgagcgcctgctctgtggcttcatctgcagggttctgggcccagcagggctggggccaagttcaggggctgggaggtgttggacggtgggcaggggtggtcgggagtgccctgtgtgcctgggaggtccgtgaccactgtccgcctcagtccctctctgctggctcagggtctgcaggagtgtggtagtctgagcccctgcttggcagcccctctccaaccggtgccccagggagccacggcccagggcacttgggggccaggcctggtgaccaggaaagcagctgctggcacaagcgggaagggggctggtgggtgttttcctgtctgtcatctgcagtccttcagccccaggagagcaggcagcgaccctgctagtctccacaggccacagagctgcacacgcagtggctgaacacctgcagggtgagtacgagccgccggccaggcgtgctgggatcggggcagggcagctccagctgctgctcataggagtggagggggcggcagcagctgcagcgggcatccacctgctgggtgatgatgttgaagctggcagcggaaatgcaggcgccctcacagcgggttaccgtcacgttcgccatgcaccccttgaacgtgatctcctcctgctgctcccgcacactgcagaccccgggtgaggtgggcgtaggtgtcccgagagaagataccggggcagaagcaggggtgcttccatgggcagtgagggagctggtcag

SEQ ID NO: 478189 - DNA, 1000 bp, Homo Sapiens; identical to SEQ ID NO: 346163

SEQ ID NO: 478190 - DNA, 1000 bp, Homo Sapiens
gcagcagttaggctttactacaactctggattcactaggaggtgggaatcctggggatggggatggggtcactctggacctgggggtccctcctggctggccctgccctcttcatctttggaagttccctcctcaggctcaccctcgtcatcagcctcagccaggtcctcgggcattggccactctcgagtctgccactccagccgttcaatgcggtaagcaatcttaagtgcgctggactccagctcagccaggaggcgagcaaacttggtctgtagatcatccagctgctggtctaggcctcgtagccgggactctgtggcctcctgcagggcgatctcagctgcctcagcattcacgtccaacttgttcattttcagcaggatctcacgtcctttctcctccatgatggtctgtgcttgtggatactcgctcagcacctcccgcaggtcctccttgctcaggcagaataggtctgaataacctaggctcttgatgttggctgtgcggcggttcccagacatgttccctttgatgttgatgatgctgatctccccaaagtagagccctgcaccgagcacagcatactgtgtgataccatcatctgccaccacggccagttgaccctctcggatgatgtacatctcttggccaatgtctcctttgcggcatacatattcacctggtgagtaggtctggggctgcagcttcagcaccagctcctccagcaggctggcctcacagttctgaaagatctgcacccggctcagagtggacaggtgcacagacacagccacttctgcccgcagccgctcaggcaagtgctgtaagatggctacctcgttggtcatcttcttgttgatctgcaggtgctgataccagtcaataactcgccgctccagcttgcggttgacgtgctgcagcttcatgtacttcttcaccagtgcatgatctgggtagaaagccgcatctgcagtgttcatgttgtagatgacagagc

SEQ ID NO: 478191 - DNA, 1000 bp, Homo Sapiens; identical to SEQ ID NO: 161370

SEQ ID NO: 478192 - DNA, 1000 bp, Homo Sapiens; identical to SEQ ID NO: 161371

SEQ ID NO: 478193 - DNA, 1000 bp, Homo Sapiens; identical to SEQ ID NO: 346166

SEQ ID NO: 478194 - DNA, 1000 bp, Homo Sapiens; identical to SEQ ID NO: 346168

SEQ ID NO: 478195 - DNA, 1000 bp, Homo Sapiens
ctggtttgaagaaagaaatctttattaataatcttaataatactgttagtttgaatggtcacaccttggaagcatacagaatggtaagaaaggaagcccggggctcggctgcagtcctggggatctgagtgagtcggggggttgagctgctgcaagaaaagggtccggaacagcagaggggacagggggctctgtacagaggacaaagccggaggcagggcgtggggctatgtacaacgggaatagaaaaggagaattccatttcaatagctgatgctgaatagaaagtgaggtgtatttttaaatttttgacacttcatgagacagtggagccacgttgggagcctgtattttttgctgcttccctacttcagtgctccctgcctcgccaggggttcctccctgccacctgctctgctcctgctcctcccaccgggtaagcctggctgtccttggtgctgctcccgccacctggacacctgccttgggagcagggaaggggccggcccaggcttccccatcccttgcccttcccatgggcccctgctctggctgtgcccgtccaggcccacagccactgtgactcccaacctcgcgatgcagccgggcgctggcccgtccctggccctgggcgcccacggtggactgggctcacaggggagcggcagggagggctgggtcccagcaggcagcacgaggtcagccttggtgtacacaggccccgggcctcctccagaaagggagagatggccaggaagagcaagtaagtccttggcctcagggcccacttggccacacttggaggtgtgaggagtggctcctggctggctgggcttccttcgtcctcccatggagcgcccctgagtcctggagccacgtcagccctttctgttgggagctggccccggggctactgttggacggcttcctcgccaggctgggggcacgggcgggactgccgggcaggagggaggtgggacgcaggggacgcgacaggagg

SEQ ID NO: 478196 - DNA, 1000 bp, Homo Sapiens; identical to SEQ ID NO: 346169

SEQ ID NO: 478197 - DNA, 1000 bp, Homo Sapiens
ctattgactgccccagagggtgacatgggaggggacatggcactggagcccacttgggggtggcaggtccccttgcttccttgttagtttcttcgtagaggccctaagatgcttgagcacagtgtcatcgtccgtggcccaggtatggaagaactggttccgaaaacatgccaaaaggccagacctggatgtcttcatgaggcgcttcttctgaaccttaaaagcaatgcttctgatcggcatcaacacctgtccttccagcaaatacatgtcccacaagcgcagggtgagcccgagagagatctgatgccacatggtcttgggttgtgacttgggtaccacatgctcctgttggtcttggagcccctggactgtcccgccatttgggctgtggaatcccggcagggagtgcctctcactggccagcagctgcaccagtgcccagaatgcatcttcctcaggcagataaaggagaaacaaggtggcaatgtggctcaggtccctgcagtagcccacctccgggttatactctgaatatgccacaaggatgtagaatagttcccgctgcttcactccatatcgatccctgaagaagacatggttctggagagtcctgctcacgtccagtttgatctggtggatgtgttcagaagacctcttgcccttctccttcatgatcaggccccggatgttcatgggaatgcccttatagatgcgatctatgagctttttgctgtttttatatgtctcgcatttgcccagcatttccagccacttgctctttctttttttctcctgccgaatttgctgccaaatgaggaatgttggagttagcggagctgccaggcttcccagagccgcccgtggatgctgggtcttgggctctggagccctggtgggacccagctggcgagacatgtcctgcgtcagaaaggcctttctaaaagcaaacccatccctgagctgagacagctgctttaggggtgaggggagcacagag

SEQ ID NO: 478198 - DNA, 1000 bp, Homo Sapiens; identical to SEQ ID NO: 346171

SEQ ID NO: 478199 - DNA, 1000 bp, Homo Sapiens; identical to SEQ ID NO: 246633

SEQ ID NO: 478200 - DNA, 1000 bp, Homo Sapiens; identical to SEQ ID NO: 161373

SEQ ID NO: 478201 - DNA, 921 bp, Homo Sapiens
ttacctgaggatgatgaggcaaaggcagagaagcaggatcttcacagccactacccccacggccaaaacaaccacctcttccacggttcctgatttccctgtgccgtcttctagggaggcttcaatcactgggttcattagaggataggagacactgagctggatggttctctccgtggtcacaccagctccggggaacgtcacctgacagatgaggttggtgccgtggtcctgaggccgtgggatgatcgtgagcactgaggagtggagggtcctggggcccagggaggtgggggcagctgacatccaggagaagatggggggtgttccctgctcacagacccagggcacagagcaggtcaggttgctgggatggccagactttaggaactccgggatgaggatgtcgggcctgtgggtcagggctgtcacatacacagagagcggggaatatttgtaactaaattttgttcttcctctcgccacccaaaagaagtatgaaccgttgtccctcctcctggcgtctctgatgctcagggagcagttgttccttgagggatcaccgaggaggtggaatcggccctgggtctccttctgcactttttgagttgagttgtttgtggccactggagtctcctggtctacactgaccccttcccggaaccagtggccataagcaggggtagaatctttccagccatactcgaggtagaagaccgaacagtgcacaaagatgcacagaccctcctgcaccgtcacggactctggcatctccagccggaatcttgcatcagcaggggcagcggcagcagcagcggcagcatctctgaggcagaggcttcctgggcttcctgtgtgagcagagaagagggactgtctggctttagagctgcggacactgatgagtttgccatgtgtcat

SEQ ID NO: 478202 - DNA, 1000 bp, Homo Sapiens; identical to SEQ ID NO: 346173

SEQ ID NO: 478203 - DNA, 1000 bp, Homo Sapiens; identical to SEQ ID NO: 346174

SEQ ID NO: 478204 - DNA, 1000 bp, Homo Sapiens; identical to SEQ ID NO: 346175

SEQ ID NO: 478205 - DNA, 1000 bp, Homo Sapiens; identical to SEQ ID NO: 346176

SEQ ID NO: 478206 - DNA, 1000 bp, Homo Sapiens
caaaagtcaaaagcggggcctgggaaggccgccgagagccatgagctgggctgggctgaaagagaccactgggaggcaggaggagctgggcctggagaggctgactcgaggaagttttgcacctggagaggccgccgagaggacggagctgggcccggggaggccaacttgaggacgacttgggcctgcagaggccgccgggaggccggagctgggcctggggaggccgacttgacaacagtctgggcctgcagaggcgctgagaggaagagctgggcctggagaggctgcaaagaagcatgaactgggcctggtgaggtcgacttgagaaagttcagggcctggagagaaggctgggaggcaggagctgggtctaaagaggccattgtaacgatggagctgtgcctgtggaggctgttgtgaggcagtaggctcatctgcggagactgccgtgaggtagggtatgggcctaaataggccattgtgagtcatgagcttggtctgtagaggctgactggagaaagttctgggcctggagaggctgccgggaggtaggagcataatgtagaatcagtgggcatgttaagcttgttttcctgcaactggatggtcccacgtttcgctgtcacccctctggaatccacgtatacgaaaattccaaatattagttgggcatagtggcaagcacctgtagtctcagccacgtgggaggttgaggtgggaggatcgcttcagcctggaaggttgaggctgcagtcagctgcgatagcactactacactccagccttggacaacagagggagaccctgaataacatgttgcccagtcagtctctcttcctggattcagaagtctttcatggtagatccagctccagctctgtggccctgtggttggagaccgctgctcaaatgcattcgaaaggatccatcccatgccattcttcagagtcatctttactgctgctgtggtcaacttgtagcacccataaaaatcttc

SEQ ID NO: 478207 - DNA, 1000 bp, Homo Sapiens
ttcctactgcaacctttggagattattacacagtggtgcgggccacggggattgagggattcgagggaccttctgtcgcccatgtgacgcagatttccccaggctcactgctggaaagcctgtccgcatcgttttcatccttgcgacgtctaaattgcagaaaggcagagtcgtcttctccctcatttctagaggctcgggtcccgcgggtgtggagccgcacccttggtagtgacaaggtctagatgcttctctgcccggggaatggctctggcactgatccagaggccatctgcttttgaatattttacaggaaagcaccagtttcatgctcctctgtcctcgctcatcagcgctggcgcagccgccgagtcttctaaccggcccctgccacgtgtgacaagagcttcggagtcctggtatgggtacagggtgaccccgttggttctcgacagggaccaggtgccatccaggtactggtgagcctggatggccaccgaattgaggatgttcccattgcttggactggtggccatctggaggctgaccttggcctggtgggttggggacccgctcttcttttccgccccattgctgaccccaaggctgctgggtttgctgccgtgcttgttggcgaagcctgtgtagttggaggtggcacagggggcgggcacaaaggcccagtctctgggctgctggagcccacccacgtgccgggaccccaccagggtggggatgttggagagcggtggcggggagcagggcgaggcgtcgtagtgctcactgccggctgcctgctccaacgtcagcaccatctggatggcctcctgcttcaactggttcaggtgagtggcgcaaatgtcacagcggttgtcccggtcgttccatgccttccggatggtgttggggacctggagtttgtcgtgaatcacagccgagaaagcagggtcctgtgaggtccagaatttcaccgtccatcctgagacatcgtgtttgctta

SEQ ID NO: 478208 - DNA, 1000 bp, Homo Sapiens; identical to SEQ ID NO: 346177

SEQ ID NO: 478209 - DNA, 1000 bp, Homo Sapiens; identical to SEQ ID NO: 346178

SEQ ID NO: 478210 - DNA, 1000 bp, Homo Sapiens; identical to SEQ ID NO: 161375

SEQ ID NO: 478211 - DNA, 1000 bp, Homo Sapiens; identical to SEQ ID NO: 346180

SEQ ID NO: 478212 - DNA, 1000 bp, Homo Sapiens
tccaacgacagtggaggtttatttcaacggaaggaaacaaaaggatactagttattttacaatagtgtttttcctacaaactaaacttcttacaaactaaattaaaaagggcttgcatttggcactaagaagacagtttacgtcttatgtttggaccacctaggacattccttggggtgaagccagaaacccatgctgactacagctatccaagactgtgagcgtctccagggctgccctcctgaccccgggatccgggtccagctgtagttcctggagggaattccgtaatgctgggaagtccagctttttcagataatgtgtagacatctgcttcataataattcctgccaagttgcaagcagcgattctgattcttgacaagttatttttaacataggccattgtttctagcaagaagcggtagagaacagccggctttttccgagtcaggatggagcacatggttgtctggaaaacggtcatcttgtcatcagtagcggtatcacttggccctgagggatgctccagggacttccagccccagaagtgcacacactgaaacatggtagccatacaggcttgggctgcattggagcaggggtcctgggagtgcagcatgagggggatccaggccttcttcacctcccctttgaagaaatgcttcttggacatcccgaccacccttgccagctttccaaagaggatgaaggctttcagacgcagcagctcgctctcgttgtcgaagaagatcctgcactgctcagacatggcgtcgaaagaggaccccacatccccttcccggagctcagccaggatcttggtcagggcctccatgccctcggcagtcacgctgttgctcacgggctccctcagggggcccaggcacttctccagcaagaccttccggtactgcttcaccttcttgggggcgcccagggccatgttgccgagggcgcgcagggacagcacccgcagggcctcgtcttcctcctggtcg

SEQ ID NO: 478213 - DNA, 1000 bp, Homo Sapiens; identical to SEQ ID NO: 346181

SEQ ID NO: 478214 - DNA, 1000 bp, Homo Sapiens; identical to SEQ ID NO: 161376

SEQ ID NO: 478215 - DNA, 1000 bp, Homo Sapiens; identical to SEQ ID NO: 346183

SEQ ID NO: 478216 - DNA, 1000 bp, Homo Sapiens; identical to SEQ ID NO: 161377

SEQ ID NO: 478217 - DNA, 948 bp, Homo Sapiens
ctccaaagaagaaatcagggccaaccacagcttcccgggtcattcaccaggtggcaccactgccgtcatttcagcttctggccactgggaggcgctgctcgaaagggtttgccctgacactccaagaagctgcgggaaggacagcaggggccctggggttttagcctctggcccaggagttatgtgtccataaccaaagggagcacagtctgcacccagctctcatcccatcagagctgctgcgactcctgcaggttcttccggaactggtttagcttgcctgcaggatcaggaaagtttgagaaaagcatctgcagctgagctgccagttcctctgagtcctcaaagaccaggccattttcttcatgtttcaccagctcatgtaaacacttgaagttcacggcacacgcaggcaaacagctcctgaacatgtccaccaccttcatgggcaggtccaggccactggaggacgtgtgcagacagacacccaggtccgccgaccctagaagcgggggtagtcctcggccctccagccagggggtgcagacctggatgtgctggaaatgcttctggtagatgaggcggctgtaatactccctcagaggccctttgcctgttatcacacagacgagagaaggaaagttgtgtccatgaagagtcagttgttcaaacttttctaaagctgccagcaggacagagaagtcttcgtcctctgtccagcttgtgctgctgaccagcagagctggccgctcgtggagacgtgtcaccagcctactcccagcatcccgctctgtgaaggccaaccgctctgtggctgggtcctcaggttctgagcgggccctgaatggagagtgcgtgccgcccagcttcatgaagagccggtgctgcaggtccagaggtgtctctttaaagaaagatgccggcttgtcatagacggtcacagccctg

SEQ ID NO: 478218 - DNA, 1000 bp, Homo Sapiens
agacgccagtgctggccctcagggcggcccctcagccggcgaggggcgggacttccgcccgccaatccctgagggggtaacatcgcccgccaatccctgagctgggcagggtgggccccgctcacccccctgggctgcccaccccggggtgttcccgccgacttctgggcggggcctcccgggccaggcctgccgggggcggggcccgagcagccggactggccaggttcagcgcgcctcagtagggttgtattccgtctctcccgaggacacctgggagatgcgccgcgaggaccgccacagcttccgcgcgaactggctgctgcgcacctcagagggctgccccgcgaccaccacgatgagcttgccatcctccaggcccaccagcacgtggctgcgctccttggtcacggccacgctgcggatggccaccttcatgggcaagggaggcgcggccgggagcagtgtgtttagttggaggatgtgcagggcgcactgggcggtgcccagcaacacaaagtcctctgtcaccgtcagggctgtaggctgctctgccaggggcagtgaagcccgcaacttcccattgactgaatacaggtgcaaggagtaggtgacctgggccccaggacgttcccacgctgagctctgtaccacaatctggccttcggaccccaatgccaggtggaaaataggtccagggaatgtggcacccagaggccgtagtgccgctacaaactgtccgcggcgtacagtgtgtatgatcacagttccatcctcagatccagacacagccatgtcaagttcagtgctgatggccacacagctcactgcagccccatgcccatacaggacctgcacaggctttggtgccaggcctactgacagaccaccctgatgcaggagccgccacaccatgcacgtggtgtcccgggagcctgagatgaggtagatgccacaggtgtccagtgcaaggcaggttactacatcaaggtggcagctg

SEQ ID NO: 478219 - DNA, 1000 bp, Homo Sapiens; identical to SEQ ID NO: 346186

SEQ ID NO: 478220 - DNA, 1000 bp, Homo Sapiens
agtattattctatttttatataagtcaaaagtgagcaaaatgtaaaccatattgttatacacataactggtaaaataattcttaaaaggacagagggagaattaccgtacgtcaggatagttagctctcggggaaacagtgagtgtcaagaggggacacacagagattttggagtgctggcaagacctcctctgcatctagtttgtgattacacagctgttgctttacccattaaactctgttttaagtacttatttgtaagttatatttcacaaaatttaaaagaacaggggagatcctgtgtactaccaaatattaacaccaattaaagcgataattattgacagtatagaaaaacccagaaggcccagaaattggcctaagacacaaaagacacataagaatttaatattctataaaaatagcattactaatcagaggggaaatggtggtttcacatactgaaccaattggtaaattcttcgaaataaaatcaaatccctaccttatataatatacccaaatacatttgagatggattaaaaatttccttttcaccccaaacttgtattgatttagttaatgtatataaacaaaatttaaattccttttaaagacaggtgtaaaagtgaaataagaaaatactagaagaaaataaggacatttatccattcttggattacaaaaatagtttcaagcacatacacaaaggtagactcctaaagaaaacaacttctatactgaaatatcacaaactatgttaaatgacaaataaggctaaaaaaagttacaatatatgacaaaggacggacattcttaagaacttatatgccaaaaaaagagcaaattatccaagcaagcaacagaaaaaatatgaatgagcaattctcaaaagaatgaatatagcatggccaatgaatatgaaaaaaaacacaaccttcactaagtaagaaaaacaaatacaaattttaaatgtagcccttttctgtaattattcaat

SEQ ID NO: 478221 - DNA, 1000 bp, Homo Sapiens
acaatatatttgaaatgttttatttaatgctgaaaattttaccctaagggacagtaggatgtgtaaaaagaaaggaaaaggcacagtaattaagtcatccttagaaatgatgaggttttctttctttcaaataacttcactttaatgtaacttcaagcccaaacattctgggaggtaaacagtctcttggtacctacggggcccgagaggcaagtcaacctccttgaagaacggagcgctggagtctgagcacgccaaagactctctttaaagcagggtcttggaccagagaaccctgagcagctggaagacaaaagacttcctcaagtttcaggaggaaggtaccgtggacatccttgaaagaggaccccagagaaaaacttgtaggcagggctgggaagaagccatttctgagtctgattcaagacagtgacagagagcagctcgaggctcagggcaccacccgggctccctcgtgctccaccagaaccaccgccagccaactggtcagacggctcttgcctggctagtctgaggcctcagctggcgcgggcctggcgacactcttacagatgcctactagccaggcgggcatgctcatattttcagtggaaaggtacttgcaactgaagaaaatcctgaggaagctgacgccagaattcagaactcttagccttgaactttgtacaatgggttcttccaagtgaaatgcactcacgtcttaacagcagcaccgagcagccccggaaaatggactgagagggcctggcggtccacacgtgtcctacgtccctcccactaacgtgctttcccattcgtggggacgtggtcactatgggagcctgcccaagaggcacggctctacccaaagtgaaccagcaggctctggccgtattcaaatggggcgcagggtcagctttggggtttgggaactgcacgctgaaactgctgccgccggtgaaatggaaggtcatctggtcgctgtgttcaacagattcct

SEQ ID NO: 478222 - DNA, 1000 bp, Homo Sapiens; identical to SEQ ID NO: 346187

SEQ ID NO: 478223 - DNA, 1000 bp, Homo Sapiens; identical to SEQ ID NO: 161378

SEQ ID NO: 478224 - DNA, 1000 bp, Homo Sapiens
ttagaaaccttggagtacttttcttagtttatactcgtggtggtttccttttgtctcctttattacatgggactctgacatgtgcccatagctagggtgacagtaggatctacccgatagtagggtggcagtaggatctacccaaaaagcgtcctgctgatacaggaccaaagcatcctgttgttctcgagcacgaaacattcttctgatgccggcatccctgcttgcaggtgtgaagggggcaggaatcagcgaggtgtcctgggctgagtccccggagtgggaagaggtggcaggaaggggatctgaggaggagaacaggggtcctggtggtctgtgcttcttcccagacacgggagctgtagaggagacctctgcagcagatgctaggggggccagtaggcccaggcagtcttgggacttgggtctgtcctgctgtgcatccatagtgggtgctttagaaacgggaggcccacccgaagcccctgttgcaagtgaggacaaagtgtgggaaggccgtgagggtctgcagtccgagatggccttgtcctcaacgtgcagtgcagtgttgatgcggggcctagaggcctgggatctgggggagccacccctgggggcaagtgtctgccctggtgctgtacctgccttcttctcacagcgggtgtgacccgaagagacagcctgaggtccgtcctcactcactgtgtttgaggaactgtgggccagctggcagtgggatgaggctggccccctcctccgctttagttgcgggaggccttccgtagagctgtgggagctggagctggcatttccttggaggcaggatctggtccgggaggtctgggatctctggttatatctcacttctgacctctggacacgtgctgcagctgtggctgaggccaagaaatgtgaggggcctccatccactgcattgagtagtgaccccgacgtggggtgcaatgtggaggggggaggggctgctgctgcagctgcagga

SEQ ID NO: 478225 - DNA, 1000 bp, Homo Sapiens; identical to SEQ ID NO: 161379

SEQ ID NO: 478226 - DNA, 1000 bp, Homo Sapiens
gtacggggtcaacttgtttttgacctttgctctctgaactgggaccaggatgtgaaataatttttgaatctgatgcaggtcgaggtatggctttagaatcaaatgggctgactttttcccctgttggtggaaaactctgtgagggtttggcagagtctgtttttagaggaggggttgttttctcttcagcttgtgactgtactttggagcttggaatatcaggttttgttgttgctgatgatgaagatacaaggtcagtggttggctttaccatcttgggctgctttggtttatcatcagcaacaggggccttgtcctgctcagatgggacagaaggttctttgggaggggctggcttggacaaagaatctgcctcagggggctgcttggccttggctgaaggagagccatgaagggttggttgtttcactagtggtggtggctttttaggctcaggtgccttggagagatcctgttttggtgcagcatccttctttggggaagtctgctgtggctgtggggatgatttgctcactgctgatgtagtggtaacaggtgcagtcttcagtttgggctggggtgatgacggaactggagccagatccccgcctagagctcttttcatttgacagttcaaacagagccactcttttacctccgttaaatgaggattgggattaaaaccacagagactacagacagtggtttgacactcagtgcatgtgttaaaattggccttttctggaacatgcaacagaagttcagtggtattgcaaagaggacagatggttttagggaggccttgtgaaggaggctgttttgcagatggagacactgttggtggctgcagaggttttccagatcctgtttggcttactggttttgtagattgctgagccgagggctttgctgggctaggctgttgagctgagggttttgctgagccaggctgttgagatgggggttttgttgagccaggctgttgaggtgagggctttgc

SEQ ID NO: 478227 - DNA, 1000 bp, Homo Sapiens; identical to SEQ ID NO: 161380

SEQ ID NO: 478228 - DNA, 1000 bp, Homo Sapiens; identical to SEQ ID NO: 246634

SEQ ID NO: 478229 - DNA, 1000 bp, Homo Sapiens
caaccaaaaaaaattttaatggaattttcttcttttttttttttctttaaataacaatttgacaaaagggtgaagaaatcctaaacaaggtattgaggccagtgtccaggctgcattcagttcacagaactgtcctcaggacgttgcatggaactggaaatgtgtataattacagaagaaaacagggaggacttagtgcagagaggagacgagtgtggacgggcaacagcatccttagtctttcatatttatatatggtatatgtattttctatatatatatttatatattttacatccaggtatcccagtcatctgtaccatttcccagggagacatgggtgcttccaaggcgagacaggaaagggttaggcagggaaggggcagcgacggtgcaggctggggcttggctcacagaagctgcaggagcttcagcgactgtaagagggccccgggctccgcagacgccaggtactggcagcaaagccagtcctccagctccacgccccgcctgcgatccaccgccttctccgcaaacttcatcatcatcagggcccgcttcatgtcgatccagttgtgcagcgtgccgcacagcgcctcctccgaggtgcccggctgctgcaccagctcgcgccgaggcccccacagcaggcactgcagcacgcgcttggcctcgccgatgcggatacgcttgatggggtcggcctccagtagcagatgtgccagctgctgcaggccgggtgagtagagggacagcgcgggcagcggcggcaggtcctcctgccggtagtctctctcccgcagctgggcgcgcacctcgaacgggttgggttggtgcagcagctcgtagatgaggatgcctgtctggaactcatcgaacttgcggtactgggaagcagacacgatctcgggggccagccgggcctggctcttcttctgctgcaggtttggggtgccgcccggcttctgcttggccttcaaaaagttgctgatgatgagcc

SEQ ID NO: 478230 - DNA, 1000 bp, Homo Sapiens; identical to SEQ ID NO: 346191

SEQ ID NO: 478231 - DNA, 1000 bp, Homo Sapiens; identical to SEQ ID NO: 246635

SEQ ID NO: 478232 - DNA, 1000 bp, Homo Sapiens; identical to SEQ ID NO: 346193

SEQ ID NO: 478233 - DNA, 1000 bp, Homo Sapiens
tcaatcctcagtgaaggagccctgcagtgttgtgtttggaattgaacttggtttgctgttgtagtttttttcatcgagcagaaaagctactttttgtgacatcctttcatccttttcatccttccagcagtatttggtatctgggaagccaagtggagtttcttcccctttggaattggagtgttcgctggctacatcctgagcagagcaaactttctgttcaactagtgccaagaaagtgccttcacaaggttggtaagattgggacacatcatggtcactacaagaagtcgtaaccctttcctccggggagtcctgcaggacttccttctcttcagactcctgcagcttcagcccacaaatccacagagttacctgggggggcactggcgctttcccttcctcttcctcatcatcattttgattttccagaagaatgtttagagcatcctgccattcatcttgagaagattcactgtctacaaccagaattgagttgactttgtcttcctcagatgtgattttgatgttcttgtgaggcgggttggagtcagaagggccatggctatttgaataagtgatggcacattcctccagtgagtcctcagggacttccttttcttcagccttctgctcctccctgggagcaggtgattcctgtactttatcaagctccttggttttatcattttcatcctcatctgtgtcattttctgggctgagcttgtggacaaggtgccgtgccagcctacacccctcagccagctgttctcggaagtcctgcccctgggagttgtcatgcttatccggagtgagaagagcctggagatgctgattcagtgagtgggaggcatctctcccttcccgtaacttctcccttaactggatcagctctcgttcctgagagtgaaccaggactttatattgcctgagctcctcagcttgcttgagctgctctgcaagcttctcctccttgaactgcagctcttccctcagcata

SEQ ID NO: 478234 - DNA, 1000 bp, Homo Sapiens
ctagagagggctgagctgaagcttgagggcaggccaaggggcgtggtcattatggtcattatgttgcgggtggggccggggtccgcctgccttgctgactgaaacagcgtctcccggttgtctgccaccgcctgcttggccaggtagcgctcgcgcagttatcttggtagccagggctggcacatcgggcacgagccggtcgttggggcacaggaagaagaacactacattctcgaaggcgataatgaaacccagatgcacatgcacagccagcagcttccagtagaagagggcgaggttcacccccacgtcgcgagaggccttgtatctgggttgcggggtctggagaggctctcggatctcgactccgaaccccgcatttcctcccctccttctccctagaatctggccctgcccgttcagccagtaccctagccggctccgcgcatttgtccggggcagaatcagctcacatggcctccagcaggagcagtcagatccagatgtccagccgcgcccagccattggtcgctggtacttgcacaggaacttgtgggcgtccagtccaatctctacccggttgttgagcagagtgaacaggggtgccagcaggaaggctcccacaaagatggtgatgaacccaaactgcagctctggcaggcagggagtgtcaggcccggggccacctcccagcccaacaaattcttccatgtggttgagcagctgtttgcccaccatgatgatgatgagctgctgggtgacctgaatgtggcagccaccaggaccgcactgcctttgaagaatgccatgtagaagggagaagaatagaaattgacaaactgaaaatgaaagtgaaggcattttcatggaggcatctcctccattgccccaaaggacattcgcttgggtcatgagcacagagttgccagtgtggaacattgcaatgctgatgatgccatggtaaattatgacagataccaggaaaatcatcaccacacag

SEQ ID NO: 478235 - DNA, 1000 bp, Homo Sapiens; identical to SEQ ID NO: 346194

SEQ ID NO: 478236 - DNA, 1000 bp, Homo Sapiens; identical to SEQ ID NO: 346195

SEQ ID NO: 478237 - DNA, 1000 bp, Homo Sapiens
tcagaccggccgtagcagcggcacggaagagaccaccgggtgcgagtagtagacggggtgcgggaaggtgagcagcggctggctgactggcaccggggcccccgcggctgcagccgccgcgccctcggccgccgagttctcgtggtagaggatgggcacccgcacgatgcgctgcgccgcggcatggctcaggttggccgcctccagctccgccgccagctgccgcttccacttgttgcggcggttctggaaccagatcttgacctgcgtctcggtgaggtgcagggacgcggccaggccggctcgctccgagctgctcagatagcgcttcatgtcgaaggtggactcgagctggaagacctggctgcgcgagaagactgtgcgcgtcttcttcttgcggcacgccggcttcttctctggactttcagcgcccttcttccagtcttctgcgcccggagtggccgccgccgcccctacgctcgccccggccgcgcctggcgccgcttcgccttcctttttgctttcctcggagtcgctctcctccagaatgatctcgtccgggctcttggagtccagctccttgtgatcggggtcggccttgagcagtggctccggagagtcgcggtctgtgccggaggcgggggaggagtctctcagcaaggccttctccgaggcttcaggtcgcgggaggtggccgccggcgggggtcagggtgtaggggtaccaccaggctggggagcgctccaggtagtgcgcgggcagggcaaacctctgcgccgggatctcaaagcgagggaaagccaggtcgcccacctgcgagagcgcgaagcccgcggcgccctccagggcccccttggccgccgcggcagcggcagcggcggcggcggcggcagccgaggctggcgcgaagagcgtccgtgggggcggctgaggcttagggggcggccggtggtggtctccgttgagcaggttcttgatggagaacggggactccttggga

SEQ ID NO: 478238 - DNA, 1000 bp, Homo Sapiens; identical to SEQ ID NO: 346196

SEQ ID NO: 478239 - DNA, 357 bp, Homo Sapiens
ttaaggactcagctccttacatgggctttggtgggggtcatggggcagcacccacaggtctaagggtgggagtgttgggtccttgaagccttcatgagattgatttctgactactttgctgtgaattgcacaactcacacagtaatgtagcttcatatactgcttggaaagcacataggcattgaagaccctcgcttcaaaaatgtccctgactgctgcgggctccactatgtttcgaatgacaaatttcttaatagccttgtccttgggcatgcatcgggcacagttcatgcagcaaataggctgcacatggctgtggccctttttggtgaggccgttgttccttttctttgtcat

SEQ ID NO: 478240 - DNA, 1000 bp, Homo Sapiens
cagtagacacagggtttcaccgtcttggccaggctggtcttgaactcctgacctcatgatccacccgccttggcctctcaaagtgctgggattacaggtgtgagccaccgtgcccggccgcagtaaggactttttaagacggaaaccctctttggaatgggaaacttgctttttccttcttttatccacaggatttgtaggggcagcagcggtcggggctccacacctccaccagggcagtgcccaggccacactgcacttggggacagcggaagttctcacacacacactggtacagagggcagcagagttccgtggtattcctgtgcacagtgagcgcctccccttcttgacattcggggatggagtctggacagtcaccacaggcgcacttggcctccgggatgcagagtgcagagtggcgccggtgtaagatggtgccctcggagcagacgcagccctcgcccagcacctggcagtgctctgggtccagaggccctagtatcccatcctggcatgtcttgggtggctcacaggctgtcacacatgcctggtatgtggagtcgctggagcacaggaaggggcagtagtcagagcgccgccactcgatgcacacatgaaatttgtggcacatggccacgtacacagtcagggccacgcagggctgctgcacgtacttggtgtcccggatccacagctcacagaatgactccggaggcacaaagcggtggcaggcactgaaggtgcggttggacaccatgcgaaggcagggcgagcagtcagttgtggcgcagctgtctgggcggaagcgggtctggcccactgaggtcagggagctgggcacctgccagctgtccagaaagggagcagggtcctcagccccacccaccactgagccatccttcagggtaaggtcattggctgcatctccatcacagataccgcacaggccatggccctgggccttgctggttttgctggcctccacgatcatgagtcc

SEQ ID NO: 478241 - DNA, 675 bp, Homo Sapiens
tcattcgttagtgaactctttcactaactcgtccatgacctccttgcactgggcttggtgctctgtaatcacgggctggagaacctctatgagcatcttcttgaggtcaccagtgagcatgtctctgctggtgtcatccttcctcatctgctcgagcttgtcttcatccttgaggaaggtcaagtacatgaaagacacgtccacaacacagttgcccccaaagtgcctgtgctcctcgatggtgtctctctctccagaaaatgcatgcttactgatcttggtcttgatctgcatggccatgttggtgaggaagataaaagagctggggtcactggcactcattttgttctggatgccctgcaggtcagagaagaaggaagaatgcagcaggacgggtttaggatatccgatcctgggggcgatgtcccttgtcattctaaagtaaagatcccaagaggaggtgaaaggttctagaaggaagaatgcagtacggtctgaaaacccttgctccactgtttggcgactctgatttctggcagttttcaaattgtgttccagggatcccaggcctgctctgagaggtgaggaggaagtgaacttctgggctttggcgccctgcttcctgctcaaccgagggagctcttctttcatatgttttatatttttggtttccat

SEQ ID NO: 478242 - DNA, 495 bp, Homo Sapiens
ctaatcttcctgggcttctttatggaacattttcttcttggagctgctcttgctgccagcagcctcttcaggtccactgctgacaggctcctctttggagaatttcgtctttttcttggagacacttctgttgcctgcctcttcggggtcattaactgtttccgtcttgggtgaagacttcttcctcttgagaagactggtgctgccagcagtctcttcaagatcactactcatcaactcctccttggaaaaagatttctttttcttgggtttggagaaagagatagatgggtcttctgttttctcctgaggaacctcctggggcttttgctttttcttctttttgggtttttcactcgtctcctcacacctctctggagtactactgctgtcagggtgattttgaggaccaaaaacattgtgaacgtttgtcacataagcttcaactgttgcatccacttcacgggactgtccttctccaccttttgtctccat

SEQ ID NO: 478243 - DNA, 1000 bp, Homo Sapiens; identical to SEQ ID NO: 346197

SEQ ID NO: 478244 - DNA, 964 bp, Homo Sapiens
tgtggggtaacaagagcatttattttgtttattgaggaaaaaacaaactgatggggattattaatggaatccttattatggattattttaaactttccaaaaagtttaaaaatctgtctatatgggatgtcctaattcaagggtttcttgaggttgaattctcttgcctctgtgaaagagtcttttcgttggtgctgaccgatggggacttttggtggcattcacagggtgatccctcctcagcagagaggggaggatacgctgcctcagccagctgaaggcccacccaaagttcaggcagcactgggcctgtgtgtgtgaaggagtgtcatccttctctggctgctctgacaggattgaggagatctctggagcgcttgtcctttggctggcggttgcctggcttatcatctgaaccatttccggaggggagccgctggatagctggaaatcttgctgagcagtttcaggaaatacagcgtcatcatctttcagattttctagaaatatctgaaactcttgcacaagattattcagtttgccaacagacagttttgttctctcttttggtaacttgtctatccacaggttgtctccatttagaagcctattagctcttgagtctgtgttatcggagccaatgtccacgtcccaggccaggaagatgcttagtttgcaaaactgctctggttcatcctgaatttggtcttgtctcttcatgcgtctccctatcctttcagtcccccatgccccttggacgggaggcagaaagtggatggaaggacccttggaaggtgcatcttcccaggaggttgtgtcctcacagggggtgtcctcacaggggaaatagcccacagagaggctcaggttggaattggatttggagctgtcgtcctctatgtcgctgttagaggatgaatatgccatggagttcaaaggcacaaatttctctcaacttgagaag

SEQ ID NO: 478245 - DNA, 1000 bp, Homo Sapiens; identical to SEQ ID NO: 346200

SEQ ID NO: 478246 - DNA, 1000 bp, Homo Sapiens
ttgaacttgtaacctttgtatttataacattcaaaacgcttgaaaatgagtgggtacacagtggggcaggatgggggtaagggtgatgtaaaacgcaggtagcagccatggaggggtggacagccgggatgggcctccctaaagcatgctgctgagtatttctgacatgggagaggcggtggggccctcctgactcacatcggggccagtggggctgggcagggtgatgcggcctccagagggcgggctcaagcttgcccatggtttttcgtcctgggccaccacggccgctgcgtagggctccacgtagaggcggcggacggaaggcctcgcgtcctggagactgctgttccgctcctcaggaaggctggcagcgtgggccagagttaggcccctgggatcatcaagggcagggccggcccgcttggcctccttgggctcctgggccagaccacaggcctgggacaggtgctgtgtataaatgccctcagagagcgatagcgactgggtctcgctgtggatgcgcaaccagcgatgatggcggctgaagccgccatagtgggggtgcttgcctggcttccgctttcccaggaagcctagcgggggccgcccaccggacacagtcttggcgtggttcttgggtgtgaaccccgtgagggtcaggctatggagaaactcggcacatgagtgatcgggatttgggccctcgccctggggatcctggcccggccccagaggggttttcacgtcgtgcacttgcaggacgtcgggggcgctgccgcttaggccgctaagggtctgctgcgcaatgtcgtgagatgataggtagaccaggtccaggtctctggggctcagggcatcgctggagtcgtagtcactgttggtggggaggaagacttctgagcaggcttcttcatcagagcagggctgtgaatcactcactgtctttcttctgtgcatctctggggatgggggtggggatggaagacagtctatatgt

SEQ ID NO: 478247 - DNA, 1000 bp, Homo Sapiens; identical to SEQ ID NO: 346202

SEQ ID NO: 478248 - DNA, 1000 bp, Homo Sapiens
tcactgtgaagtggcttctcgatgtgttttctggtggcgtcttaaggtcgccggccgaccgaaggctcttggacacttggaacatttgtggggtttctctccagagtggatgcgctggtgctccttcagatttgccttgtaggtgaaaactttcttgcagtctttacattcgaagggcttctcccctgtgtggcttctcttgtgacacttcaagtaggacttctgggtgaactgcttctggcagatgtcacacgtgtagggcctctcgccagtgtgggttcgctggtgaaattgcaggcctatgcgctgcatgaagcgcttcccgcagagattacactgaaagagtctctcgcctgtgtgtgatctcgtgtggacggctaacttgccgcgatacttaaacctcttgccgcacacctcacatgcaaagggcagcagttccttgacttcttggccactggggtgactgactgggcccgcagggcctggggaatgaactggattgatctcagcttgtcccggggattctctgttgcccacaggtgtggcttctccttgaggctcttcttgggaaatggaggtggcgtctggtttgcttcttttgagacctctcagattcagagcgtctcctctgctcccgctgtgagtcgaagcttctctctccacaacgcaggcagaaggtgtgtcagcatccacattttccacagaggctcttttttggggttccttcccctcctttgctcccaccacccctgtgggactgtttggaagctgaggctctggggatgtaagtcctgggttctcctccctgtcttcctccaggtccttctccaaggtcggcttgggtctcagagcctttgggtcacctttcatgacagtagtctctggcagcaggaagtcctcttcctgcctcctgaacagtgcagggaccctgggcagggtctgcagctcttggctggcctggccttcctccggacacatctggttcacagaggaggtccgc

SEQ ID NO: 478249 - DNA, 1000 bp, Homo Sapiens; identical to SEQ ID NO: 346203

SEQ ID NO: 478250 - DNA, 1000 bp, Homo Sapiens
ccttctataagatttatttttagtaattctaacaattatcataaaaataatgtatttagtaagcaaatacgatgtgccagatgcctttccaagtatttatattctatattaactagtttaatcttcactatagcatcataatagtgacaacagtaaaaatgtgccatggctaaaggctttccctctcattacattaagagtctctcaccatggtgaaatctttgatgttgactaagttgatagcaatgactaaaggccttaccacattctttgcatttctgtggtttcacaccagtatgaattgtctcatgttgagtaagtcgatcactgcgattaaaggccttatcacattctttacattcatagggtttttcaccagtatgaattctcttatgttgagaaagacctgagatagaacgaaaggccttcttacattctttacatacatagggtttcaaaccagtatgaattgtctgatgataaattagttgagaattaagtctaaaggtttttccacattccttacattcatagggtttctccccagcatgaattgattgatgtgtcttaaggtctccaacacgactgaaggctttcccacattgcttacattcatatggcttcaaatcagtatgaattatctgatgttgaataagatatgaatgaagcttaaaagtcttcccacattctttacattcatgtggcttctcaccagtatgaattctctgatgctgtgtaagttgagagcctctacaaaaggcctttccacaatccttacaatcatagagtttctcactactatgaattctcttatgtttaagaaggcttgagcccttaccaaaagcctttccacattccatgcattcatgaggtttctcaccagtatgacttctttgatgttcaacaagtagatagctgcgaacaaaggccttttcacattgttcacatttatatggtttctcaccagaatgaattttcttatgttggtaaagacttgaac

SEQ ID NO: 478251 - DNA, 1000 bp, Homo Sapiens
tcagatctgcgtctcttgcacgttctccttggagccgctcttgaagagcagaggttcgtggatggagttgaggccaggcgggcctttgcccccgcagcccccgccgctggggttgctgctgtagtgcgccttgaaggcggcagccacgtagtggtggtggttgaggtggtctcgctccagggcgggcagggccaggtggctgtccccgcccacaccacccccactggccacggcggccgcggcggccacggacacggccgaggcggcgggcagctcgtcctccacgttgatgatctccacggtgcgcgtgggcccgtggtgcttgtggagctggtgctgcttgcgcagcttgtagaaggccacgagcatcaccgcggccatgaacgtgatggccacgaagcagccgatgatgattttggtggtcttcatgacgtcgtccaggtccttgagggcgttctccgtcacatccgtgatgggcaccgtgaacgccttctccgtgggccgcgaggagcgcggggcgggtgccgtggtagaagacgaggcagggccggccgcgtccccaggccggcccccaccccagacaccgtctgtcgtgggccctggcggttccttctccgtcccccgcggctgcagggcctcctctccgggctgcgtctccagggtctccacggtcaccgtggtgaagtaggtgtagccgccactgccccctccaacaccaccactgcccccagggccgcccccgccgctgccggtgcccccggccgccacggggtccacggccgagacgttgagcgtggccgaggcggtggtgttgccggctgagttcgtcaccatgcacgtgtactggcccgtgtcctgcacggtgacgttggtgaagttaagcgtgccgtcatgcaggacggagatgcgcacgcggtaggagccgtgggtcatgagggtgccgttgggcgtcagccagttgacggaggtcatggaggtgcccgtgcggcatttgagctcg

SEQ ID NO: 478252 - DNA, 742 bp, Homo Sapiens; identical to SEQ ID NO: 346204

SEQ ID NO: 478253 - DNA, 1000 bp, Homo Sapiens; identical to SEQ ID NO: 346205

SEQ ID NO: 478254 - DNA, 1000 bp, Homo Sapiens; identical to SEQ ID NO: 346206

SEQ ID NO: 478255 - DNA, 1000 bp, Homo Sapiens
ctagccagcgtgagtccttacatgcttttgaaggattgaggcagatctaaaggctttaccacattgcttacactcatagggtttctctccagtatgaatcctttcatggtagagaaaagagttggaagaaatgaaggctttcccacactgtttacatttatagggtttctctccagtgtgagtccttttatgatagcgaatagaattagaagaaatgaaggcttttccacattgcttacactcatagggtttctctcctgtgtgagtcctttcatgcattttaagttgtgaggcaactctaaagactttaccacattgcttacatccatagggtttctctcctgtgtgagttcgtatgtgcttttgaaggactgaggcagatctgaaggctttcccacattgcttacactcatagggtttctctccagtgtgagtcctttcatgatagtgaaaggaattggaagaagtgaaggttttcccacattgtttacattcaaagggtttctctccagtgtgtgtcctttcatgtattcgaagatccttgacaaaactgaaggctttcacacattttttacattcataaggtttctctccagtgtgagtcttttcatgatagcgaaaggaagtggaagaaataaatcccttaccacatagcttacactcatagggtttctctccagtgtgttttctttcatgtactcgcaggtacttgacagatctgaaggctttcctacattgtgtacactcatagggtttctctccactgtgagtcctttcatgatattgaaaggaactgggacaattgaaggctttatcacattgcttgcatttatagcgtttctctccagtgtgacttttctcgtgtctttttaacgaactgggagaaaaaaaggctttcccacatatgttacatttatgaggtctctctccagtgtgcattctcatgtgtgtctgaaagcttacaagataagataatgctttcccacactgcttacattca

SEQ ID NO: 478256 - DNA, 1000 bp, Homo Sapiens; identical to SEQ ID NO: 246636

SEQ ID NO: 478257 - DNA, 1000 bp, Homo Sapiens
tcaccatacacaggttccagtgtcaatcttgatgaaatcagtaatcttgccagtctctaaatcaatctgaatggtatcattcaccttgataaggggatcagggtagcagatggcgtgagtatcaagagtcaccagatgagggattccttttgtgcccacaaagatttttctcagtttgcataacatgtacttggcctcctcaggtgtaatacgttgtacagcaaagtgacccttggtgtcacaggtcagttgggaattctctcccatcttgtcagtgttgatgacatccattaatccagcagggtaggttatatcagttcggaccttgccatcgatcttaaccgatatgagggctttctctctggtatgagtttgcaggtgaacattaaggggtgaggaatatagaaatgctttcccacatatcttgcatacaaagggcctttcttcatggtgagttttcaaatgtttactacgataggaagaagtaatgaaggtcttcccacattcaacacatccataaggcttctctcctgtgtgaattattttatgttgagtaagggttgaggatccattgaaggctttcccacattccttacactgatagtgtttctctccagtgtgatttcgtatgtgtatagcaaggcccgtgtactgagtgaaggcttggccacattccttacattcatagggttttattccagtgtgagttcttacatgttgagtaaggtgagttgacctagtgaaggctttcccacattccgtatatttgtgtggttttattccagtgtgaatttgaatgtgaacattaaaggatgaggaatttctaaaggatcttccacattctttacattcaaaggacttctctcctttatgaattttcacatgtgcagaaagttgagaaaaattagtgaaggatttcccatgtttcttagtctttttagatttctttccagtatgaactgttacacactgctttaggtgtgaggaatgagtgatggct

SEQ ID NO: 478258 - DNA, 1000 bp, Homo Sapiens
tcaagccttaaatgctttcaaatacagatattttaagatattatcatcagatccagtctcagaaggccttgcttttttgggtgcaatgacaggggaaagtgatccttcaaagtcaaaatttctagtccatgctaagcggtctgtgttaaaacccatcacgttcatgagacaagtcacaaataaattccactctgagtgataactgggtcctactggagcactgtggacattgtaccacttgacaagcatctgaactgctatttcttttggcaggataaacttaattgtttgcaaacatgtttgtactaactcagaggtggcaatttcaggaacagtgatcctaaccatggagccattactcagttctagggtgactctgttatggacaggatctctgatagaatcaatgtaagttccaagctgttggaaagtacaatcctcattatagagagaatcatgaagttttgaagaatccctcagttctggaactgggaacaacagaagaacctcgtccaatgatccaaggagtttactaagaggctttggagcactaacgccatcaagtgaagtactgggctgaggcattgtgttggacatcgtcagagagggagctggcagtccaggaataaaaacctttcccacctcttttgcggcatccccaccctggtgattcttcttgctgcgtctgggcctctctgcactgcctggcgccccctcggccttcctcctgcccctgttccctttgtgtgagtctcccttcgcgcggtgcttcctcttgggctctgcttgctcctccccggccgctcttcgtcctcccacctccccgtgcctcctcctcaggcctcggtccccacggtccgcctgctgggcgctgccgcggggctcccagaagaggcaacaggaaccttccctgccgtgcgccccgcggacgcctgtgttctctccctgcccagatgggcttggaagccaccggagtttgaagaaatggtcctgattattt

SEQ ID NO: 478259 - DNA, 1000 bp, Homo Sapiens
ctagaagcatttgcggtggacaatggaggggcctgactcatcatactcctgcttgctgatccacatctgctggaaggtggacagcgaggccaggatggagccaccgacccacacggagtacttgcgcttgggaggagcaatgatcctgatcttcaacatgctaggcgccagggcagcgatctccttctgcattctgtgggccatgccagggtacatggtggtgccgccagacagcactgtgttggtgtacaggtctttgcggatgtccacatcagacttcatgatggagttgaaggtagtttcatggatgccacaggattccatgcccaggaagcaaggctggaagagcgcctcggggcagcggaaccactcgttgccgatggtgatgacctggccatcgggcagctcgtagctcttctctagggaggagctggaggccgccatggccatctcctgctcgaagtccagggcaacatagcacagcttctctttgatgtcacgcacgatttcccgctcggccatggtggtgaacctatagccacgctcggtgaggatcttcatgaggtagtcagtcagttcccgcccagccaggtctaggcgcagggtggcatgggggagggcattcccatcatagatgggcacagtgtgggtgaccccgtcaccagagtccatcacgatgccagtagtacggccagaggtgtacagggacagcatggcctggatggccacgtacatggctggggtgttgaaggtctcaaacatgatctgggtcatcttctcgcggttggccttggggttcaggggggcctcggtcagcaggatggggtgctcctcaggggccacacgcagctcgttgtagaaggtgtggtgccagatcttctccatgtcatcccagttggtgatgatgccgtgttccatggggtacttcagggtcaggatgcctctcttgctctgggcctccttgcccacataggactctttctgatgcatgccccccatc

SEQ ID NO: 478260 - DNA, 1000 bp, Homo Sapiens
tcaggccttaacatcaggagttgaagaatagatgcaatctgaatcctctgaaacaatttcttctagctcctcttctgttgtctctggaaagccaatctttggctttgccagctcaccactctcttcttcaggaagcacacatttccaaaggccgtatgtttttcctaccacagtttgccctagtctcaatgttccatcttcagaaccactggcatagagttctccatcacgactaaatctcacacagtgaataggaccaaagtatcccttgtaggattcgaattcttctccatggttaaaatacttataaagtttaaaatcttcaccacctgcaacaagaaattctttctcaggatgaagagatgcagaattgatggttgcaggagcttcaaaggatgtaattgggtccaaacttactgcactatgaaaagcaatagatagtccataagttataaccaaaatctctccctcaggaatgtattttgtactactaacagacatattaaaatttagagatttcacttctgtcatagtagcatgatcccaaagtcgagcagttttgtcatcagcagaaagaatctgtttatcctcactgcaccataggagccttttttttataccagaagtgtgaccactaatttccttaggtcttgctttgggtttgttcaagtcatacatgcgtaacagtttatcctgtcccttggttaacaaataattactatcctgcatgaaatacacagtcttgacaatgtatttatgagccaaggtcatcaattcatctcctaagacagcatcccacactttggctgtgaaatctgcagctgctgttgctgctttggtggcattcagtgttgcaccccaaacagcacctttatgaccccaaaatgttccaatccagtctcctgtatctccctggcgtagcataggtttaccatctttgtaagcgctggttaagaaatacccataagtcgtgatgccactgaaggccaaatcaaccatg

SEQ ID NO: 478261 - DNA, 1000 bp, Homo Sapiens; identical to SEQ ID NO: 346207

SEQ ID NO: 478262 - DNA, 852 bp, Homo Sapiens
gttttttttttttttttttttttttgagaatgaaatgtttcacatcatggtgtattctgaaacacgttctccacgtatgtggcgtgctagctggatgtcttttggcataattgttacacgtgtggcatggatagcacacaggttggtgtcttcaaaaaggccaactagataggcctcacttgcctcctgcaaagtaccgatagctgccctctggaagcgcagatctgttttaaagtcctgagcgatttctcgcaccagacgctggaagggaagtttgcgaatcagaagttcagtggacttctgataatgtctaatttcacggagtgccacagtaccaggtctgtaacgatgaggtttcttcacccctccagtagagggcgcactcttacaagtggcttttgtagccagttgcttcctgggtgctataccaccggtagatttgcgggcagtccaccttgtacgagccatggtatagagacctccttcgttatcccccttctgcttcaggtggagctctaggtaaaagtccactagtataagggctgtggagccactggtgagtgacatgactgtcttctccacttgggagcagtaggaaagggagacacgagtggaggtcaactcactactggacacctgttctggatttctcaaagaatcctgatacagtgctgccagatattgccacaaagtttctagcccacccacaacactcagctgccagagttgagcaaaaacagaagctgcagttctacccttttccttctttttccgaactgctccattgcctttctgaggacatacttttctttcatcaggtgcccagatgccagcatttatcttcctctgcat

SEQ ID NO: 478263 - DNA, 1000 bp, Homo Sapiens
tcaggatggcatgcactgcactcggtcttggacctcctcctcagatgtctctgaagtgctggaagactcatccgattcttcatctggaaattcagcttcaccacttctccagtcctggtgacgacctctctgcgtcacgtgacgcaggaggaaccaaagcatgtactggtcaaacaggctgccatggtgcaagctgtcttcatctcgttcccacttgttcttcttaatcaccttctttaacccagtaagctcagtggcagctttagctgtgggtgtccagatcttgacatcatgatctaggccactgcacgccaacacaggtaggtaagggtggggttcaagacagtttattgtaccttctctgctcccctttaggaactggatgatttggcaggatgatttctcccagaagaagatgtgcccgcaatcactaccgctcactacaaactcactcctggggccatagaaattaacacctttgactgtggtattatttctgtgtcccttaaatctcttactgtattgagcaccatcactgtgagaggagttgaagaggtaaatatcgtcatcattgtagctggctagcagctctgtgccatcgtggctgtacacaacgcaggtgatgtttgttgggaaatcacaattaaccagatgatgaggagtgaatttcttgagcacgccattgttttctttcttatcaattttcctctggtcataaatccttacaaactgatcttgtccacccactgcaaattggtaggtattggcgggattcacagtaattgtatacagtcccactttcttatcattttctcttgttaccacaacttttgaagctggccggtcttgtctgaggtcaatggtgaagacaacagcatcttcacctgaagtgaggaacttataaggagagtcaggctccagagccaacttgtgggcaggtcccctgtgctgggccacacacttagtattgttgaaatatgatgcattaattaactctgct

SEQ ID NO: 478264 - DNA, 914 bp, Homo Sapiens; identical to SEQ ID NO: 161382

SEQ ID NO: 478265 - DNA, 697 bp, Homo Sapiens
cccaggcacagaattttttataactgtctgcaggttctcctcatgtgggggaaaaacagcatcagcaggcagaggaatcctttgaagctggagggagaggttgcagtgatctgagagtttgccacttgactgcagcctggatgacacagtgagactccaactcagcaatcctgccaaaacccgggcagtcatgttcagccaaacagctgaatgagctcaggtaggaggtgtactgcctgcagctggaggcttgaccttcgtgatcccagaaccgctggactgcagtggaatgagacaccctgtagccgaggatgccaacacagtgctccttcatgatgatttcactgtggaaataaaggttgggatgaaaggaaatcatcctgccaccggtaaccgggatggctgagttcctccacccaggctccccagcctgacctgcaaatccatcacgtagcaaagcaggacttccgcatgctttccgacccacgccgacatctcgtgtgccaaacaatctacctctgcgcaagaactctccagaggattgggtgggcaagcctcgtgacgccatagacgggacgcagaaaaagtgggcaggtggttgcagctgagggacgggaggggccgggggtggtgtgaggcggctgcttctctgggtttctgagatgcaggaggcctttgtgtgctgggtgctggacat

SEQ ID NO: 478266 - DNA, 970 bp, Homo Sapiens
tcagggtgagtcatcaatggtgggcagccagaagaccatgctggaacacgcactggcaaaagtcatgaacttggggttgaactgcaaacaggtaattgggccggtgtgtttaccatccaacacagctacttttataccactctctccattccagacatggatcttgccatcctctgaaccaatcataataaactgagaatctggagtaaatgaagcctccagtgtgacagctttgctgttggcataaccctcaaacgtgtgcatcaccactcctttgaaagcatcaatgagggaaatgaagctgccgttggtggaaatgaggatgaccttgccatcgttgctgaatttaagtcctgtccactcacaagttcgattacactgcatcctaaaggtagtaaatggccctttatcaaaagaacgaaggtcgtaaagtttgaccatctcagagttgacacctgcagccaaaattaacccttctggatcaaaagaacaaactggcttcccctgtagactcatgaggccctggcagttaggagcccggagatcccagagtcgaatggtcttatcaagagacccagaaatgaaaatgtcatccacaggtgacatggacaaggccaccactcttttgctatgtccaggaaagtatctgatgtatttgttgtcatgcaaggacaagtaacgaatagtatcgtctattttgttagagctgtaaacagctgtgtttgcctcatgagtgtatctgatgaggtccacgccatatttcttactgtacagggttctctttggtttgccctcctggcagtcatatagcacgatggagtcgtcgttgctgcttgagatgaccgtctggccgttggggctgaaatcgaagcagttaatcttgtccgagttttcgcaaaacaccctggcgacgcggaagctccgcaacacgctgtcggtcagcttcatggcggcgggtggggaaggcagc

SEQ ID NO: 478267 - DNA, 1000 bp, Homo Sapiens; identical to SEQ ID NO: 346208

SEQ ID NO: 478268 - DNA, 1000 bp, Homo Sapiens
ctaactacccttgctttcttcctctctttttctgtaagctttatttaacaactggatttcctcctggtagccatccctctcttgatgctgccttttactgttctgcctgtgtgcttctactgtgtctggaatggagatattaatatcaccatcaggattactggtgggcaaaaagagggagtatgaggctgtttcccctaggtcacatgaaacaaatctgttttctttcctggagtaacgtagggatggagatctgacttgtgtggaggactgactgatgttactaatgattgacacagtgtccaaggcctcttcattatcacaaatttcaagaacctccaagtgtattttcacactggtgtccacaaacgtggatgaagaatcttctgagtttggttcatggccaacacttttggatcgatagacttctattttcttagaggctggagttattttttgcccttctgcgcttacctcataggtagaaagagatagggttttccctgtaggtgcatggagagacacagtcccctggaatgcacacaagggaatggcaagggcataaccggaacgctgacgaggggttctttctgatttactcctacaccactcccagtctgaaagatctggtttctgactctcttcatgagacagtcttctttctggcccttcagaaaaggtagtttcttcatagttaatatcacctcctgttttgtcagaaaacgcatcctttttgttgttggaatcctgtttagcttctgtaatatcagtatttgtgcatttgttgatgcctctttgtgtggagctgtccagagagggcgtggtgctgatttctacttttatagcattgaagatgttacggttgtctctctgagggtcttttgtagtttcacactcagagttcatcaggttgtgatagaatatggaattttcatcatcatcatagtaatcttcatgtgctattttataaatcccataacttttttggaatgatagattg

SEQ ID NO: 478269 - DNA, 1000 bp, Homo Sapiens; identical to SEQ ID NO: 346209

SEQ ID NO: 478270 - DNA, 1000 bp, Homo Sapiens; identical to SEQ ID NO: 346210

SEQ ID NO: 478271 - DNA, 1000 bp, Homo Sapiens
ttttttttttttttttgtatttttagtggagacgtggtttcaccatgttagccaggatggtctcgatctcctgacctcatgatctgcccgtcttggcctcccaaagtgccgggattacaggcgtgagccactgcacccagccagttttctattttttaaagttccttggcagaaaaacttagcactttatgaaatgggtcgtttcagcccttaagtgcttgccccctcctgataaacttggctaaactagatgttagcctctgtaaagcccaacaattttgacttgtgagataactgtttttagcttgctaatcttatgattcacattttagaaatgctgaaatgagctaaatcacttgttgaagagtgtaagtccatttgctggaagaaagagtatctgaactcagagcctaaatatttgcccagtgacctttagagtgtggggagaaagtgaaccttgtctgatgaaggcgaaaaagtggaagtaagggtgaaaatcatctggttcattttacctccaaggatgatgacctgagttctacattgttcctgggccttctggtggctggtaaccagaaagctcacagaagcaggcagaccctgggagctgagctgtgcttgctattggctacattctgagataatttataacatttttcagtaaattgcaaaagcagtggttgtctgaatgacctttacttatcaatttaatacagcaaaggtaatcacttttaatgagaaaaacaagtgaaataccatgcgttctgtgacttaaagtgactttagatctgactcagagtttggaacaagtagtcaggaagaaaacgcaaagacagtacgtctgcatagtttatggagtgattttcttctcaggtgaatggcttagaaagcagagaaacaattcaaagtctttaccatgaagtgcagaatctgctttaagattattaaaaaacattttagtgacagtgaggtagctatgggtcacctgtacatatttctt

SEQ ID NO: 478272 - DNA, 1000 bp, Homo Sapiens
tgccgtttctttatgcagtttaatagaaaaacaacaaaacaaaacactcacaaagaaaacacacagaaaataatagcaaacacaacgcagccttggggagatggcaggcgagcctgagctgggtgctatttgctgctgctcttgggaagaggtcggtagaccccgaccaccacagcgtggtcccgctcatagggctccagggtcagctgctcttgaggcttcaagttctcctgctgcaacttcctcacctcagaagcaaacacagcctcggcggatgcggtggagtcgatgcagttggccttgatggagatgagaaagtggcccccattgcgcaggaaggtgtgggcgttcagggccacgatgcgggactggtccggctgggccacgtcggcgaagatcacgtccaccatcccgatgagcatgcggtacttgagcgggtgccgcgcgtcctccaggaccggaatgatgttggtgcgcttcttggccacgttgaccagatcgcggccggcgcggtgggagaactcgacggcgtagaccaggccgtctgggccaatgatgtcggagacatgggagacggtggtgcccgacgcggcgcccaggtacagcaccttggacttgggcttgatgtggatctggtccaccccgcccaggatggccgcggccagcttagagcggaacgggttccacgtgcggtactcctgcttcacgccgccctcggtcaccgtgacgcgcctctcgccgtacacagactggcccggcaccatgttcagcgtgaccagcgcgtcctccgccccgcggtagatgaagacgccctcgtgccggtgcggctccaccgacaccaccatggcgcccttcctgcggcggctcttgctcttggccacgccgccccgccgctgtccaccgccgccgcgatccttgccgtcgccgccgccgcgcccccggccccggccgcccccgccgaagccgcgcgcccgcgccccgaagccgcccttgccccccc

SEQ ID NO: 478273 - DNA, 1000 bp, Homo Sapiens; identical to SEQ ID NO: 346212

SEQ ID NO: 478274 - DNA, 1000 bp, Homo Sapiens; identical to SEQ ID NO: 346213

SEQ ID NO: 478275 - DNA, 1000 bp, Homo Sapiens
tcacgtcctcttcttccagggcgcagtgcgcctctccttctgcgcctcggcctggcgcttcttttcggcctcctctgccttcctcttctcctccttggcctccttgtaccgccacttggggatctgcaggtggccgctgtccttggtgctgcccttccgcgccggccgctcgggctggaaggtgggcgcgggcgccttgctgactcggacccggggcaccaccacaccgggccgcacgcttctccgccgcaggcgctgcaggggcaggaggctggccttccgcggggcgggcgctgcggggccccgggaccccagggcgggagggaggccggctctcggggagccctcccgggagtccgcgtcctcctgtccggtccgcccgcgctgccccgcgccccccacctcatcctcctcctgcgcctgggggccccgtgcagcccgcgccgccaggatctcctgcaccgccagccgcctcttccccacgctcggagggctctcagggcacacggtctggcacacgatggccacggcggggctgtagaggctcgtggtcatccggaccatgtggtccaggacgcccccgtcctccgggccccgcacggagcgcggcgtcagcacggacagcacgcagtctgtgagcctctgcaggcagttcttggagcccgcgggcttccgcgccgcttcagggggcggcggcagctcgggccggtacttctcccagaactgctccgggcaggggcgctccagcagcctctgcatgagacggacggcatccacgcggcccgtgtaagtggcccactcctgcggcgacatcccacggcgggggtccctcgcgtggacatccgcccctaggatggcctgggccgttcccaccatccctacgcccaccttcaacagcacagtcttgccatttacagccaagggatcacccctttctgctagcatcagggctcggatgcagtccgttcgaccctgcatggcggctttcatcagggcggtg

SEQ ID NO: 478276 - DNA, 1000 bp, Homo Sapiens
tcacttctccatactgcttttgattgcatttcgaagtactgacagccataggaacttatcatcctctatttctgtagcacaaatccatttatattttggaccctgaagaataaatgcattcttgacatacttggaatctggaatattttctatgagtaaccgatgaagggccactgatgcaatgaactggtaggttgtttttgaagtcctctcaaatggagtgtgagatgtgccccgactagaaacgagcagggcatcattgaagaggaaaaggctgagatcatggatgtgttcatagagccttaaagagaaacttatttcttcatcacagcaatgaagttgggctacatcttgtaccctaatcagatatctgtttacttctgatagagtctgatctatataacctttatattttttgatttggtcaattgcagtggtcaagtccccacggtcaacatgctctgcaggggtatgaagcctgacagcgtagagaagattaaggtattcttcaaatcttcgggatgggtacagcagcagctctggcaggctcagcattttggtaacaatggtcttatcatgcctcttcaggaaagttcggaatgctggtatcatttctctgcacttctcaatagttttcagaatgacagggtaattgttgaagaaattggtatatgtgtttaactggcttccaaacttcgtgactatttctcccacacagtgagctgggccccattcctgcagtctgtctctcaggttatctagaaactgcctgttgagacttaaaatctgtagaatgtcacagaaaatgatctggatattggcagcactcagaatcgctctgtttgatgacaatgctgctttcagtggtgcgacataaacatctctcacaatttccagtatctgcacgtattttctctcactctgtaagagttctctgacaactctagctcgcttttctgctgagtccttctggagtattctctccttcatgaataaactg

SEQ ID NO: 478277 - DNA, 1000 bp, Homo Sapiens; identical to SEQ ID NO: 246637

SEQ ID NO: 478278 - DNA, 1000 bp, Homo Sapiens
tcaccaggccaggggtgaaaccatcccggagctgcgcaggccctccccggcctgcaggtcactcagcgctcgctcgaatttgctcatgaactctgcaaagatgccgaagaaagcctcagaggtggtggccttggaatcctccccaaagaaggccagcgccttgcccagctcctccatggcctcgcgctgcagcccgtcgagcgcccgaagtgctggctgggccgtctccaggaaggaccgcaccaggccccatgtgctagcttcagcattagggaaaaccctgtgttcccaccccaggatccagcctggtgcaggaacaggctgctcagaggatgccgacatgaccattgcaaacttgtcctcgctagagggggaaatgctctggcaggcatcctgtatctcgctgatagtgccatggaggtcagccaggtcactggtcagggcccgttggttcactttggcagccaggggcacggtgggcaggtcctgagcaaagcccaggagttcagggaagtgctggctcagcgatttggcaaggatgtgcaggaaggtggacttcccatccactgtcttggtggagttcagctctgtcagaaagttgatcttgaagcccgtagtcttgttggttttgggctgtccatcgttgagatagttgcccatggccaacacaaactccaggatcttggcgagcttccgactgtttttgagctccagggaggcctggcgcaagcattcaaggctgcctcggatctcctctgtcttctcctggagggtggcctggaagtggaggctgcgcaggcgtgtcttgtattcgggaactgacagcatccggccattaaaggtgttaaactgggactcagaggcttgggcgcaatggcggcccccgaaggcgcgcgggaccccagcagccctggccacagcgacagcccctgtggagccggccgaggcctcggggcggggttgtggtcgcggcacctgcaggacgaactggtccggctcg

SEQ ID NO: 478279 - DNA, 1000 bp, Homo Sapiens; identical to SEQ ID NO: 346214

SEQ ID NO: 478280 - DNA, 1000 bp, Homo Sapiens
tcatgggaggccagacgtgcggggtatgcactggagagtgaggcaggcatggtcaaagagcttgtgcggcagctgtccctgggatgtccaggtgtccgtctcggggtcgtagcaatcgaaggaggcggagtcctcaatgttgcagtccgtggtcagccgccgcccgcccgtcacgtagagtttgtttcccatcactgtggccccatggtgcatcctccggtctttcatgtccgcacatttgacaaatttgttggattgagggtcataagcaagaatcctccttgtgtaacctcccacaatgacaatccgctccccaagcaccactgcaggggcacacacgttcttgatcattcttgtctccattttgaaccacgagtttctggaaatgtgataaacctggataaggcgcacagggttctgcatgatgtcctctcctccaaagagatagagtctttggtctttcacagcgactgcggggtggagcacccccacgggcatgctggccatactctcccagacattgcagatgctgtcatacctttccatggagcccatgagctcctgcccttctccaatccccccgatggagaagatgaagttcttatgggcagtgcttctgtgggagtagcgggccaccagcatgggctcccccagcctccactgattgagtttcagggagaagatgtagacattgtgactgaccagactcctccctgagctgacagccatgccccccagcacatagatgctgcggtgcaaggtgatggcagaggccttgtacagccgtgtcgggagtttggcaaggctctgccattggccggtctgtttgctgtacagtaggacgtccctggtggtctgctggctgtccttccttccgcccaagaggatgaggaaatcttggtaagagtttcttggagggacatgcaacaggagtttgcagtctgggacggtggtgccacacaaagagaacatctgtctcttggcggtctccaagatgatc

SEQ ID NO: 478281 - DNA, 1000 bp, Homo Sapiens
cttattagaacatttattagggagaatcaagattctcaacaagtagtgaattattttgtggggggagatttgcctccctgcaaatacttccaatgcattttgtgtccagttagtaaaggcacatcactgaacacagtgcttttgccactaattgggacagctggacacaccagggtgacttgacgctgacaagtggggtttagatgtggtacaggatccctgtggggcatggattggggatgcctttgatacaatatcttccccttaaatgcctcaacttcctggggctgtctgtccttgtctatgatctgtctaatccttgtaggataattctgtccaacaaagatagcttgttggctgcaagatttggtacatgtcactttgcgggagggagctgtgtagttgcggggatagccctggaaaggctctgctctgacctgcacttctgggttgtgctgagctttcccaagctccactgggaaggaaaagggttcttagggacaggtgatatctatcccatggctatgccccagcttttcttctaggaactccccagtgtctttcctaattttctgagcttcagtagcaccagtaaaagcagctctacttgtaactcgacttctattctgcacagatgatgacagggagctacccttttcccaagaactttcttgttcttcacacattatgctaggtttattaaaccactgcaataaggtctgcatccattttctgaaaaggttttcagaaggaggctgtgttttcaaggttggggaagatttgctcccaggcacctctcctgatgccttgttatgaacagggaggctctttctagtgagttgggatgtccccagccctgcatcccctccaccaagctctcctccattgggtcttaaagggctcactctctttgcagctggtgaaaaattcttaacttggcatttctgtaagacatgcgtagggaccctgtgctcctgctgctgtgccacacggattcctc

SEQ ID NO: 478282 - DNA, 1000 bp, Homo Sapiens
ttggcgtgaacatcagctctgatttatttaggaattgctccatccacagactttttttctggaagcagctagcttgctcatacttctatagcaccacagatccttcccagtaccatggctttcacttgccctcagacacccagagatccctgtctccccattgtgggtcctcttccttgtcctgccacctctgtcttccacaaggtgggccagggcttctcttgtaaccatgtcacttagggacactgcagctgggccttgtaccagttgtgaagactgggtattaagtgaaagtggtagttggtgtcttagctacgttggttttatgaccaaagtctgacagaagggctcttcccaaatcccacctgccctccctaagcctatttgcatcttcctctttgggccttatggtgttgcagtcactgtgatggtgacattcactggagaatccgtggtttcttgtgcaggatccaaacctggggtggtggttggtgtttcaaggcctgccggtgcctcagcatcttctctggaacccctctgttggtgcctttgctcccttccgctgcaccaggaagcccgtcaggttcccgggtcctaagatggcccattgaagctgcacctctctccggtgcctcccgtaggtcaggcggctgatggtgacattgggaggagctggatatcccagctggaggtggcagtgggggtcaggggtcctgagcaggtgagtgccccggcaggtgaactctctgccagccagatcttcttgggcctgcaggaggtgaacggccatcgaggagctgctgccgcccaggggctgctgctgttcgtcaagccagcccagcgtggcagggggctcgccgccaggccactcgcagctcagcatgatgaactggtcccccattgtggctgtgctccagcaggtaggcctcccgagaggctcccctggaaggaatgatggctcagtatggcctccacttggttggagacctccctccaacaa

SEQ ID NO: 478283 - DNA, 1000 bp, Homo Sapiens; identical to SEQ ID NO: 346217

SEQ ID NO: 478284 - DNA, 1000 bp, Homo Sapiens
atatttagggggaacgagtataggattcttacatagtcaaaaagctccttatagagaagctcagaactttcaatacagctttgccttttttgccatttaaattttccatttaatttaaatgtattctctcatttgaccttcatactctgtggagaaatattcctattttggcttgtattgacaagttgttttcacacagcccccacatcacccaaccaaccagcagagatcctccttcccaagaaacagataaagaaactgaggcccaggaaggctaagagtcctgccaggattattcacctttcaaggtaaggagccagttccagacctgggtttgtgcagctccaagctcccccgtctttctacaatgctagatttagactaaagcaatctagcaagtgtggccacacaatggtcaagttggatttagatgatgttctctataaatccattctcctctcccgtgtaagcaaggcaaagtactccaggccatggggagtccctgaagactcgatgaactgcagtggccacatcaggaggttgcaggttaaccagaactcaccgacacagcaggagagcagcttggaacctgcaacctagccaaaacctagtgccttggattgggggagaaaacatgcagccattcctctctctctgctggctagaggggattctggcttttcctgccagagccacccctttccctcctcctaaagttgatggtggttctttaaggaaagggagaagtgcacggtgtgatagggcaggaagagaagaaaacggaggagaggaggggactttcccataagcaggcagaagaaaaggcagctgtggtgtgtgatggacatggatgcagtggtgtccaatgtggggtcagcccacttagtgagcatggtatccactcaggggcctctgtgggcatctgtctcctctgcagcatctttcctccccactgctgggtctgcacatgaccccctccttgggttaggcctctgatcag

SEQ ID NO: 478285 - DNA, 1000 bp, Homo Sapiens; identical to SEQ ID NO: 346219

SEQ ID NO: 478286 - DNA, 425 bp, Homo Sapiens
tcataaatatgagtggctacctgcctccttcacaaggtcgtggtgagaagcaaattgatgccagtgccattttttccacctcaattccttgggttgcacaattttgtgggaatttcctgggaaaacttcaaagcaatttaaatagatctgtcccaaccatgcaattacaggagctgatgacgtttcagaaacagtgacaaagttcagaatcccattcttccatcctagatgggaaacatcaactttcctgatggtgagtttgtcagagtccattcccaagagtgggggtggggaggtgggggtggaggctgttgacaggcaatgatttctgtaagccatagttaaaatgtagccccatgtagacagccagtaagacagcagaggtaagattccagatagcttaagttgcagtctggcctctgtcc

SEQ ID NO: 478287 - DNA, 619 bp, Homo Sapiens; identical to SEQ ID NO: 161383

SEQ ID NO: 478288 - DNA, 1000 bp, Homo Sapiens; identical to SEQ ID NO: 161384

SEQ ID NO: 478289 - DNA, 690 bp, Homo Sapiens; identical to SEQ ID NO: 346222

SEQ ID NO: 478290 - DNA, 837 bp, Homo Sapiens
tgaattaaaaacagaaatttattttctcacagtcctgcctccgtgcctaaggaccagctcatccaagaatcagctggaagtccagaccaaggtgtgggcagggctggtttcccccaaggcctttcttcttggcttgcagatggctgtcttctctttgtgtccttacagggtctcctctgtgcatgtctgggtcctaatctcttcttctcagatccccatgaataaggacaggcctggagggcagggctctggcaatttccctcaccattgccattgacataggctctgtacaccaaggagctgaacgagaggaatccaggagagccacagaaaggacaaggggaaccagtgcaggggggatggacgcacatccgctgaccacgtaaaagccaggccagaagctaggctcttagcctagctaaggctaggttttctcagtgcctttctgagccatattggagcatgatgatgaggcaatcttttcacatcctgagctacaatccgtcttgtaaagccttgcaacggcctcaattacagccctggattctcagcagaggcacagagtgggggtttttgcttgattctctctcccctctcagtttcccacaccttatgcagaggcttgaatgtctaatgtactgtacattagacattcctatagcatcctatagcatcctatagcaatcctcattaaaatcaatcactcatttgaaaaaaaaaaaagcaagcaagaaaaaggaaggaagaaagaaaagaaaagaaaagatggaggaaaaaagaaagaaaaaaaatgatcaggcccctaggggcctctgaggtcacagtaactcaagtccc

SEQ ID NO: 478291 - DNA, 1000 bp, Homo Sapiens; identical to SEQ ID NO: 346223

SEQ ID NO: 478292 - DNA, 1000 bp, Homo Sapiens
acctaccaaaatatataatggtggaaatattccaaaattccatattttgggatttatacacaaaagataaacaaattagaggccaagaggctgccggaagggaaaaacggggcctggaaaggccgttgtgaggaatgagcttggcctaaagaggccactggcaggcagtagctggacctgccgaagtggccgaaaggcaggagctttggacgggggaggccgcagtgaggcgagagctagctgggcgtggagagtccactgtgaggccaaggccaaggccaggcccgtgcaggcctttgagaggcaggaggccgggcctgcaaaggccgactggagatcaagttctgcgcctgaagaggctgccaaaagtcaaaagcggggcctgggaaggccgccgagagccatgaactgggctgggccgaaagaggccactgggaggcaggaagagctgggcctggagaggctgactcgaggaagttttgcacctggagaggccgccgagaggacggagctgggcccggggaggccgacttgctgctcttccaggcccacttccaggccgacttgaggacgacttgggcctgcagaggccgctgggaggccggagctgggcctggagaggccgacttcgggacgatttgggcctgcagaggccaccgggaggcccaagctgggcctagagaagcccaccaaccggaggccgtttggggcctgcagatgccatcggagggcaggagctgagcctggagaggccaccgtgaggcctgagctgggcctggggagcttggcttagggaagttgtgggcctaccagggcctctgggagctgggcaggagctgagtccaaagacgttgttgggacctggagtcgggccagagtccggcctggagacgcagccgggaggaagagctgggcccggagaggacgctgggaggctgcaagtgggtctgagaggccgacttgaggaggcccggcctctgcctcccgcatggcccagctg

SEQ ID NO: 478293 - DNA, 1000 bp, Homo Sapiens
ttagtcattttcattcacaaagatgactattccacttctagcagctgggaagcccccaactctgtgggtctggaggaacccgggggagaccctaggcatggggatgcccgagggtttgcagtctggctgtgtgtccatcctacccagtgctcaggtcctcgagtgttctggaccagtcagggggctcccaggtgcatctagtagcccctcccatgctagggcagggctttccttcattggagggaggagctgggaagggcttgacagcgggccgggcagcccattggtcttaaggccagagtccccacgttggccacgtttgccatacaagagaatgagggatgaagaggaggaactagaggatctgtaggccgagtcaggagctagagggtctggggctggagcccggttaggggctggtctgctcctgcgcccacggggcagggctgagggcccgcagctgggctcccctcctctctcttctggagctccccggggctgacccggatccagccggtcccgggactggctgcgcggggcagggggccgtctcggagaggccaggtggtggtggtcagcccccgtctggatcgcttcctccgggcctagtgcctcatcctcgctgcgggcaccaagggggcggctctgggctgagaaagctgaggagtcactgtcctcggagtaggagcggggatgcggcgggcagctgatcccagggcctgggagcctcggcacctgctttatgctttgtaagcgaataggggtcacctagggcccggagcgccggcgctctctcgaggggaccaggctaccagggcaggggctaggggtgggcgacaccctctgcggggacagggtgcggaccctcgacgggggcgggcagtgggtagtggaggagcggcagcgcgggtcctgacggtccaggtagcgctccagcgggtcgccacacccacgcgcgccgtcacgcggctcccccgcaccagcacagagaccaacaggc

SEQ ID NO: 478294 - DNA, 961 bp, Homo Sapiens; identical to SEQ ID NO: 346224

SEQ ID NO: 478295 - DNA, 627 bp, Homo Sapiens
tcagatgtagagcatctgaactgagcacaaaacaatgcaatgatgggaaagaacacgttctttctttgaatgaaattcacatttattctgagagcaagacttctggggtttgtctgtgaccctaatgatgaatccaaagactgtgcaagagaaaataaaagacaggtcttgcttaagggcctttcttacattcttgaatgcagaccatctgggtccctccacagagaactgcctgctgcctctcgcagagaagagagctccagcaaccacaggtgcctgcaggttcctcagacttccagagtgttccagggaagggactgctgctgacgttgcgctgcaagagcagtcctgagtttcaaccacattttcagttatgacttcttcaaaagagagcatctttgcaggctagttgcggatttagatcgatgtcctgtagaataattgccagatattttatcatgctgtctttttgaaaaagtctgattcacagcaggttcctaggcttttgcactgacacttttccctaactttttccccctcaggatcaggtaattaaaagggtattgatgcaaagggaagccgagcaccacatggcttggcaaagtgtttccataaagttctgtcctg

SEQ ID NO: 478296 - DNA, 1000 bp, Homo Sapiens
ctatcgggagagggttcctccgggctcaggaggaggtggccccaagcccccgcggagccccaggagtttggtggcggaggaggcgctgccgtcgccacgctcccccgcgctccttctccacactttgaggagggaaggcagctcgcaatttgccagatctgccgccgcaccctcctccctcctccctccgccctccccttcgctcctccaggcttctcccaccttcctccctgaaaccggcagcccgcacagacctgtccaatggctgcactttcctcggggctggctgaggagtcgcggccaacagattaagccgggggagcctagcgaaggggagggagagggccactccagccccgtgcgccccaggcagccggctgccccagagcgcggggagaggggacaggccggggagctatcgggggagcgcggggcggtacctccgcgccgccggggcgccatcctcgcagcctgctcgcacgccctgggcagctccgccaactgcgccccacacccacctggctcccgggccgccttcgcgcccgactgcggggggcgatcgcgccccgccccgaccctggcggggtctcccagagccggttcggttaccgactctgcgaagccccctcgaccccagcccagcgcgggagggtggcggaaggtggtgcaccgcagcgtggtccccgccgctgccgccgcggcggagcagctggactcatcaagctggaaatccatgcagtcggcaaaaccatcacagcgctggtgggctgggatacagctgttggaggaggcacacaccagagctccattagaacagcttttgttggagcagatgagctcatcttcattaaagtggcagtcgggcactccatcgcatagcaggagggaaggtatacactcgtctgtagagcacgggaactccatgttactacagagtggaggggtggggctgagaggacaatccatttcatcagatccatctatgcagtcttcatgtcca

SEQ ID NO: 478297 - DNA, 1000 bp, Homo Sapiens
ggggggccacataggcctcagcctccgatgtggaggggacttggtgggagtgggagggccacatgggcctcagcctcggacgtggaggggacttggcgatggggggcgcagcggggtggggctcacgggttggcgggctcctcggggggcttcctgccgactcgggactcaatgtgtggagctcttgagagcctggtggaccctggggcctgctgggggtcccttagggatggaatcagcggtggcagcagcagcagaggtggcagggaaggtggtcgagctggcatcgtcaggtgagggcccgaggcagctgagcaggcactggagcgggggcacaggggggggcagatggcgccaaatagggcactggagtgcacacggtcatacaggctttgtgacgggggagatggagccttcacagctgccagctcctttgcgacggccaagggctgagccccacgctggctgttcacgcggcctttgtacaggatcccatccacgcccaggatgtccacctcggcgctgtcatagtcgatcacgtggggatccccgtagggatagagcgtcaacaggttgcaggacttgcacttgaggctggtggcgttttgggggccatcaccccagtcctgctgacaatcctcctggataccgaggtcctggagctgcagccactgctgttccctcatctgttgccgctgcaagtactcgcagctgttggcgctggctggccgcagccgggacagcaggtgggctttgcggatggtgatcagctgtgggccagtcatcatctccacaggccggtcacaggagatgcacttcacgcgcttgaacagcttcctcctaaagccagcagcactgtcaggatccagtcttaagccctcaatcagcagcttccggacgattttccagacctcttccatttctttcttcaagggatccagatcactgtggactaacttggtgttcacgtccttgctgagctcctccatagccttcttcc

SEQ ID NO: 478298 - DNA, 1000 bp, Homo Sapiens; identical to SEQ ID NO: 346226

SEQ ID NO: 478299 - DNA, 648 bp, Homo Sapiens
tcaagtttccagtttattgggaataatcttagtcatgatctgcgaagttggtcctggacaatttgaagataggtcttctttatcttcataggctgttccacaccaaatactatacagaagttcttctcttaaataactagtcaatatttgtaatttttccagtacacttaaatcttcactcttatattcatcttcatcctgttctttttcttcttcatcttcagtctccttttcaagcctcaaccagtaccatgcttccctgggaacctgaatatttttctgggtgtccaattgttgacagacttgctggcttcttctgtgatctccttctagcttcatttcatcttgcttatttttaagtcgcattcgaaactggtctgcagctttttcttcagcttggttattcatcatgtgaatcttttttccgtagctttctaatttttcctctgccttgccaagtgcctgaccacttttatagcccatcttttggagcaaggcaaaccctttgttttcatagcctagtgcattcttcaacccaatgttacgtcttttttgttcttcttcttttaaactcttctgcctatgtttcaagttagcttcctgttgcttttcttcttttccacgggcttcccggatttgccttagcat

SEQ ID NO: 478300 - DNA, 1000 bp, Homo Sapiens; identical to SEQ ID NO: 161385

SEQ ID NO: 478301 - DNA, 1000 bp, Homo Sapiens
ttagtttcttgagattatcatccgctgagggtggaaggggagtgagcagacacactcgggaggtgtcttgagattatcatccgctgagggtggagctgagggtggaaggggagtgagcagacactcggcaggtgtcttgagattatcatccgctgagggtagagctgagggtggaaggggagtgagcagacactcgggaggtgtcttgagattatcatccgctgagggtggaaggggatagagcagacgctcggaaggtgtcttgaggctcagggagttatcaattatagaatgttgttgagttggaggaggtggctggtggcccatcctgttttttaaagtttcagctgtgaggtagggccagtagggcaatcctgaagaatgacgatgctccactgccgccattctgacccggttgcaaagaggctttcttgcagaaggggtgattttgcatctgtagtagtcctctgcccgccgccgcaacgcttgcgcacgttgaaacatttccatgtaggtgtgtatttctttcatatccaatttcccattttcctctgcctctgacacctgcctctccttttctccgtgctcacgttctttcatgcttagtttcctcagatgttctttggcggtcttcctctttccattgattttgtcatgacggttgacttttgttgtcaccttcatcttacggattttagctcgaactttggtttccacctgtctccataaagtaaagatgtcttccaggacaattttaattccttcctgtctacggcagttggacctcctggctctctgctgtacatccgtggatccatcatgtccattttgagacgggaagatagtcttcaggaaagacacacaaaggtaacttgtgcagagggagatggcaaatttataacttctcagaaacacagtaatgataagtaaccaaggacttccaccaaagtcagtcccacgatgacgatggtcagccagagtattgataacctgatttctg

SEQ ID NO: 478302 - DNA, 1000 bp, Homo Sapiens
cccaactaatttttttatttttgtattttttgtagagacgggggtgttactacattggccaggctggtctcgaactcccggcctccagcaatactcctgccttggcctcccaaagtactgggattgcaggcatgagctaccctcctctagtatttctgtagcttgagtgaacttctgctgttctaggtacccacagttcaccatctgcctccccacctgtctgcgagacccttgaaggcagggatgtgactttcctctatcttccccaggctcagttatagagccagctataggcagctgcttgggaggcgctggttaagctgaatggaggaaccagtggagctgagatgcccgtgcccgcagccaccagaccctggctgagctctctccaaggttattacctggaggccatggagtggaacttccagatgaactcatggtggtcctcattgccgaactgttccagcacacactcggcttgggccagccgctcccgggttccctgggcctgctccagctgcatgtccagggaggccaccaggccacgggtgtgaccccctatcccctccaggcagcgggccttctcctcgtccaccgggtggcgcagctcctggaactcgcggcggatcacccagctgaagacatccgactcattgacgattcgggtccggtttttcaccagtttggcgatgagctcatccaccttcttctgctcctgcttcagctcagagaagagggctgcgagctcctccttcatgcggctgcagacggtggagacgggcgtgaccgggtggtgttggtgggagcccagcagaccgcagaggccacagatgagctcctggtccttctcgcagaaaaggctgagcgggttccggtggtgcacgcagaccttgggctctgggtccccagggagcctcagggcttcgatcacccaggccagggagacgttgggcaaggagctgctgccgtccaccacctgccagcacatggggcagcgcac

SEQ ID NO: 478303 - DNA, 1000 bp, Homo Sapiens
agagagggagtcaaactttttaattaaagtccgtcccttcccactcttagacgcctgggctcttctgagtccccggagctcctgaatggatgtggttgccccggaggttcagtgcgccccgctcacccagcaccagccagggctttccttaaaggcgtggaaaggagcgcgcacaaggcgcgcattgaggtctattcgagcgcagtgctggttaatatacataatctggagagattaaacaattagtttagaaaatccttggagatagtatcctttccgagggaggcaccttacaccaggacggcgaggccactctttctgaggccccgtctgcgcagcccaggcttctgctgggttaatcaacagtctctgcggggctgctctggcgcatggagggctcctccaaggactcttcttttggggattccgacaacttcccttttggtgaaagttgaagggctgcctgatcactgactacatccacatgcttaccgtctattgaagatgtacaatgacttgaagaggatatagctgtcatggtcgttctagactgcactaataagggttttactttaatataattgaaggatgtgtcagcaagcactgcaaactgacgaaacagtgtgtgccttgtaaacatctcattcttaaggacatgaaagctgttcctgagaataaagaatctcttttcccagcttttatttagtcgatcagcttccttcctaaacctttccaccttctttttctcattctctaaatttgcctttaatgcttctatttgagactccaaaccatgtttgtcttcaacaagtttggccaggctaaatccaaagacagtggtcaacagtccactgccagcatctagaggggtgcagccacctccggcttgactctggtgagcagcgatgtaatacaccaggcagcagcacacagcttggtcttcctttaaagccttctttggcattttagctttctgggccccagcagatgatacactcat

SEQ ID NO: 478304 - DNA, 790 bp, Homo Sapiens; identical to SEQ ID NO: 346228

SEQ ID NO: 478305 - DNA, 1000 bp, Homo Sapiens
catcttagccagggccaaattatgctccagggtctcctgggcctgaaactggtagtagcccaggcgggcctgctcccgagtgagtgttgcctccacttgctgcagcagcaggtccgtgggcagtccccggcaatgcgccagcccatagtgcagaacagcccagagccaggctgccaggctggctgcaggtcggctcactgcccgcagggctgcatcgtccatacctggagccttcagaattagatgtaactttatcagctctgagtctgttatcttctccttggggaagaacaccagctcctgataaaaatcctcagtgcataacagctgtttggcactggcccagcctgtttcatggtggaacaagtcacacattgcatcagttacccggaccacagattctggtggtgctcgatagctccgtatctcctcaaagtcagccacctgcagctggctcagaggctccagaaatgccttgctcatctgctccaggaaagcctctcgctgagcttgcagggcatcccgttgcctggccaggttctcaatgaggttctcttgatgccgacactcttccagctgctgcttgtataggagcttgctttgctctagctgctgctgaaacatgctgagactcttgccggagtctttcagctgctgttccaagtcaaagatcagattggcatgggtaccgtgctccttaatcagcattctcagattctccaaggcattctggacccgtcatcaaggggcacactctgagcaccctccaggtgatgctgggccaccttggccagggcagcttggtcccagggttcatagcggtcaatgctggcagtggccagttgaaggagcctcaggaaaagggtggagggcagctgcttgtgggcctgtttatctccaatcaggaagaacaggtgaaggtggctgcacacttgctggtggaacctgtgggccagggctcagctaatgtcctcccctttacctttgcttgcccctcctg

SEQ ID NO: 478306 - DNA, 927 bp, Homo Sapiens
ccggccttcgaactcttgagctcaggcaatctgcctgcctcagcctcccaaagtgctaggattacaggcgtgagtcaccatgcccggctggtcattgagtttttaatttgtagaatacacaccaaaaagttcttttgattccaggagattgaattctctcatcattcacctctctgtggacagacaagctagacatctatttgtatttagtaggtgataatgaccccttggcaagtgttacatctagttaccatcccgtgtgagacactcaagtgagtggggtatggggagaagcatggaagcaggaccttcctagggagaagcaaatcacagctgtaaggagggtagagaccagaggttttccagcccatccccatccttctgaggtcattgtcctgtgtcttcaggcagcaactctcagatatttgctgtgttcttcattcgttaccttctaggctacagttgccacagtgtggtatatgtttaggggttttcttctggccttggagactttcaggagcatctgtggtttgctgaggagttaggttcaccttgttttgagctgtgaagtgttgtccacaaatatctggctggttgtacagggttgacttgcagtgagaggcagttattacctcctagcctgcggccaaccacttccagggttgtcagggcttccaccccacactgacccagggtggcttcattctgtaagggagaacctgccagaagcacaaccttatcttcagggatgaggccctccagggatgctacatgggccttgctctgggcaaccgtctccaggccggtcacttcaagagtgtgcagctcccgggcgcgcacgtaggcgacttgaggacagaggagactgaggtcagcagccccacctcctcgccacgcccctcgccacgcccgtcggcgtccgcgcat

SEQ ID NO: 478307 - DNA, 1000 bp, Homo Sapiens
tcaggtaggaggaaggggatagagctggaagggcacgtagctgtacgcaggggttccttgggccctatatgttggcatggagacagggtgtgccccaatcgccgtgtgctggggtgtagtcagcagggtacctgctgacattgccatggtggtgcctgccaccatgcccatggccacaccgttggtcctcggggcggcaacaggtgctgggtagatagcagagggaatgctgttgggctggacgaccgtggtatggtggatgacatgaggctgggcagcatacaccggctgtgtgtagtaggctccctgggcatacagattctgctgggggtaggcacttctgattggatacatggccgtctgataggggttgggtgatggggagtaggggggtggagcagtgttactctgggtcggtgggaccttgtatggtgtccccgcagtatatctgaaagccgcagaggatgcttggtaagttcggttctcggtcccggtgtccactgggaggtggaaggtgccttcagtgccacaggaagacgagttctgtggccaggcctgtttcatcagcagagttgcataagctgaatgcaggaactgaaactctggagcataactgggactattggtggggtacaggctgggattgtaggcaggggcagctgctggataggctgtggggtaacccgtgtaggccatgttcttagggttgccataaggagccccaggctgcacggggctgtaaacagggttcattgtggaagactgaggatccggtgagcagctgcaggcgaaaacggcggcggcggcggctgaggcggcgatgcccttgtcttctccggaggctacggcggcgacgctctcgcccgtgtccagtagggtggcggatggcgcgcggggaccggagcctcctcctcagcgactcggctctgaatcctctgcagtagccgccgaggagcccgacgggtggggggaggggacgctcggctgcgggcgagggagg

SEQ ID NO: 478308 - DNA, 974 bp, Homo Sapiens
agagattaaatggaaataaatgatcgctcaaaaattttaatgctagttttcacaaacacaaccaagtttaccaaatttccggatttacagcaaaatgtatgagctaaaaaagtgtgcattcttcagtttctcctatactttttttttttttttttttgcctattttcaaaactgaccactgggtatttttaacataagccatgtcatatgtaaagtttaactatgtttctggaataaacaaaatccataatatttcagtaactcatagtgtatttataaaatgaaaagttctctatcaaaatatacttttcactgggaaaaaaatagacaaatggatctacacaaagtaaacattaactttggtagatttcagtgtagttcataacaagcatatttgcccttattcccctggagctgctcaactaccaagaattatttaaatatttttaactgagattttattatgttgacatttgtttctcattccacatcatcttcagccaagctctaagcacttacaattctctaattgttgggagcttagtcagaggcatctggaacactggtggtggaagagtttgctgtaagacctgcagtaactgctgtggctgtccacacacagcaattgcatttgtcagatggtctacacccttctcatatttaccttgagctagtaactcttcaccaagctgtgtttcttcaaggaagaatttctgaacagcgtcagcatctttaaggtcaggtaacttggaaaacccagctctctccttgggaagcttctgtttctttcttcgttctcgaagcctgttcttgaaattggggtcacttcgtcttttgtggtaaaagtagatgcagtacctgataaaaagggccccacatacactggcggcgatggcgctcttccgacccactgtcttctctacaacgcagagcgtggacggtggcggcagggactgaaggcactgctgtctcat

SEQ ID NO: 478309 - DNA, 1000 bp, Homo Sapiens
tctgacaacaggccatcctgcacaccagagcaagtgtcgtgagcaagcagccaacgcctgcactcacccattggttatgtgtcagcacggccctgatgctgcagccaagcgaagctcctggttcaaagcctcaatcactcttctccttgaacttagcgcgagtcctaatactagctttgtcccatccacagtcctcaactccatgcagtcaatgttgttaatctcccactgtcctgttaggagcgggctgcaacaggaccacacacaatgggtataatagctgtgcttgctctttttgttggagaatggtttcctcttgaggtaggaatgcagtcaggcccagccttggctaacactcaacatcttccagctcaatctcctcagttgtgctttctttgagtttgtgtcttctcttcctctgaaatttatatgcacacttattacaaacccacatgaggctgattaatactgcggccacagcagcgagaaaagcaaggatgacagcgacaaagtgcaggtcttcatagaggatctcagagacgtgcagcacgatggtgccaaactggctgctccccaggcgctccgtcacggtgatgacatagtagccggaatccctcactcccacgctgaagagctggatggagccgttgtcaaaggtgcagactctgtccttgtggctttgagagatgttggcctgagtccctggtttccactccacgatcttctgcgttccccaattggatgaatatgtccattcgatggtgggcactccatgacaggagtactcaactgagagcaggatgtcttctttgacagtggcattgatggtggcctgaggaatgtatagggacacaccctgactctgcagacagcgggctgcggccaggcagagggcgaagagtcctagggagatgcctcgggtcttcctcctcccgctgggcagaggcctcatgggcgagcccggggcctcgcgggccggggtgtgtgctggccgcaccgc

SEQ ID NO: 478310 - DNA, 1000 bp, Homo Sapiens
ttacactgagccaggccgctgatagccattgcttgaggcagtgtctagtcttaatctcctgcacattttcggaggcaggtctgggtttggtgaagctttgggtgtctccttggaacctacagaagttaagctttgaatagatccactgtagctcttgtttccttcagctgcagagatggatctgagagaagaagcagaagctcttttcagtcctgaaagcccataaggctctttcttgactaggtctatgggtggggaaacgtctcctgggctagtgactgaagcaacactctggcagtctgattctgcatctgtcttggttgcatcttctctggaacttgattcaggactagttgtccacagaccaaggcttttctgtccattggaagatgatggggttgcaatccaaggaatccctccagatttctccctgggctggcaggaagctgactttgtagtgctattttgttcagaggaatgagaagagagtgactcaatgctccccataggtgtgctgtctgggctgctgctataggagtcactatcaggttcggccaggcatggagtatacctccctctgggcttcctagaccctgtagagaggcagattgctcgtgtccttcgggatccagatcgagactgaggctgaggaagaggaatgcttgggtctggagcagtatgaaaaatcttttcatagtgctctatcagaatttctaccacaatattctgaaatttaatattcatcatagcagccacagtttcttcctgtgctctcattagagttgggccaaatatgacaccaagatttgagacagtcatgagattttgttggctgtgtagtgatactttgaccagatgctttattaagatgtccagcatctctctgtttttctccggcaatttgtgcaccaatgcatgtacagcctccaccctgtagttttgatcatcagatttaacagcaatgataaaatctttgtgcaacttgtaagtcatcagtggt

SEQ ID NO: 478311 - DNA, 1000 bp, Homo Sapiens; identical to SEQ ID NO: 346234

SEQ ID NO: 478312 - DNA, 1000 bp, Homo Sapiens; identical to SEQ ID NO: 346235

SEQ ID NO: 478313 - DNA, 1000 bp, Homo Sapiens
ggtctatgtacatgtattgcacaggcctcttgcagccaccctgttcctgccttgtcaatgatagcgattcctcttttcttcactttccgacgtgtagtcgcgggacctgatgccgttctgaaggttgatgagcgagtccttcatctggtcaaggagcatcactgaggatttgatgatttccctccatttttggagctcagtatcgtggtacttttgttgggactctaagagctgggcccattctgtctgagactggggtaacctttcttggagccttagaccctgccaggcagtgagggtctgcgtggtgtattccaacatccagagtttgtagaagagcatcatgttaaggatgaccagcagcaccagactgaaacagatcacacagctgataaccagcagcagcttggacacgctctgcaggtggaaaccgttgggggtgtcctccgggatatgccgcgtctgtgtggaacctgccacatgtttgatcctgtggcccacatcctcatctgtgggcgtggtgaccgggctcatcacctcttccaggtgagggactcgcaggtgggcatggggacgcttcctcctccgcaccgttgtagtcttgctggccttctctttgggagattgtctgtgcatctcagccaaataagtgctctccgttttggccagctcgctctctaaatggcggaagtagtcctccagcccactccagaagttcttctcgatgaacgttttcactaacccccagggctgttttcgatagcgcagctctgtggagaccctgagtcggctcttgttccgagccacacgggtgagcgtgtagcgattgattgtgtagaagtagtcatggtagggcacgtcgtgggtgaggacttcggcatctatcacgtaacattcactctcctggctcgccttgtacatggtctgtgtctccctgacagtggcagttttgggagccagagggttggtaagggtgatggtgtaaagaatcactcggctc

SEQ ID NO: 478314 - DNA, 1000 bp, Homo Sapiens; identical to SEQ ID NO: 161386

SEQ ID NO: 478315 - DNA, 1000 bp, Homo Sapiens; identical to SEQ ID NO: 161387

SEQ ID NO: 478316 - DNA, 1000 bp, Homo Sapiens
ttaagactggggtggcaggtacaagggataatattcactaggctttggagctttctgggcagacttagtgaccttgccaactccagcagccttcctgtcctctgctttgatgatacccatggcaactgtctgtctcatatgaccaacagcaaagtgacccagaggtggatagtctgagaagctctctacacacatgggcttgccaggaaccatataaatgatggcagcatcaccagacttcaagaatttagggccgtcttccagctttttaccagaacagcgatcaatcttttccttcagctcagcaaacttgcatgcagtgtgagccgtgtgacaatccagtacaagggcatagccagcacttatttggcctggatggttcaggataatcacctgagcagtgaagccagctgcttccattggtgggtcgtttttgctgtcaccagcattgttgccatgacgaacatccttgacagacacgttcttgacattgaagcccacattgtccccaggaagagcttcactcaaagcttcatggtgtatttcaacagactttacttcagttgtaacattgactggagcaccatacagggtttgagaacaccagtctctactcagccaacagaaacagtaccaataccaccaatttttgtagatatcaaatgctgctgtgtcaaggttgcagccaattttcataatgtaagtgttgacttctttaacgatttcctcatatgtcttctggctgtagggttgctcagtggaatccattttgttaacaccaacaattagttgtttcacacctagtgtgtaagccagaagggcatgctcatgggtctgtccattcttggagataccagcttcaaattcaccaacaccagcagcaacaatcaggacagcacagtcagcctgagatgtccctgtaatcatgtttttgatgaagtctctgtgtcctggggcatcaatgatactcacgtagtacttactggtctcaaatttttgt

SEQ ID NO: 478317 - DNA, 1000 bp, Homo Sapiens; identical to SEQ ID NO: 346238

SEQ ID NO: 478318 - DNA, 1000 bp, Homo Sapiens
cagtaggagcaataggattttaataaacagaacccatcccaaagccatgactacgacagttgtacttgcaccaaaacagcatagaaaaccagagtgtggtgggaggacccgaagccggttgggggaggatgtgagtaggggagggaggctgaaggatcccccctcaggggagaccctgtactgtgtaaacgaagcctgtccagttctcaggggacaatactgatggcagccaaactgggcaaggatgcagtgtgggggcggagggggcatgacctctattcaagttctgtgtcttggcccctggctgaggtattgagtgtgaggaagggaacactgggctgcaggagtgggtccaactgtccaggaggctgcactaggagatgggtggacagagcacttaaagggaccagggccaaattcaatgctacatttagagagaaaactgccccctcttcactccagcccagtttggcttttggggtgcgactttagaaatcttatcagtgcagcccccagctcaatcccatctttcctccctgctgggaaggcagggaccaagccccagtacctattcatctctctctaggtcagagcttcttcctcacactggaggggaagcctgggtcccgagtagccacggtcccttgtcggccctgcccctcctaccatctttggcttcagatcaggagtgactggggcagtgggtactcttggacataacggaaggtggaggcagatagggagcacagataaactatgggcttggcggcacaggaggaagaacatggtccctccctccatatacatgcaaacacatgcctgaaacacagtggacatactagggctgtggttttgaaatgggcaggaaattaatttgtttcttcccctaaaggataaaacgcttacttaaaaattcatgacaagcctcaaagttcaagggaaggagagccagggcaggaatgaccacaggctctgccctcccaaaagaagataaaagaaa

SEQ ID NO: 478319 - DNA, 753 bp, Homo Sapiens
tttttttttttttttcttgttcatttgccagggacctgcctctggagagtcctggaggaaaagatctcacagtctgaagtcaaggatccattccttagaaactcctttggggtgtgtgtggatgaggtccatcctccacgctcacagcccactgaccgctggttcctcaggcaagattcatgggttttgggctcatcttcaggcttcgactcctctaatgtcagattttccagcccctttccttgtgaagtgaactgcacaagaaatgccgatgatgagaaggccaatgatgatggaggcgatggctacccacttagcattccgcccaagccgcctggctccttcgtagtctccatcgttgtagctgttcagagacatgatggaaaagaccaaagccacgatgttgatggggtacgcagggcaaaaacacgagacgatggtgagccacaggtagttcttgggcatgggcacgtcctcctcggtcttgtcatcttcagtgttggcctcgggactgctgtccaaagccctcttgaagtccgggctaggggcgtactgagacatgggcgaggccggcggcgccgggagggcggaggagcgcacggtctgtgtggtctggggctctggccgccggcttgtggcgaggctagactcacactgagaagtctggaataaaaggaggctcagggaaggaggacgcaaaggcccattaagttccaaattggccagcccgtgggctgaagatgaccagctcat

SEQ ID NO: 478320 - DNA, 677 bp, Homo Sapiens; identical to SEQ ID NO: 346239

SEQ ID NO: 478321 - DNA, 1000 bp, Homo Sapiens; identical to SEQ ID NO: 161388

SEQ ID NO: 478322 - DNA, 1000 bp, Homo Sapiens
ccagtttgattcgtttattgacaaatcaaatgaaaaaaattcacttaaaagaagggtatgtgatcacaaatgtagctaacagggggaacgcatacagcaccagggagggagagtgaggctggacataccattacagagaggaggaagagaaagaatggcgcggggggcggaggaaagagagcacctgccaaaaatcccacactttccacttctcagctatcactcaatcatttttctggacagggttaacagctagaaatggtttaagggcaacatccaggtagtttgtctggaagatcagggagatgaagagttggagagaatgtgggtgtagcattttgaaggattctccagcttgaacctgttgccagaacccttttcatggtgaactgggagtcaggaagcttaatcctggtctcagctcagccatgaacttgctgtgtgactttgggtgaatcattttccctctgtgatcctctttcctctgctgtaaaacaatcaagttggcaagttctccactggctctagcactctgcaatgccaagcgttctggcaacctgggctagaccaggagactggctcagcttccggagaaatgaaactactaagaaggccagccagagtgacgtggcactggccttcacctggagcccacttccttggcagcggcagcaattcagagggtgagtgtacgcgcacacacctggaaggaactcacactcactgcaagggtgatctctgcaaagaatggctgtgagggagcctgggttttgctctacacagaaggcaggtccacaggactcggggggtgatacagatgaagcaatcacacaatctgtagggtctgggatgcaggatacagtggaggtagaaggagcagaggactgtaggctttgggatggggttgggaggggttgggaggtagagccatgccagcacttcaccgtgtgccactcctgttgcagacgccctgcccccttaaaacagaggccggggcccc

SEQ ID NO: 478323 - DNA, 525 bp, Homo Sapiens; identical to SEQ ID NO: 346241

SEQ ID NO: 478324 - DNA, 858 bp, Homo Sapiens
tcttttttttttttttacttttttttttttggcaattttataactttatttgatgtatctgacgatcagggattagttctcatccacattgactgtctgtagatttttgaaagtggtaacagttacataggtaaccaaagtatatagcttatttggtgaatcttcatcctcattacgttttctggacagcctcacatggattcggtataggacattccttattcctttggcccagacagctttgttgagcctggtgtcaatgcgcacatctggagttcccatctccttcatggcaaatttccgaatctctttgagtgcccaaggtgcacgtttcttgaagcccactccatggatgcgcttgtgaatgttgatggtatattctcgggttaccacttcgttgatggcaacggcccgttttcttctcgccacccttctttgcgggaaccattctgccgcgtccaagttggaaaggcggggctttttcaaatgtacactaccaccaccctgaggttctcttatacctccccaagctctggccacctggttggagaactcactctgtaaccccatgttaccccatcctttctcagtcctatgagaaggaggcatgtagccttctgggaattcctctgatggcttcactttgactttctcagcaggccccaggccctcacagatactgactgccctcttgataacaagcctcccagcattcatttgccttgtttctgggacactgtgacagtcaaaagctgatccagtcgctaccgacctcaagttgatacacaattcgcacaagattccagaaatgacagatctggtgcatgctgccttttctctctgacagcctttcctcat

SEQ ID NO: 478325 - DNA, 556 bp, Homo Sapiens; identical to SEQ ID NO: 161391

SEQ ID NO: 478326 - DNA, 1000 bp, Homo Sapiens; identical to SEQ ID NO: 346244

SEQ ID NO: 478327 - DNA, 1000 bp, Homo Sapiens; identical to SEQ ID NO: 346245

SEQ ID NO: 478328 - DNA, 997 bp, Homo Sapiens
agcatttttaaattttattatgacttcatttgtttaaatatatatatatatatatatatatatatatttatttatagctctatgtgcccaccgcccccggccccctccccggcccctagtttttccccctggctttctgtctagtggctgtgtagggcagaaccgtctgcgtgctcttgtctgacactgtctgggtgctgctgttcctcgtgacccttcgagtctgttcaggggccaaggtagagcctgagtggcggctggtcagtggagagcgccgtgacttgtagggggctggggagggcttgtgggggcctgcatgggcctctgtatgggcaggctcagggggcaagcccacttcttcctcctccacctcctgctcaccgtccccctcctcatcgtcacagcacagagcatggtagagcactttgtcactgaaccgcaccctctcccgtgtccctggggtccgctggggcagctggctcttcaccgtggggccagcaccaaaggcctcctcactggaggagtctggggtctccactcgtggcccattggggatgggcgtgccaccattcatgaggcggtagtcagggccagcccctggccgagtcgactcgggaccatccacggagtccgagggggtagagacgtccaggaaggagcagaactcccagctgtctgagaggatatcggctgtcatgaagtccaggtggcccaggtcaaaggggccacccatgcccgccttgtcactgctagaggtgctgctcacagtggccgtggtccagtcgtccggctccagttcaaagtcgaagtccgaggttagcttatcgatctggctcaccacctccctcagctccttggccacctccttgagctcgcgaaggatgccctcaagctgcccgatgaccatcttcatgcgctgtcgaatccgctcccgctcaccaccactgctggggtcgtcactgggctgcccgaggtccggggcgccccgaatgttcat

SEQ ID NO: 478329 - DNA, 1000 bp, Homo Sapiens; identical to SEQ ID NO: 346246

SEQ ID NO: 478330 - DNA, 1000 bp, Homo Sapiens; identical to SEQ ID NO: 161392

SEQ ID NO: 478331 - DNA, 1000 bp, Homo Sapiens; identical to SEQ ID NO: 346248

SEQ ID NO: 478332 - DNA, 1000 bp, Homo Sapiens; identical to SEQ ID NO: 346249

SEQ ID NO: 478333 - DNA, 1000 bp, Homo Sapiens; identical to SEQ ID NO: 346250

SEQ ID NO: 478334 - DNA, 1000 bp, Homo Sapiens; identical to SEQ ID NO: 346251

SEQ ID NO: 478335 - DNA, 1000 bp, Homo Sapiens
tcactgacttcccctcgctgtgtgtttcacacagtaatacacagccgtgtcctcagctctcaggctgttcatttgcagatacggtgagttattggcgttgtccctggagatggtgaatcggcccttcacagagtctgcgtagtttgtgtaaccactatcaccactaatgtatgaaacccactccagtcccttccctggagcctggcggacccagctcatgtagtggttactgaaggtgaatccagaggctggacaggacagtctcagggaccccccaggctgtaccaagcctcccccagactccaccagctgcacctcacactgggcaccacccatagctaagaaggaggctcggtccgaaggttggagaacatccccctgtgtccaagccccttcaccccacaaacaatcaccaagtaaaagtgtcagcaggatgcacctgccacagatgaaagagacaggctctctccagtgcaagtagcagtaggtgaaggtgtatccagaagcctggcaggagaccttcactgaggccccaggcttcttcacctcagccccagactgcaccagctgcaccaggaagtgggcacccatttcagcccctccctgggagccggcagatccaggcccagtagtaaggactggttgtgatggagtggccagaaacagtgcaggtgatgcagaggggcagtgcaggctcttcaggtccagggctgactcctgcagctgctccctgggggagccgtcaccagtcacaggagaagacagacataatgccatcttcttcgtgaacacaactctgcattccccagacaccttagccctgcctgaggggagagctgttagtctgtggtactttgcacagcacaggataaatttcacatccacatcccattttgaccacacaagctcatcctcttcactactgttggccacttgcattcccaggtgagtctccacatgacacactggagggtgtgtgtctcttgcacagtaatacaca

SEQ ID NO: 478336 - DNA, 1000 bp, Homo Sapiens
gcctgtacaaccttttcattggcacacacagagtacacacatatagttcccatatacagtcaacagtataacatactgtacagttcccacagtaaacacatacactactttgcacacatactgtataccctacagtacagcaatacaaataaagggaaaaagttcaaagatggagcatcctaagttttataaaaatatcaactaaaatcttacggttgatggagctgcacaatgtggttaaacctctcgaccttggcttgccccacagaaaccaggggaggggtgagtgaaatttattctgcagaagaggaagagggtggcaggtcaacctctggcatttctaccttaggagtctggctcttgacacttgttgaaggagtgggcaatcttccctcccaaactggcttgagaaattgcattagccttgcctgcctggcttttctgcctgaaatctttaagcatctcggtataaggggcaaacgcagtggaggccagccatttaaatttgaggcttcgatcaagcgtagggtcacactcttccatgtcgctaaaaattttttccaaggcagaactccattctgatattttggcgctgtgagagggacaattctggaagtcttgggccgactttcatggccatcaactccaatgccttcttttgccatctcatccaggtcttcgttggttggttccactgccttctctgccaaaatgtactccacatctccttccttcacgtcatcaaagccctctccacttacctgctgtgccatatgcattatgtctctgacagtgttctttatattttctgtaacaccttcaaacccttcaaaattctccacgcagtctggccaaacattttcccaacagttattggtagtagcctgaccaatgctctcccaggctgtactgacataatcaataacgttgcatgtagtgaccgacttccaatagtccagcatggtggtttccttgttggtcctgagagcctcacaggcct

SEQ ID NO: 478337 - DNA, 1000 bp, Homo Sapiens
ctagtgctgctcgggggtgtggccggcccagtaggagttggagggcggcagcagaggcaggtggtcctggcgggggcggccccgcaggagtggggagcggcgcaggcggtcggcgtcctgcagtgactggggcagcccccggcttcggctctcaggcagcagcaggacacacagcagggcaaggacagcaagggaggcgaagacgacttgttgcaggaagaagccctgccggccgtgcagggtgtccagggggccggctgcctggcccaggaacccggcccccagcaccaggcccagcccggcccccctgatcaccgtggggaagacctcggccgcgaagaggctgctgagtgcggacacagcccgggaggccaggagccccaggacagagaggaacagcacagtccagcctggcagatactgggccccagcgaggagcagcagggatgccaggcctgtgaccatggtgcccagcagcagcacggggcggcgtccacagcaatctgccgtcaggagcaggaagaccaaggctgccgcctccaggccggcctccaggaagtagggcaggtagaaggtcggcacctgaggtgccaggctgcggcggaagctagctctgatgcctccaccaaccagcgagctgaagcccaagataagcccgtttctccaggtgactcgggtacgcagaagccccagtggggagtggtaccggggctgggggctccgtgcagacagcatggtcagctctgtagccgcagagatgtgaggggaggggggtgaggagctgtgcctctccgaagccctcctccagtacctgaatctccctcctccctggtaggcgcctgacctgtagccagggagttctcctccaaggaactgtccccggggcccacgccactggcttctgcaaagcgccacaggatcttcctggctcgagctacctgacctgtggccagcagccagcagggagactcggggaacagggccgggaacctgcagcgtt

SEQ ID NO: 478338 - DNA, 1000 bp, Homo Sapiens; identical to SEQ ID NO: 161394

SEQ ID NO: 478339 - DNA, 1000 bp, Homo Sapiens; identical to SEQ ID NO: 346254

SEQ ID NO: 478340 - DNA, 922 bp, Homo Sapiens
tttcaaaaaattgagctttatttacatatcatttgcataaactggtaatttaacagtatgaataaatcctagggcagaagacagtttggagaccccagggcacaagtgctgagtttggaagatttggtactgtaccctttgaagccctcgcctggtccccgcaccccttgcctgcctgttaagaagagcccgtaccagggagcaaatcaggggcaaatagcccagaagcccagtagtggacagacctccatgcctggaggaggaggccacctctgagagcaggaggagctgcccgaacccttcctcacagcctccttttcctgctctcaacacctccagcttgcagatagacagccccagcaccggcagaatgaaaaggtcctgaggcagcagggctgtggctctggtaaataaaagaggtctctctttagtaaggtagaggagctcagactgcacaccctggtctctgacaccaaggctcgctccatgcccaggactaggggcagcgtgggagctgctggctggggccatgctcgcaacctcttctctgccacgtctatctccagcgatgctctcagctccagggctgagcccagtggctacggcaggtggcatgaggtctggcagcttgtcgctttgctggtctttggctgtatcggtgcagggcccggaggactctggagctacctctagctgcagcactgcctctggatggggacttccccatgctgtgggctgtggctccatagcgggcactggaagttcctctctctctgcacgtgcggcaagagctgctaccgttaccccaccagaaatccccttcatgcagagtcaatgaggagaggaagacggacacagaatctgtagacaaagatgacgcagaggtggcctcggggatggcctatgtgatgggttgaatttg

SEQ ID NO: 478341 - DNA, 1000 bp, Homo Sapiens; identical to SEQ ID NO: 161395

SEQ ID NO: 478342 - DNA, 1000 bp, Homo Sapiens
agccatggcaaaagcagtttttttaagcttagtcaagttgaagcagcgggagtggaggaggatcagagaaacctctgtagttgtgattggttccttgtcgcctccactgcgtacccgctgagctgggctttgggcaggtgagcagcacagaggcttccctcctcgtccctccccatgtcccgctgctgctggcccagccgctcctgcagtgcccgcagctgctcgtcacgctgccggatccccagctcccgctcctgggaggtggtgaggtgcgaggcctccacgcgggaggacaactcgtgcaggctgctggagaacttctccatctggtggatgatgctattcagggaccgcgtgtgggaggtggcactggtggccgcatcgacctctcggtccttcagcagctttagccgctgcagctgctcctcgtggtctctgcgcatgtctaggatggacgcccgctgcagctcccggagccgctccatttcctggtccttctcctgcgctatggccgccaagcgccgctggtgctgggccgtaagctcagcacgggcctgttcggcctcctggcactgcgacagataccgagctgacagctcttcgttctctctccggagccgctcctcccgttgctggtacgatgtttctagcaccttgatgcggcttctgtgtgcactctcgatgagctccaggtctgcctggtgctgctgctgcagactccccagcagcagctcatgctgggcccgttctagctccagcttccgcacctgggcctccagctctgccagccgggcctggctatgcagcagctcggcctggagctcagcggggctgcactgaagttgcacctgtgctgccaggagctgcttctggtattctgtgctcggcagcaggctccgggccagggactctgggagcaggggctggacgggcacggaaggctctgtgggtttctgggtgctcgggaaacacgtggcaggctcagtggctgagaggtctc

SEQ ID NO: 478343 - DNA, 991 bp, Homo Sapiens
ttgagacaaggtctcactctgttgcccaggctatagtgcaatggtgggatcttggctcactgcagcctccgcctctcgggttcaagcaattctcccacctcagcctcctgagtagctgggattacaggcgtgcgccaccacgcctgcctaatttttgcatatttagtagagacaggatttcaccacgttggccaggctggtctcgaactcctgacctcaggtgacccacccaccttcgcctcccaaagtgctgggattacaggcgtgagccaccgcacccagccttgctaagacatttctaacagggattgcaatttgtatttataatgtattcccaagttcctcacatagggtgacaaaccccgtgggccgtgcgacactggcacaaaacagaagtcagggctactcaccaatctgcccactgctggcccagaggtgacctggcccatttgctccgacgggcctaagactccgtgggatggctctggggaggtgaccctcctttctctggattctggtggaccggtggcctcttgctggaagccttggagaccagcctccccgctaacactatcgtatgcctcctctccaggcagttcctgaggaggactgaaatacgggtaagtcgtatctgcagcactgatttgcccttccggggatgaagtttctgtatagtaatattcctcttcgctttcagcatctccataggacacagcctcctcttccccttccactgctgcttccccttctgtctccacctccccctcttcaattgcagcttccgcttgggttgtgacttcctcaggatgctctgtgctaccgacagcttcttcacctttctggccatcatccttctctggtggtgacaccatgtggctttcattattcccttccttctctccctcagaagccgatccatcttccggatgggaccggcccgccgcgccgcccggttccgccatttcccgttgctaggcgacgctgtcaacat

SEQ ID NO: 478344 - DNA, 1000 bp, Homo Sapiens
tcagcataggatgggcacgccatcagccgtcaccaggcgcccggtggtggggtcgtaggtgcccgccaggtagtagaggtcctgccggtcctggcacttgcggctccgggccatctgctcatactgctcgcgcgccacgacctggcacttgtgggagatggtctgcacgtcgttctcatcctcgtggcaggactggtacagcgcattcttgccgtcgcactgcctcttgcccagcttggtctcctcagggtggtagaaccacttgaccttgaccaccatgttgctgccccacgactcccacatgctctcgatgcggccgatgtaggggaggttgggccgcccagctgacaggaagacggcacagtccccgacacgcagggtctcctcgccccgcacgatggccttgtagaacagcttccgggccttccccttcatgccacgccgctgtgtgggattccccgaccacttccagagctgccgggcgggcaggaaggctgagatctttggccggttttccacggagggcggccgctgcctccgggagagctctttggctttggagaagctcagggcctctttgcgcttgagcttggatttgctgctgctgctggggcctgagcccgcaccggtgccagccaccgtggccctggacaggaagcagcgctgggcatgcgcgtgagggccgctgcccttggagcgcagggcctcgggctgggccaggagggtgggcacggggtgggtgaggcaggtctgcagcagcagagccgggtcctcgtcgtctgagctgtaggacgagtcctcgttgtcggaggagcagaggctggaggtggacacggagcctgaggaggaggaggtggacgagccagaggaggaagaggacacggacaggcgggcgaggaagcgggagggcacgccggccgccagccccggcccgtcctcgtcctcgtccgagaaggagctgtggcagtcgctgtcgtagggcagcgggaactctgcctgg

SEQ ID NO: 478345 - DNA, 1000 bp, Homo Sapiens
aagcaatcttctagcctcagtcttccaaatatgtgggattccaagtgtgtactaccatgctcggcttcatgcttttattttctttaaaaatggtcaatatcaccatgagttccttcttttggaagccagtaaatgtctaaatgttttggaagagtccagaggagaactttgattttgttcttagcgccgttgtcattcaatcaggaattctctcgagcagaccctctagtggcattcagtggatcccagaagagatttagcctttgattatcaattgtccattttccttgcttccgagtcaggaaaagatccaaattgcaggcttttttttaacctgatgtcactctgggtatctgatgttcaactgctctggccgcgtcccgcagtccggccctcgctggctgcgtccgtccgttggtcccacgagcctcggaggaaggagagagatgtccccgcgaccaggaccggctctcagcgaggtgacgggaaggactcgagagaggagccgaggcggcggcggccgttcgcgccgcctatgctgccgattccccgaggcggaaggtgtccgcgaggccgtgtcctggagattgcggcgcccgaagcgcagcgctcgcctctggagcggaggctgagcgccgggacgcggcgggctggggctgcaaggctgggctggtgacccgcccggcgcggcgcgaccgcgggctccggccccagcccaggcacgtgcgcccaggccgcggggaggcgccggcgcctcccggaacgcgctcctggcctgcgagtgctgcccgctcagtctccgggtgggaagtgcgctcgccccggaccgaggggaaagcccaacatccccgggatggaacagagaggcggccacccgtgagtgggcgtgacccattggttcccttgcgcagcatctgtggagaattaagctttcccctcctctcttgccagccgttgttcctaatcttgtcttttttaagggaggaaagcaggagaactc

SEQ ID NO: 478346 - DNA, 1000 bp, Homo Sapiens; identical to SEQ ID NO: 161396

SEQ ID NO: 478347 - DNA, 1000 bp, Homo Sapiens; identical to SEQ ID NO: 346259

SEQ ID NO: 478348 - DNA, 954 bp, Homo Sapiens
ttatttgaaatttcctgttatgttcaaggtgccctccagggtggaggtaaggccgaggacagggaggggcaccccaacggtcggcccccacccgggctcctggagccaacgcgctggggctgccctggctgtgaggacccccacccctgccctggctgccttcttcctgtcctcgaaagccggagacccgcagggagccccggagccgtcagtcacggaggggaaatgagtccccactcgggatgggccacccctttccagccggacgactcctccccaccagccctgatcacccccgaagcacccgtcggctccactgaggtctccccacatgctccaccggcgctcagcacacagcaggtgcctaataaatgtcaagtgcctgcatgcccttgagcactgactcatccgacttgatccccgaaacagggcctgatgcgttacagaagaggaaactgaggcccagagagcccggtgcgttgcagaaggggaaactgaggcccagagagcccgatgcgttgcagaaggggaaactgaggcccagagagcccgatgcgttgcagaaggggaaactgaggcccagagagcccgaggcgttgcagaaggggaaactgaggcccagagagcccgaggcgttgcagaaggggaaactgaggcccagagagcccgatgcgttgcagaaggggaaactgaggcccagagagcccgatgcgttgcagaaggggaaactgaggcccagagagcccgatgcgttgcagaaggggaaactgaggcccagagagcccgaggcgttgcagaaggggaaactgaggcccagagagcccgaggcgttgcagaaggggaaactgaggcccagagagcccgatgcgttgcagaaggggaaactgaggcccagagagcccgaggcgttgcagaaggggaaaaaaggcggcctgaggccaactttctgcccat

SEQ ID NO: 478349 - DNA, 1000 bp, Homo Sapiens
ttagtatgcagctgctataaacatttaattgtttacattcattgtctgtatttgaaggttcttagcaaatctgaaggctttcccatattgcttatattcatagggttgctctacagtgtgagtcctttcatgcaccagaagttgtgagacagatctgtaggctttcccacattgcttacattcatagggtttctcgccagtgtgaatctttctatgcatctgaagttgagtggcagatctgaaggctttaccacactgcttacattcatagggtttctctccagtgtgagtcctttcatgatatcgaaggctaccggaagaaatgaaggctttcccacactgcttacattcatagtgtttctctctggtgtgggtcttttcatgatactgaaatgcagtagaagacatgaaggctttaccacactgcttacactcatactgtttctctccagtgtgagtcctttcatggtactgaatggaactgaaagaaataaaggcttttccacattgcttacactcatagggtttctctccagtgtgagtcctttcatgtctacgaatggcagtggaagaaatgaaggctttaccacactgcttacactcatagggtttctctccagtgtgaatccttttatgacactgaaaggaaccagaagaagtgaaggctttgccacattccttgcattcatacggtttcactccagtgtgagcccttttatgtctacgaaaggaaccaggcaaactgaatgctttcccacaatccttacattaatatggtttctctccagtgtgcatccttttgtgtatacgcaaagaagaaaaataattgaacgcttttccgcattccttacattcatagggtttctctccagggtgtgttcttgcatgtactcgaaggatcttggcagatatgaatgctttgtcacactctttacattcataggcattctgtcctctgtgcattgttgcatgtatttgaaaggaagagaaattgttgaat

SEQ ID NO: 478350 - DNA, 1000 bp, Homo Sapiens; identical to SEQ ID NO: 346261

SEQ ID NO: 478351 - DNA, 1000 bp, Homo Sapiens; identical to SEQ ID NO: 346263

SEQ ID NO: 478352 - DNA, 1000 bp, Homo Sapiens
tcacgttcttggtttctgtccaatatgaattctcttatgtttattaaggtctgaggaccagttaaaagctttgccacattctttacatttgtaaggtttctctccagtatgagttgtcttatgttcagttagatttgaggatgtagtatacgctttgccacattcttcacatttgtagggtttctctccagtatgagttctcctatgtttatggaggcctgcagaccatgtaaaggctttgccacattcttcacatttgtatggtttctctccagtatgaattatcttatgcatagtaaggtgtgaggagcgggtgaaggctttgccacattcttcacatttgtagggtttctctcccgtatgaatcttctcatgtttactaaggatcgaggatgaaataaaggctttgccacatttatcacacgtgtacggtttctctccagtatgaattttcttatgtgaagaaagagttgcaggatggttaaaagctttgtcacattctttacatttgtagggttgctctccagtatggattatcttatgtgtagtaagggtataggggtacataaaggctttgccacattcttcacaaatgtagggtttctctccactatgaattttcttatgtgtagtaaagctagagaagtacttaaagactttgccacattcttcacatttgtagggtttctctctagtatgagttatcttatgtgtagtaaggtgtgaggaccggttgaaggctttgccacattcttcacatttgtatggtttctctccagtatcaatttttttatgtgtagtatgggttgaggactggttaaaagctttgtcaccttctatatatttcaaaggttttttttcagtatgtcttcttttatgtctctttgaatttgaaaattgatgaaagactttcacatatttaccacattgaaatattttgctctgggtagttgtcaaacattggttaagtccattataacctcttttgtgtaacttacac

SEQ ID NO: 478353 - DNA, 1000 bp, Homo Sapiens
ttagagagtgggagcaacggtgtgtgtcagtgccttggtgagatgaagatcagcttcaggcaggctcttccaggcaagttctaagatcccataccgggcaatgcccacgggaaggatggtgcgcacacagttctgccatgggaggggtaccgcaccctggaactcctgaggacttctaggagtatgagaactgccacaaaacaggcagcagaacagccgttccccgggaactagctctgtggcttttagggcctcttcgtagatgatctcttggggttgaggttcctctctcattagcagctcctgaagcagcttctggattctgggggacttaagttggtacaggtccatgagctggtagaactgttccatccaagcagtgctgtcttttggatatcgctgctgcagcatccgcaaaacatggtacagtgccacaaatgtctcccacaaaggcaactcttccttttttttagaaatgggctgtgtcttcttctctaacttgggcagtttaggaaacctgcgtttatccttaaaatcccagaagtccttttgaaacatcagtgccagggtttgtttttccacagaggcatgggcacttggaaaaatgtctctggtggcaggataaaagtattgcatttccatctccttgtgagcaatggatatctgctgtgccctctcacttctgtaaggttctcctagaagatgccaatttttagcccttgggtctggaatcctcttggtagctaatggggacttttgtgtggggacagccaaaggttttggccagctctccttttcctttgcttttataggaggaatcactttcaggtattttggactcatggactgtctacttgagatccttgtgtcttgtgactccagggcctgtctgtgacggtacacaatggcttcatgtttggccagatgcagccattctaagtttccctttgaggcaaggtctttgagcagctggcacagtctatggaaaccatccctggaa

SEQ ID NO: 478354 - DNA, 1000 bp, Homo Sapiens
tcaccgcgcagcctcctcgtggcgacccccgcagccggcgcagccgcatcgcgctgcgacccagtggcacgcgcgcaggggcgcgtagcagcagaggcagggcactgccagggagagcgcggccagcgcggcccagcgcgcggcggggcgcgggtggcccggctcgcaggcgcacgggtccgagaagtcgccctcggcgtccgacaggcagtggtagagcaagctctcggcgcaccacaggcagcttagacggcgcaccaggaggcgacccgggtccggggcctctgcgcagcggccgccacgcccgtctgctctgcgacggaagagcgcgcggcaatgcacgcagcgcgctgcctcctccgcttccggggaggccttggcaggcgcagaggatgggcccgggccggggggtgggcgagcggggggcgctgggggcgcagcctcggtcaaaggggcaggtagtgccgctgggggacccagggcagcgcccctcaacgcgccggtcttggcgaagcgcacgacgcaggtggacagggcgaggggcgcgggtggcccggagcgccggtaatcctcgtagccgcggccgccccaccccaggccccctgcccctgccaggggctctgagggttccggaatccccgtgaacggtagaagcggagggtagctctgagcggaggagcggcggcgctgggggggcgtggtcggcccgaagcctgaagctgactccatcgtgatgatgggggccgcagcggcgctgggaggagtctcctggcggctgtgactggaggaggagtcgctgtccacgtgggacgtcagagggcagggggtctctgcagtatcctgggaaggagaggaggaggaggaggaggaggagggggtgagtgagcctcgacccagtgcggccagcgcagccagcaggctcttctggaactcatcagcctctgcagggctctgaaacgtcagtccaaacttgcagtcacccaggctccagtggtgaaag

SEQ ID NO: 478355 - DNA, 626 bp, Homo Sapiens
aaaaatggccatgcatctgctctttaatgttttcctatgatgtattaaaataaaaacaaagtttcagtctcttcacaagaagtaatttatattctctgaattttttcagccacaacaactggattctcttttctgatttttgctgcagcttctgctttgtaatcatacggacagttgtgcttgtcagagttaacggtgaagtccacaaaacaaatttccacatcggcagtcaaacctgtaagaccaactttctttctgcacatgaaacatctgtttttctttggtttgggcaattcaggagctttttctttactctgagaagtactgggctgaaaaactgatgggctgccagcagcaccttcacagttgtttaagctagtgtctgctctctgtacagatgcagaatctgaggtaggactgttggaaccactagctgtccccattgggctcattctgccactattctgctgcctctgaagatgttctttgtagcaaactgaacacattccatttgtcctaggatttccataaaagccacatcctgtgctacacagcatgggccccggggtctggttagtctcctgagccatatttttctgccaggtctgagttccaaccatccccat

SEQ ID NO: 478356 - DNA, 1000 bp, Homo Sapiens; identical to SEQ ID NO: 346265

SEQ ID NO: 478357 - DNA, 1000 bp, Homo Sapiens
ctacctgggcagaaggttcaagacgcccgattcctcctgtatctcctctgccttggtggccgtgttcctcacagtttcaagttctaagagcatgggcaaaagaatttctgaagacgaccccacagtggccagggggtgctgggctggcatcctcatgggctcctgcgacaccctcttgggctgctgggacgccctggctgtggcctccatctttgagatgagggtctccgagaggggcgatggccgtaagtcctcccacggtgaggcggtcagggggataggcgcctgggagattccttccctcttcagactggcagaggtgggcttggagcgaaagggcaccttgggtggccccttggggtcccagggtggctccttcatctcgccccatggctgctccttcatctcgccccatggccgcttgccctccttcacccaggtgtgcgactctggctgctctctgaccaccactggcttcccctccagtaaggacagctggccggggcgggagggcactgaagccatcattgacgtggccgacgcctgcggagtcgccaagagccaggagggaagtgagaccaaagcggatttcgagggctgctctttggagttggccgtgatcatgagcttggtgagggtgagcgcttccacagagaagggcctgctgtgctcctgggaggggccctcgacggccagttccttggccttgacccatctcttccgctgctccaactccttggatctcacgccaggcaggtccggggacctctcttcaagcttcgcccagtgggcccagtcctccaacttcccctggcccctgaaggcctccagggtcacctccttggtttggctaatcaggatgtccttggactccttcttggtcacggtgaagggcgactccggggacttggcctgagtcgtcatctccaccacgtctgtctcctgggtgcgcaccgtcaccaccggctccggtttccctccagactggcttctctccagc

SEQ ID NO: 478358 - DNA, 1000 bp, Homo Sapiens; identical to SEQ ID NO: 246638

SEQ ID NO: 478359 - DNA, 1000 bp, Homo Sapiens; identical to SEQ ID NO: 161397

SEQ ID NO: 478360 - DNA, 680 bp, Homo Sapiens; identical to SEQ ID NO: 346266

SEQ ID NO: 478361 - DNA, 1000 bp, Homo Sapiens
ctaggccctgctgggagctgaccctgggactctgaccggagaccctgtgtgggcctggcggcgtgctggcgtcagatcctgggctctgtccctggtactggtgacagtcatgatgctgtctacccactgggcaaagggcagagtaggaagctgggtgccacccctacctcggcgggctctgccctgggcatatgcctgtgtgcccccacctggcctcccactgctgtggtgcctggcagggtgcaggatgggggcctcatgtttcccctgatttcctgtgttcccgtcattctggccttgggcatccccagggccccctcccaggaagaactcgggggtgttgagccctggctgccgcatgagcaggtaacacctgggcaggtggaaggcagccaggatgcccaggacacagagcaggagggcgcccatctgcacggcgggcctgaggaccacctgcacattggccaggaggggcacaaaggagacccaggtgatgaagtaggccagcatggcaaaggtgaggccacgggcacggttgtagcagcccggctggctccgcaccaggaaagtgcccaggaagcagagaaaggccagcgtggcattggtggcgtgcgctaggccgaagctgacccaggagcgtgtgcggcagtgcaccagcgcctccgtgggcagcatgtgccagtccgtcaccacctccggcgggaaggccaccaggtaccaggtgcacagtgcgacctccaccagcatggccagcagcaccaccagccaggcccagggcccccgcaggcagccactcagccggtctgcccagctcagaggcagttctgactccacgaagatctcggccgcctgcaggaagagtgtgctcaggcagcccgtgagcgggaggtgggacaagggctgctgggccaggcatcgggcagggctgggctggccagggaacaggaggacgctgaggcagaccaggcccaggcacaccaggccaaagcaggccaggggc

SEQ ID NO: 478362 - DNA, 1000 bp, Homo Sapiens
gaaagggacttggtatcattttaatgttgtataagttttgcttctaaaaatttaaatatttctctatgtacagatcctaaaacgccgggaaaactgcctggcagggccagcctcgaagcccctcctgtgggccccgggccagcagctttagcctttcctccccgggagcaggggcaggagggaggcaggggtggaggggacacagggcagccagggggacacagttttgggggcctggctgccctgtttcctgagcaaacaacacgcccacccctgccctgggcctccagagccgcccaggttcccaccactgacggtcagaggcggagcaggaccaggttttcagcagccgcggatgctggcccgagggctcccttggagggtgctggtgcatccacactgccctcgtggcccacggagcaggcgccctcgggggtgccccgctcctcttctgggggtccctgccggcccaggccctgcagtctctgctgccgctcctgggcctggcgggcccggctggcaatggcacgcacgcggctgtggctgcgggaggaggagcgccgcacaaaaccagggccccctgccaccccctccccagccgggcccaggctggtgggtgacgtgatgtctcctgcctgctggaagacagtgagccagcgcagctgctctgtcagggtgtcccgtctcacccctggccccgacacccgccgtgtccctcccgggaggcccaggctgtggctcagtctgcgggagccgccctcaaagctaggggcaaagtcatcagcagtgaggtcgcccaggctcttggacttggcagccacggggcagtcctgcacgcccaccagggaaaggcagccccagggaggccggaaggggaggccagccatccttggggccagggacctgggctgcagttcgtcaggtatgggaggccgctggcctgtagcccgaaggttggggttggatttgctcttggtcacaggtggcaggtctgggcggg

SEQ ID NO: 478363 - DNA, 539 bp, Homo Sapiens
ttaagacttacctgtgtgccatacgtactgaacccatacatatgtgctagcagcaaaaaaaagccactgtatggggatgaacagcaggcatattatatttgacgtgaatgctacacaaacaaaaaatactgagaaggccagtccctggtatctgaaggaatcatagacgcttctgatgaaaagccagaatggccacaggtattcaaatctgaactccaggacaaaatctgctaggaggacaagtgcccacaccaccaggaatttcaggtataaaaatgtactgccgtaaatgccctcggtgatccggttccgctttagggggcggcggagcttactgcagtcggcgttccgccgcttcatcctcccgctggggggccgggtgcccgcgccgccgccgccgtctctcacctcagctgccgccgccgctggcccgccccgcgtcgggcctggactctacccctgaggccggtcacacagacatggagccagcacccggggggagggggtagcacggggagggggggctcggagcctcctcc

SEQ ID NO: 478364 - DNA, 1000 bp, Homo Sapiens
ttagaggcctgaagctaggattccctcaccggtgatgtggagagctagcagcaggcttgcatcaacagcaagaggggagtgcaggtgctttttgttttttgttttggtggctgccttatcagacagagcatctggaaagaagatgtacgagagcgaccacatcaggcagtaaaaagcagacagagacaatggggagaaaaacagcatgatgacacctcctatataaaccaattttttccagttctcagactccaggattttgtcatatggatagtagctctggtccatcatgaagagaatcatgagtgaggccatgcagcagaggatgaacctgttgcctttggtcagaagggaggtggaagccaagatgcaggaagcataggggcagggtagacccttgtatgtggaggggactccaggtgaataaaagcacaagtggaaagaagcagctgacacatagatgatggccaggatcccactcagaagtccatccacgcctaggagcagagcggaggccaagccgaaggtggtgaagacggcaaagtcattcagctcggctcccaatttggagcatatgttgatgtggctggtcattgccctgactgccatgtctaacaggaagctgaccaggagcatccgggaggcatagtggcatttcctgctgaagctgaagatgatggagaagagccccagcaccatgttggccagagataaggcactggtaacatccttccaggaaacctcatttatctgggaatggctctggtcatggctcaggaagaaactggtacccttactctcctgaagccccatggcccagaatgcagggggtatggggcccttctcccatctgagaggtgggcccttgtcactgacgaagggttggcttgagagagaagtagtgccaggaagccctgttgtcccacagtccaagttcactccttctgaagcacagggctgcagctgaggtgcctcaaggtcctggttctgacaggcccca

SEQ ID NO: 478365 - DNA, 746 bp, Homo Sapiens
tggcagatattttttattgtgggaaagataactgagaataaagctatcatgcagatatttgcagagataaaagtaatgcagatattgactggagccttgatcaaactatgcttgaaagccactctaccactagttacacgagccaataatttcccttcgcagtggaagtcagcttgagttttttcaggtgtttctgtgggtttcaccagatccagcaaggaaattagaattactgttaatggatgttaaaaccagtcagaagtatccaaagttatataatttgttaaacaaccatatagatatattttgtattatatttatccttccattcttcctttggtaggaaaattatctcattaattcttatatgaaaggacttaaaattagcaaactttttttgcaaacacatggattccattcttggacttgaggagcatttgacgaacaggctggggaggccttgagtagtctggagccagctcgaagcagagcagagttaatgccactgccactttacacccaattatggcaaaatgctgcccaatgcagttccttaatccagctgagaatggtatgaaggcatagggatgcattttttcagaactttccctggagaatctcaaggggttaaagacctgagggttttcccagaaataggggttgtggtgaagagcccaaatattgataaacacagttattcctgagtaaacagaataaaaagcagataagtgcatgagcaaagattc

SEQ ID NO: 478366 - DNA, 1000 bp, Homo Sapiens; identical to SEQ ID NO: 346267

SEQ ID NO: 478367 - DNA, 1000 bp, Homo Sapiens; identical to SEQ ID NO: 161399

SEQ ID NO: 478368 - DNA, 1000 bp, Homo Sapiens
catttagataacattttatttgttagagcaagatttggcagacttcatttcaacagcttaaacatccaaaacaacaggggacatttttgaacaatctgtaatattcttcttgaatctttctagataaaacacacaggaataaaaaaatgaacatcccctggaaagcattgctgactgtgaagaggtaagctgtaaccactgatgcgtgcacaacatggagaaccccaaagatccaggtggtgccgagaaggaacagaagagcgagggctcctcttgcacaagaccttatgttctcaaagcaactaacttctggtttcaaccctgcagtgtgacgaaaaactttgtatatgatgactccaaaagccaagagattaacaagaatgattaggcatgctggtcctataaaactccaaataaagttgttttcggtgctaagccaacatactttggttgtgccataatatctgtatcctagtgctgccgaaaatccaactaccacggctgggcttagatagccaaagatataaaaattcttgtgcaaaaatcccttgttgtagatgacacccacaacaatgagatagagatgtatgccttcaatgcacatccatgcaaaagcagctaaaaagaagtagtgtagcagtccggcaatgattgaacagaagagcttattagtatttgtattgatcccaacaagaaaaacaagttcagcaagaaataggctacagcaaagatttttgtgaattgttgtcctggtgctttgaatttcactgaagaaccagaaggtaaaaatgcatatggcaagacaaatcagtgaaataattattcctagttgagtgatccttgtaagaatattataatctttaataccaatggaaggaccagaggacatcaaaattgcaaaatgtgtcaggtgattacagcggcatgaggtgtgggtctcatttgagtatgtcagctcacagccctctgaagaccagctgccattcatggtatcaggtga

SEQ ID NO: 478369 - DNA, 1000 bp, Homo Sapiens
catctcctaacaatacccacatgcacatctctgtcatccttcgatcactgagtcttggacttcagggtctccttgtgccagtccacaagggaaccaacccactccatggttttctgcttggcttcctcccagctgtaaagtgacttatatgccagatcttgctgagccttcttgtaagagaaggtgaacacgctatttgacaatgtcactctgtggtggttgaagggcggtcgacaggtgtaaactggcctcggcaggaagctcactatttccagcaggaagccaatccagtacgtcagggataaaggcaggctccaactggaatcaaggcagaggccgaactctttgctcaaggtgtaactaaggttatcatagctttggtgaggcgtgtcatctgagatatagtagaactgtcctcggacacttggggccttcttgggctcccgcagggccctcaaggccagaatgtgggcccaggctatgttgccaacatagactgggttgactctggagaacttgctgaaacttgacaggattccatggttgtttagggcctcatttataccggcagaaaggattgggcttccttccccatagataaacattggtcttacggcacaagtgtacaaggtgccaccgtttttcagagtcagcccattagccgccagcacagccttctcagcaagctttttgctgtgtgggtatggagcgtaccatgtgttttccagaggctcttcttcatgaccgttctgaatgatttccttgtaggaattgggcctggctacctctagggtactggtgtagatgaagattggcactgtagcttggacacaggcctccaacagaagctgggtacctacctggttatgtaaagtcggggtgataaaccttcctttaaaccctgccctggcgtttcctgtggagcctggtggaggactttcacattgacattcatgatggactctgtgagtgacaccgatgacatatatgatagaggcag

SEQ ID NO: 478370 - DNA, 1000 bp, Homo Sapiens; identical to SEQ ID NO: 346270

SEQ ID NO: 478371 - DNA, 1000 bp, Homo Sapiens; identical to SEQ ID NO: 346271

SEQ ID NO: 478372 - DNA, 1000 bp, Homo Sapiens; identical to SEQ ID NO: 346272

SEQ ID NO: 478373 - DNA, 1000 bp, Homo Sapiens
aaccataaaagacaggtaatatttattcataagcaatactgattaagaaatagctctacaaacacaacttacttagaaacagcaagtcagaaataggataaaacaccaagagaaaaagagctgtgaatacatttccaaaatgtttttcttgtttgttttgttgttttcatcttgactagcaccatctgtacacaagaaagtatgaacataaatgtttggataataataaagatttgcaaggcacttaatcagtcattctgggttgttttgtgttcgctttccacagcaatcctacatccacgcccctcctttctcacgaaagcaagagaagagtgaggtctcttttgctagcagttcttatgtacaaacaaggtctttaaggttcctcaaagtgctttttcagtctcacagggcttggacacccctcgggcttcccatccttttctccttccacggtgtttgacgtttgcacctttcctacagaaaacaaaagaaaactcgccttccgctcaacgcccgctccagacttgccaccaaccttcatcctcattcattgtctttgatgccccagcacagagggcctaggggcgtgcaacatctctgaagtcctggggagcgggggaccactaggacaagggtctggctcatctaccggcgcctggaggtgatgtcgaagcaggtgatcatcatgagatgggccttgcagaagttgacacggctctccaggcgctccgtcacacactccagtgcctccaggtactccagggaatccagctcccaaacctgctccaagtcaaattcactgagccacttgttgggatccagcatcagatactgtttggtcgcctccagctccttcatcagccactcgtacttcgcgcggacctcggcgatcctctgctggcggtgttccagaatcttcagctttgcattgaagcacatggcctccttgctggcaccccctcgtcgccgctgcaggcgctccacgtcatcgatttca

SEQ ID NO: 478374 - DNA, 1000 bp, Homo Sapiens; identical to SEQ ID NO: 346864

SEQ ID NO: 478375 - DNA, 1000 bp, Homo Sapiens; identical to SEQ ID NO: 346273

SEQ ID NO: 478376 - DNA, 1000 bp, Homo Sapiens; identical to SEQ ID NO: 346274

SEQ ID NO: 478377 - DNA, 1000 bp, Homo Sapiens; identical to SEQ ID NO: 246639

SEQ ID NO: 478378 - DNA, 1000 bp, Homo Sapiens; identical to SEQ ID NO: 346277

SEQ ID NO: 478379 - DNA, 1000 bp, Homo Sapiens; identical to SEQ ID NO: 346278

SEQ ID NO: 478380 - DNA, 1000 bp, Homo Sapiens; identical to SEQ ID NO: 346279

SEQ ID NO: 478381 - DNA, 1000 bp, Homo Sapiens
gagtgaaaaagacgctgtatttgatttacaatgaacaagatttacaaaaaggggtggggtggtcttggaactgctcccagtccccccggactgggtggggctctagggcagcctgtctgacagaccaggaccccaggatgtctgggccccgacgtaggacttgacctacgtctcacttgacctttgacgtggggcccagcagccgtgagtccacccagagtgccggcacccttggggaggccggtgaggtcaggaaggcatcgtaccgctttttctcctcctcccatctcgtggtggacagacagacataggatctgggaacttgccctgggggccacaggccctcagatcccccaggggcccaacctagggcatggaggcggctgctggtgcgtgggcggaggcggaggccagctgcccccagcgtggcagcgtaaggcacattttcaaatcactggagactcgacagtgaacacccgatgctggttctgcggccggagggagctggggctggggctggtgctggtgcggtgcccggcggtattgctcagaggaagatgctacagtctagacgctgggcgggttccggctgcacccactccggcttggggcgcgttccaggggagggtgggggcctcagccacagccactcggcctcctcccctgaggggctctcaggtacctcaggtacctatgtcccaaggcagcactggagattgtaggtcagaggtcagtgaccttgttctccagtgcagcggcaatctgctgcaggcggaaggccagctgcatcttctgggcggcaggatcctcctccaaggcattgatgatctcgtcatagtacttctgcgtgtattggtagagctggtggagtgccacgagggtgttcaaggagtccgtgtgcgcccgggaaatctctgccaggtgtgtgttcatgtcctggtcgctgacctgcaccatctgccggatccccttgtagtaatcctccaccatcttcttgtag

SEQ ID NO: 478382 - DNA, 1000 bp, Homo Sapiens; identical to SEQ ID NO: 346280

SEQ ID NO: 478383 - DNA, 626 bp, Homo Sapiens
agtcatctatttagtatttactagttttttgttgctattttatcatggtttattatttgttactcattgtaaaattttttgttatcgttattttggtttttattttcccccgatttaaagaaagagaggagtcctcagtataaaaattatacttaatccaacatggttacaaaataaatctaaattacacaatgcaaaggtttttcctttgtttgtttgttttcgttgttgttttaaagcttgagaaaggagctgggcttggtggcacatacctgtagtcccatctacttgggaagctgaggtgggaggattacttgagcgcaggaatttgaggctgcagtgagctatagccacagagcgagaccttatctgcccatgattctgtagccttctcactggtagagactccgggaagttgccttctccgcatctggagcaaaaagaagtccaaagaagattctcttccttcattaccttgaaagccctgttctaaaatcccccaggtctctagaggagtggctcttgtcatctcagagtgggatgaccatgtttttaaaggttgacaggcagctgcccttcagaatcactgagtccatggactgctggttacaacactgagcctatct

SEQ ID NO: 478384 - DNA, 675 bp, Homo Sapiens
aacttttcacttcttttatttgctaaaatagtcgcatccatatacgtgaaaagatttgaccataatgcattcattcattgtggctcttgccatctcgtggcatccaggatcctggctgaaaggttttaccagtgctgctgggagccactgagggtttttcctttccgaagtatggagcagaggcacggcctttaatttgagtttgaactggtggaggcaggagttcctcactggtctctttactaaggagtttttctttttcataaaaatcttggctttttattttgatttcttctctgtgtttttcattctttagtatttcctccatagtaggtggagtctttcttgttcttctaatccaagcttcccattctgttggaatatcccctgtttcatagtctacttcttttttatttgctgcttctacaattcttttctcttgaatagtttgtcctctccagttcttgttctgcaggatgtagtagtatttgttcccgaattggtccgtgcccacgtgctccttcacttcccttgacagcgatctccacaaggcgcggaacaaatcctgagaccaacccatgccgtccactcagtttccagcgctgccagcagtgggacccgcagtaggggtaatgctccagccgccgacccagcccaccgaggcgagaagtcagg

SEQ ID NO: 478385 - DNA, 1000 bp, Homo Sapiens; identical to SEQ ID NO: 346281

SEQ ID NO: 478386 - DNA, 1000 bp, Homo Sapiens
ttttttggtaagtaaattttattttgatcctttgaatggtcccaaacaagcgaacttatttcaatggaagaaaaggcaatgctctcaagaccttggggcccagcacattgttaagctggccaaagctggaaccgttcactacagaatctcacaggtcaaggggccttggaaatattcacagccgagcctcttctgcaggtcctgttcacagccacccaccccccatgaattctgggtctacttctcccctaattccatgagatccactcttttcactttgtttcccagggggaagaggctcaaattgcattctgaattgatctagtatcattaattgcctagtttgtccaatctagaagctttaacggctcaaaaattgcttttctcagataagtctactacgtgaacactttcaggaggtgttaacaggtgttatgaacaaagaaaatgttctggaattaagggaaacattgggttaaacagataaaacttaaatagatttctgcattgcaggccttatgagagcctttaatatgctaatacacacatgaattccccaaaggaaggttatggtaatgtttccccctcagatacaaaggattttctcttctccaggaacaggtctggagttaatgttccatggaacacactttgagacacagtagtctatgtattctaccaagtgtcaagctgtctctcagaccccgacctagagcttccatctttaacacacgtgcatttgggggcagctatttgaaacatttaggacaaatgaagggtttaaagggacagcagccattgaacctgaggccttagagctagaactaaaagattgagacattaggctgtaatggacttcacttgttggaagaaacagagcaatggctgaattttcccatcgctgcagaaagaaacttttagtagaggactgctggttcatatctgaatcccaggagcccagctggtcgatctgttttaaagtagggcacatcacctcact

SEQ ID NO: 478387 - DNA, 803 bp, Homo Sapiens
tttttcctgctttttggctgcaggcagttcaaggcttgcccactgcatcggttcagcttttctcatagtgatctcaatctttgttgcagtcatagttacataacttcactttacatcagtcacaccccataatttcacattttgatgaaatcccttctctccttcaaatccaatgtgcacatttaacaacgtgctatttacttctactcggctaagttctggaagtgaatttttagcatatactgaaatggtaacttcaccttcagtctgatgccagtcctctctacgtggaacattttccccagcatcctttttagcccatatgtgtttccctgttgaacagccctcttgggctaagaatgtattaaaatcagaagtttttcttctacaacagctccagtatttcatcccctcatggaaaataggtactccagaatgatacacacagacttcttctagactctctagaccccgatatgtctttgaacaccctccattcttacatgaggtcccaatcttaatttcatcagtcttgttgctctctttttgttttttttttttttttctggtggagtcttgctctgttgccaggctggagtgcagtggtgcaatcttggctcactgcaacctctgcaaccacaaagaaaagcaagaaagtgcatcttgccaccgctgggatctgccacttctcttgcattcttgctatgtgagaggaaggatttgatcaatgccttttctcttaccttagtgtgcacaccatccactcctcgctacactccagagccagggcagtgtctgtctct

SEQ ID NO: 478388 - DNA, 840 bp, Homo Sapiens
agccccaaaactgactccaaagaaagcaacacagtcaaactgtctgtccctctctcaggacaacgtcaataatatacccactttgggtatttggaatataattgcaaacttcagcctgaggccaataaaactttttatccttactaaaatgctctctggccaggcatggtggctcacgcctataatcctggcactttgggaggccaaggcaggaggatcgcttgagctcagaaattcaagatcagcctggggaacatagggagattccatctctggcaggttcttgagccggaggaataatacaagacagaaggaaaaaatgtgaatcgcctcttctctgtagcttgaattcacctgactgcggcaacgctcaaagtgtagcatcaattcatatggcgaccagttcatttgaaggagttccctggaaccagaaccagaaactatggatcctacaggaaatggatgcagcttcttagagctgtaacatacctttcaaccgattggtagctctcccctgagcagaaaatccacttgtgaatttgaaggtcccagatatttttgcagaatgaagccttgtttcatgtgaaatgcaagacagactcaagtgggtttccgagggtttcttttcagacataagacctcagcaagagccttctaggacaccaccaatgtctgcagagcctggttcagcccggggcttcagatagttttggatgttcccctcagcagactgcaagctttgggcatggtaatgacattctgactggcttctctgctttcaattttcttcccctccaattccatacacatttctgccatggtttgcttctaaaacataca

SEQ ID NO: 478389 - DNA, 1000 bp, Homo Sapiens; identical to SEQ ID NO: 346282

SEQ ID NO: 478390 - DNA, 1000 bp, Homo Sapiens
ttaaaataagatgaattattttatttctgaattctgaaggtctgctgggcttggccaggtgattctcattcttgtggtctcttatgaggtcagtggtggctagggctgaaaccatctcaaagccttcctcactcacatctcatgggtgatcccagctgttgctggaacctcatctgggactatcggccaaaacactcagaacttctccatgtgtctgggcttcctagaagacactgttattggtttttaagtagatcatagccaaagctagagtagcacctggacaagtcacatccacatttatggtatctccttctttgatttgataacttggtgatttatgtttctccctatgcattcctgtttgaaagcgcctatgtcctccaaccatgtactgatagagctgctcaggcacattgagatcagacatacctatcaaattgctgccatgccccaagcagaccatgcccagggccaagccagcagctaaggagtatgactttctgtcagtgcagtattccatttcaggaccaggaggccgtcctatctcagccaacaggacttctgcagtatgtctgtgagctgtcccttgatatacaaggccaatgccaaccactgcagccacttggacattgtgaggaacatccagctctgtggacgttgggggtaagagagcaggaatgcgaatgctaagaagccgagtaatagacatatccatggtgcctagttttgcagcagaaacaccaagtagcagtccaatgcttgtcatttcatggcccttggtcaagtagtcatggatattgagagtcgccagcttggtaaggtgcccattcaaacccagagccatgagaaagccagcatactcattggccaactcagcatgcttgggcttattgtaaacaatccaagctgagtcgatctgggaggcaggagctatcttcaggccagcagccacaccattatgaaagctggcccagcttgtcatgttgggaggcacatc

SEQ ID NO: 478391 - DNA, 1000 bp, Homo Sapiens
taaaaattatgacctaattattaatataaatattcaaagtaaactataaataccagtgggaagactaaaccaaatatagttttgctaagttttaccacatttctcctaaattatgattttataacaagtaggtgcctttaaaacattacgtggtcataaaaatacgtaatttgacatattttcagatttgttaaattaatatgaataataacaaagctataccaactaaaatacataaaaagctagttaaagcaaggtactacaagacacagcaatacacttcaattcatctggggaatctagaattaagtgtcgaagaaaatcacttaattaaattttaatttgaaaatacttcaggtgtaaacatttccatttataactacattatggtcttaacatgtggcaatataaagacattaaaattactatttcagcagtacagaactatctaccttaaaatatgactctgtgcctaataaaatttcataggtgacacaatgtcttttctcaaagtaaatcatctctcacctcttttatttcctagaaatgaggcatgtttctaagccgatatagtaaacatttttccttttttattaaaacagctttgttgaaatataatttacatactatagaatgtatctgttttgacttaaagttaaaagatttttagtacatttactgagttgtgcagccatctctacaatccaactttagagcatttccatcactgtaagattcctcatgcccattagcagtcactaccagcttccagccccagccccttgcaaacattaatctactttttgtccctatacatttatcttttctggatgcttcatgtaaatggaattatacagtatggtaaacacactttttatctagatttttatattcaactaagttcaacatgtatccagaaccaaatgtttaaattttctttctagaagtttgaaaatatttatcttccttgatacttactactccttctgctttctctctc

SEQ ID NO: 478392 - DNA, 1000 bp, Homo Sapiens; identical to SEQ ID NO: 246640

SEQ ID NO: 478393 - DNA, 918 bp, Homo Sapiens; identical to SEQ ID NO: 346285

SEQ ID NO: 478394 - DNA, 1000 bp, Homo Sapiens
cactagaagagaaggtttaataattgataaaaatgtacaaaaatattcaaatcagaaatgctttagaatgtgtaccacgaagtcaatacttctcagtgagtagggaaggcaaaatacttcctcaatagcagggaaaaaaaagcaagagaaagactgaatttagaaaaaaaagacaactgttaaagaaaatgtttaagtcaactttttttttttttttagacaaggatattgcaactatcacttaaagtctggtggcacattctttagtaggtccttaaggcaatatatttaaattaatttacaatttgatttgatgttaaagtttttttaaacatcacctcaaaatagatgctcaaaataatgccctcacaatagcctttgtaaaatgtattcagatgtttgataaaaaataatggtggctttatattacagtagtgctcattagcaccactataattaagggtctaccaagtttccagcaaaaccacctgtttcttaggagtttcaccataaaagatcacattggctttaaccagttgggtagcgcacaaaaaagcaatttttatcagttgctggtgctttttttgtactactatattatcaaaaaatttttcattagatcttcaaaatccagcttctataaagtaaatcaaatcacctcatgacttagattttagaacaaagtagagacatctgcagttatcagtaaattgccacctttaatccatcctacagtgccctgtgaaagggtcacagaaagacagttatgactgtatgaaaatatgattcttgatacagaatcaaaagttactttcaatttcctttgcttttataaagtccacgataacaatacttaaatgcactttttttttcctgtgatataattaaaacccagtgttatttcagttgaacttaaaatagagtccctggtctgaatcagactttaaatcatactgtaaacatatatttggtataatttattgatcatcatccagttgct

SEQ ID NO: 478395 - DNA, 1000 bp, Homo Sapiens
ggaatcatgcaaccctcttatgactgagataccgtcatgtgccacttatcaatgctgtctctccagaaaaccattcaagacgcttaaaaaaaatcagacttatgataaatatacataaaatgaagacaccaactgctatttgacaagactactggtaatgtctgtgctatgtgaaagcacctttaaaaagagcctatgcagcaagagataagtgtctaaagattcaaaatgaatcaacagtattggataacaatataattctcaactcagaagctgcctcaagattgggtgcatcttcagttaatgtaacaggaaaaaaaggtgacggattttattttattaattgtatccacttacaaaccgacctaaggtcacccgatgtgtagacacaatgagatttctgttgtttatagtctttaattgaagtgatgataaaggaaataggtctatttaaaaacaaaaccaaacagctatttctgtctagattaagaggtggccccgggtgtgggattcatattttgggtggccacttgtggtgcgacctcgatgatccagggtttgtctatgattctggctgtgcagttgcccttctctacaatcccaataatccatgcttggtggccttcaccatatttgggggactttatctctgcacagaaccgagctgcttgctgatgtggtaaacagatcagaaggccgcctgaggtctctgggcaggtcctgtgcatgaggccgaacatgtttccgcacgccttgctcgctgcagccatcttggccagcaccgggaggttgtgaattacaaatgacacctcgttcctctgctgcttggccaggttctgcacgtggccccagatcccaaagcccttgatgtcagtggccgcgtgggcattgaacgtgtgcatgagtccggcagctgtcccgttgagccttgccatgttcatcatcgcctcctggtaggccagctctacatcttcttgggtgaccactagtttaatcttat

SEQ ID NO: 478396 - DNA, 1000 bp, Homo Sapiens; identical to SEQ ID NO: 346287

SEQ ID NO: 478397 - DNA, 1000 bp, Homo Sapiens; identical to SEQ ID NO: 346288

SEQ ID NO: 478398 - DNA, 1000 bp, Homo Sapiens; identical to SEQ ID NO: 161400

SEQ ID NO: 478399 - DNA, 1000 bp, Homo Sapiens; identical to SEQ ID NO: 346290

SEQ ID NO: 478400 - DNA, 717 bp, Homo Sapiens
aattttttatattaatttttatttctacttagaggactggggggagatactctattctttctactacatagaactgaaaaccatagacaaaatatatcaagcaactatcagaagactctgaaaaattcagaaaagaagtaagactacacagagacctcagtactcaaggaatggcttcgaagccattccttgctctgcactaagacaagcagaggggccatcctacttttctccacaaacaaagcatctgtggaaattgctcttagcaccccccgacttctaactactaagtgaagggataattgtgacagataatattgccagaaaaaaaaacaacctctttttgtatgaaaatctgaacagctccatgagtggtccatataagaaactgcatagaatgttctgtaaacaagaagatataatgctaaatggatatgtccctaccatggaacttccaaatgcttgaagcaaaaatggcaaaacattgtcatttttcagcgtcccattgctgagttgttttaatctcttttgatgtgatttgccattgtagtggatttgtgcttgagcggctgaattcagctgaatgttacatacattgcacaaagtaaagttggtatgtttcttttctctttctggtttttcttcaaagtcatcaggtattaattcagcctcactctcgccatcgtgtacacaggtgaaatatctggatggacacat

SEQ ID NO: 478401 - DNA, 571 bp, Homo Sapiens
ttttttttttttttttttttttgttttatgctgaaaagatatatatatatatatttagaattaggcaactggactcagtttagatgatcccaattttgttggcaacatccaaagcatcgtaatcaggagccagtcaaacatacaccttcttctctccatcaggccgaatcagggtgttgaccttgaccacatctttgtcatagagcttcttcacagcctgtttaatctggtgcttgttggctttaacatccacaatgaacacaagtgtgttattgtcttctatcttcttcatggcagactcagtggtcagcagaaacttgatgatagcatagtggtcaagcttgtttctcctaggagcgctcttccgaggatatttgggctgtctccggagtcgcggtgtcttgggccgccgtaaggtgggtgacgtgcggatcttcttttttttgtggctgcggacacctttcaacactgccttcttggcctttaaagacttcgctttggcttcggctttaggagggacgggaacttccttcttcgctttccgcgctatctgaaatgacacctcctccat

SEQ ID NO: 478402 - DNA, 883 bp, Homo Sapiens
agcgcaccctctgggtaatgccactactcacgcttaacgaggtatcctggggagtgggcagcgacgacgtgcaggacagtgcagccatccccatccttctggttaatgcggcctttccactcgggcttgtgatccattaaccaccggaaaagatggttttctctggcttggatacagagtcgcatgagggcatgaaggggatacggtcctatagtctcaacacttgcaccaatggagatgagccactggactaacttgggcacttgttccatcttctcataaagtccaatgaaaacgtatttctcaaagagacttttcagtgataactctgggacatgaatatttcttggtaatcggtctttttttgctgacagaagcagaaatgactggtgggagaagacagaaaaggtgctcatagtggtgaagactccaacaaggaaatcagcaaccggtgcctggtcttggcttctctgcacaagtcgcagaccctcaaaaaacatgcgagcggcttcgtaaggctggtgcaacctcagcaaggaataaccagctcggtagtatcccttcacgtaggttggatcccattggagacattccttggcagcaacaaatgcctcattccacttcccaaggctgaaaaatgcatttgatttgttgcacagcagcacagccaagtccctcgggggaaccccccactggtataactgcaggagaatctggatggcttcatcgtactttctgatggccaaagagaagttcccattcttaagaacctggttgccggattctttcagcagctcagcgtaagctgtcaggtccatcctgtgaggagacgggggagacgcttgctgccagacccgtgcagggcatgttcaccttccggtct

SEQ ID NO: 478403 - DNA, 617 bp, Homo Sapiens
cttttctttttttatttcttctttttctttttttttttttttttttttttttaatccaaaatgtgtttattgagatggtttcccactcatcttgactcagagtgcttttagtgctgcttcctcctgaaggaacatccttctgtaagccttgcttttcctcctgtaggctggcagaggacagtggagcagccaacacacaaaactaccgtttgtgcatggctaaagaccgtggtgattttatagcatcctgggcatttcacatccatgaagtaggaattggggctctgcaccaggcctttcttcttgtgtttcctcttctcctcttctggagagggatgaaggagatcctttgcgagaggcatgttctcgtgtgggtaggtcgtcactgccggaaaagcatcaataaaatagaagggcttggagatatggatgtcagcagcagcaggatactcctgtaccttcaaattccccttagagctccccagacagctgaggtcccaggggcaggctggtgtgaagcagtccatggctgtggtcagagagacccatatctccatcctggctgcaccctctgagtccatgggaacaggagtataatggttcccttgctgggtcat

SEQ ID NO: 478404 - DNA, 1000 bp, Homo Sapiens; identical to SEQ ID NO: 346292

SEQ ID NO: 478405 - DNA, 1000 bp, Homo Sapiens
tggtctcagacgtttaggaattagaaggctcacaaaagctattttcacagctagctcaacctgcttaaacaatgttaaatgagtaatagtcttttttttttttccttagagataaatagcattttagaaaaaaaaataaggaaaagcatattcccttttgggggcaactgatttggcaaaatttaacgaggtttttaaaactcaacagtcatggagcaccattaaatattcacacaaaaagacccaggcagcttagagattagtatttccttggtcacaagacacctaattgacttgcaacaagacaaaatattcagtgcatctggttggggccaacatggatgatgacgtgtttctcataagcccttttcattgttttctcaatttgcttcagaaaaacttgcgggattcgtccacataaagtgtgcacagtctccaaaaacttcagctgaagggggtaatacatggattgaaagagattgtcttgaaagggaaaatcccgtattgcttcatagagtgctctgaacgttggttgcttatcgtcatggtagacgcctcggtttccatgcagaacagacacaccttcatgctcagcctctctgcagttgcttccgtacatgcagtgatcgggacggtagttccactggcaggggaatacatagagacactctgggttgaaataaaaaataatatttaataaatcctggtctccccacgtgatggcattcttgtacttctggtacagagggtacaacatgtcctcccaagccaggcctgttggaatcatgctgttcttgaactgggtacttcttatccgagttaaattcattaacatgactcctgaattaactcctgcagagccatagaaaggatgcctagcaaagcggctgtaccagccaatcttggggatttcgtgctcaggggccatggctgcaagctgggtggaattaaacagcctcagaagcttccagatgtcatcaacaggtctcagaaagaggac

SEQ ID NO: 478406 - DNA, 876 bp, Homo Sapiens
atcaaagaaaattattttaaagatatacctgaatttgcaaatcagacatagctggatgaagtttccaaatgtcaagggtaaatttttaaaaagatagtttctataccaaaaaaaagcagttcctggtatgtggttgtcttaaagatatgcacacaacttctttctgttcttctgtgcctgaggtgatgcttacttcctctccccttgaatgtgggctggacttaatggctcatcttgtgatgctgcccttggagatccaggatgtcccgcttggtgacagaccagtggaaggtcaggcctggcatggcattgccaaaggagaaagggttctggtggttggtgatccaggtgatatagatggacatcggtggggagaagtcaggcctggtgaccagcggggtgccagcactgggaatgcccccagaagctgtgctgcctccttcaagcagtgggagatgtatccaattcttccccagctgggtgcccatccttatctgcatgatggggctgcggatcctcacggctccaagcagcagcaccttcacctgaacgaggtcctgagagatgatgaccaccttgccagtctctgcatccaccacctgcacaagcccagacacagtgcccttccccatggtgagacctggtaccagcctggaagcgctcaccagtgcaacgttctagttgctgatggagaaaaggatgttggactgaggctgggggctgccctcagaggtgaccagccccagcgtggcccaagcacagggaggatgttggcagggctggtttaatgttgctgctgtaaatagacttggaatgatccccgggccacgactgccatggcttgtggctgcagtgctgctcctgtcataacctaac

SEQ ID NO: 478407 - DNA, 1000 bp, Homo Sapiens
ttccccctctctcacacacacatcaccaccatcacacatgtgctcacacacacacaccctgctggactcccggctttgctgctctctccacttggcccacactgggctctctgtaaaatacactctgctgacaacactgtatacccctctgaatccttaccagaagggggaccaggaagaaattgaggcacagggaggttgagctccttgcccccagtcacacaggttgcaaggagtggagatagggctgcaggttccaagcccagactgcctcccacgacatcacagctgccattcttctctccttgctactctctcctcaaagcaccagccaggggcccggcttccctggtcttactggccttgccagtgctgagagtggacaggtgctcccagttacctgtggcacctccacggcagaaatgaagacgtggaggcagaagatcttggagccattgtagccgaccacaaagccctgcagcttctgccagtgcacagggaagatgctggctttgatgttgaggttgcctcctcccgagaagcagagcatgtcctcacactgggtgttccaggccacactgttggcgtttggttcctgaaaaagcagctccttggtgtcgatgtcatacaccaggcaagtgtcattttcatctaccacggccagcttcttacgggaggcactcatgtccaagcagcgcacagctgtggcctgcttcagcaggacgatagcaaagagattgtccacgaagatcttcaggatctgaggtcacacagctgcacagagaggtgggggcatcagtggagctccagagtcaaggctacagtgagcagtgactgtgccactgcattccagcttgggcaacagtcaagacccttattccccaggaccagggcactctgatgctggcagacaagcccttcttcctggtgctggaggaagatggcacaactgtagagacagaagaagagtcctcccttccaagctctggcaggcaataca

SEQ ID NO: 478408 - DNA, 1000 bp, Homo Sapiens; identical to SEQ ID NO: 346293

SEQ ID NO: 478409 - DNA, 1000 bp, Homo Sapiens; identical to SEQ ID NO: 346294

SEQ ID NO: 478410 - DNA, 1000 bp, Homo Sapiens; identical to SEQ ID NO: 161401

SEQ ID NO: 478411 - DNA, 792 bp, Homo Sapiens
gccttgagaaggaaatttttgcttgcacacaggacaggtttttttggttttagttagccaagggtctacacacttgcagtgataagcatgggaacagggaaggattctgagcttgtctccatcttcctactcatctgaacaaatggcacatacatcatactcatctcctttcttgaatttatgtacagggagtttcttaagttgatctttacaaagtctgtttcttctagctctatgtctatcctggaaaaattttgtgatcatgaaaatgactatcaagatgagacagatactcactatgataaggaagggaattaggcagcattccaaaggaagactaaattctggaactaagataaggtggtcccctttttcatacatgaattcatctttcagagaattagctgatgattcaccaatagagacagatagaatgtcaattttctttagtacctcaatgtcattggatccaatgttaatgaggtcatcagaatcaacattgtgaactatggctgctttgtattctgctctctgtgcatttaaaatctttatatcaaaattacaatcaagtcttctaattaacacaatgaaagtgccagacaaattgttttttactggtggaggcactctgcgttcacaggcattctcaaaggactgagatgtattttcaaagttatatgctaaaatgtctgcttctacaggcagtaggtttaagaatgcaaagagctggacagccaagatggtgtagacttgtgtggctgacagcataagcatccctatggagagcagcat

SEQ ID NO: 478412 - DNA, 525 bp, Homo Sapiens
ttcttatgcataagaagtacagtttattgggagtgccagataggtaaacaattaattacaatattgtgtacgttcaataacagaggaacatgctgcctgagtcttcctgaggacagaaggctgcaaaatgagagcacaacatctgtgacatcaaatgcactgtgatttggcagttaaacaaaatgtaacctgggctagtagaaaagtcatgaattctgaagtcgaaggaatttgtcttttagatcttgttctgctatttctttcttgtccttggctcaatgcataaatttgttgggccttaagtttcttcctcccagtggcacctggaaccccagtgagatggaaccgttcactcccctggaaagggggctgaagccagggagccaagtggtctcgcttagtgggtcccactcccacacatcccagaaacctaagaaccattggcttgaaattctcactgccagcacagcagtctgaagttgacctgaaatgatagagcttggtaggtggagggtcgcccggcat

SEQ ID NO: 478413 - DNA, 1000 bp, Homo Sapiens; identical to SEQ ID NO: 346296

SEQ ID NO: 478414 - DNA, 1000 bp, Homo Sapiens; identical to SEQ ID NO: 346297

SEQ ID NO: 478415 - DNA, 851 bp, Homo Sapiens
ttagtattttctgaagaaacggggctaatgcaggtggaagttactaataccagactgaatgtgtgctcaagaaaagtacaaagaaaatgtagaatgcagaaaggtagaaataaaaactggggtcactgtggaaggatttgaggatattctaggctggacaccgagggctcccgcctgtaatcccagcactttgggaagtcaaggcaggtggatcacctgagctcaggaattcgagaccagcctggccaacatggcaaaaccccatttctactaaaaatacaaaaattagccaggcatggtggtgggctcttgtaatcccagctactctggaggctgaggcaggagaattgcttgaatccaggagtcagaggtttcagtgagccaagatcgcgccactgcactccaacctgttttgctctgtacctgagtgacggcatcagttgtactccaaacctcagcatcaggaagtctactcaggtaacaaacctgcgtatgtaccctctgaatcttttttttgtggtggggagcggggagtgggatgttctcttcagctggttcctcttctggaagttggaaacccatcatctgtaaactccatgtgggacgaagaggaaacattttccaccattgatgggatgtttgctgagcctccaggattgtggtcctgctcttctgcagccagaggctgataaaaagtgaggtattgctgctcacaagagggcattagctgcggggatctgccccgcagaccctgacccaaacgacagatgaataaaacgtacactgacacacagatattctgttttgccagtcctgctgagcgtccgactgcctgcccaccaagagaggtt

SEQ ID NO: 478416 - DNA, 1000 bp, Homo Sapiens; identical to SEQ ID NO: 346298

SEQ ID NO: 478417 - DNA, 799 bp, Homo Sapiens
ttccaacaagaagccataactttatttatgatagaaacagtacaaatttcaaaccaagctgcagttactcctttgagacaccaagaaaagttgctttcagatggttacattgttaattccataatggcacttacaatatcattactgttgttcttcagggcatggactgcctttgctctccacacatttgcttgtgacatgaccaattctatgtccttaacttctacacctgtttcatcgacctcttcttcttcactctccttttgtacagttggagtttgtgtgttttcttgaatgtttgagacagcttcaccttgaacattgaatttctcagcagctgctagttgtgcttgctcagataaatcttcgatcttggcttccccagaaactatgtaggtatccaaagcagggctcttgcagacatttggttttgtgatgacaaaaaggatattcttagatttccggatagcgactctagtgactcctgtaacctgtcgaagacccagtttggacatagccttctgtgccttcttttcactccaaatctgttttgctttactgactggctcttcatcaatttcagctgctgccaccagctgggcttcttgtgtggacgtctgggtggaatcctgttcttcaggctctggtactgattcatcactgtcagattctgttccagaccctgtctcagcctgcggctgcggcaactcctgctctgtagcagggacggtttctgtggcttcacagggcattttgtgcagggaacgaggaaccaagatggtggcagaaagagagtgag

SEQ ID NO: 478418 - DNA, 1000 bp, Homo Sapiens; identical to SEQ ID NO: 161403

SEQ ID NO: 478419 - DNA, 1000 bp, Homo Sapiens; identical to SEQ ID NO: 346301

SEQ ID NO: 478420 - DNA, 1000 bp, Homo Sapiens; identical to SEQ ID NO: 346302

SEQ ID NO: 478421 - DNA, 1000 bp, Homo Sapiens
ttttagattgaataagagaaactttattacatgttggagatctttcaaaatatgaaaaataaggggcaaaaaattttaaaaactggttttacagatacacatgctaacaatgttctacagttacatttgtataaaatacattatacaaaagatttatagattttgcatacataaaaattaaagcattcagatatttctatgatctaacagtgcaatatgcacatacgtggaagaaaatactgattacctgagcaacatttttgtaatgcaaattaaaaatgaatccatcagtgcaccatttaaatacagactttaaaaaactccacctttaccctgtaacactgactagatccttgcttcatgatatttctaaaactaagcatatccttcatattttcaactaggtaattttagaagtagatactttaaaaaagaactaattactaagtagtggttcatttaaataactcttcaggacactgaaccaagcaggtagagtccaggaaaagaaaagctgtaaataaaaagtcctttggaggagataatttaacatgagtcttctaatttttaatgtggccagcagagtgtgtaaccatttttaacatatcttttgaaaatatgaactccataacttcctaggagtgagatagcaaagaaattttattttaaccgagacttcataaaactatcagctttttgtttacttgctaactccaaaattttaagtaaaccaaatgcaatgattctgctgttacttttacattgcatacaagtacatgcgtgcacacatgcagacacacacacagacacacatgtaaagcaacaaattcaaagaagggtgtcaacacaattaaaatccataatgttaaacaataactgtgcttgttagttatacaaggtaatttgcatttgatataaacttaacttacattagtactttttagaaactaaaattattccaaatgtattaaatgcttagaaaattcatttctttcctaaa

SEQ ID NO: 478422 - DNA, 1000 bp, Homo Sapiens
taaatataatctgtaatctttattcttgaccctgcagaccacactcttagggccctcagtttactgccattctcaagagccaacttgttgcattgcttttaattacagacagaaatccacattcatcaaaaactggggatttgaggctgaagagtcagggagccagtctgctggtcagccaaaccttggagttccaaggccagcaggaatttacctgggcttggcccacttagggcacaggatataaacacagagtgcaggtagagtcacacaggggaggccctgcaccaacctcggggctgaggatcaagtcttccctctttccagatacaccagcccactaatttccctttctaatggttcttctccaacccccacactcttgtggctagaaaggagataggaagggaaggaatagtaattatctccctctccagctgctctggttttttgtatgcctctggccaaatgtgaggggaccaaaggtactccccatagcaggtggtgttggaacagtcagggcatgctgcttcccagtgtgggcagctcatcagtggaggaggggactcggtagcaatctggtcaacagctagaatgcaccccatgccaagtctgcacctccagttggccattgagattcacagctgtccaagcctttaaggctgcaacccagaaattacccctgagctcgtttctcctaagttcccagatgagcaccagagtcaacacaaaagttagcccctagtatccagagagcctgggactgccttctgccaaatcccaactttgctcctcatcctcttcccacctccccagatcataggttggttgactccttgaggaatagtaaagtgcgttctgccaaattctagcttggcagccaggccactttgaagcagtgaatttgctgttcttctttcagagtaagacaaaatgcaacactgggtttggccaccagagtttggctgtggctctattattgttttgtttccagttctgc

SEQ ID NO: 478423 - DNA, 1000 bp, Homo Sapiens; identical to SEQ ID NO: 346304

SEQ ID NO: 478424 - DNA, 1000 bp, Homo Sapiens; identical to SEQ ID NO: 346306

SEQ ID NO: 478425 - DNA, 1000 bp, Homo Sapiens; identical to SEQ ID NO: 246641

SEQ ID NO: 478426 - DNA, 1000 bp, Homo Sapiens
ttcattttggtaatatatcttattcaacgcaatatccaaaatattatcatttcaatgtggaatcaatattaagtattattaaggagacattttatatttttgtactaagtgtttgaaatctaatgtgtattttgcatctcaatttggatgcaattttttattggaattatctgatctgaatttaattttcccaaatttacagttgaaaaagtagacctataatcacatgttcattattttacattatctctcgatcgttatcagggatgaagttaattcatgccagagtttccttgtctcctgaaattctattattgttggggggcaggggtcaaaagatgctgactgtgcaaaccactgatgacaaaatgcaagcaggttttgtcctttcccggtaattattgtacacagtaggtgctagccaggaaacaacagcccatgtggacagcacctaatgacaggtccatgggcagaagccaggtgggtaagggtctatgagtaaagtcatggaaaggccaccatgcctaacagcctcatttctggcaccagggaaagttccttgccagaaaacataaggttgagttctcatactctcctccccttggtattgctgggcctggtggggcctcgacttttcttattctttttattcatgttttgatttagggaaggaagagacagctccagctcccttttcttggcatcccagtcttcatcacgctcatccagaggcagccccttctgctgggcagcgcaacggtggtcctggcactcgggctctgccttttccagaaatgccacacaggctttctgtccatagatctgtgcaatcctcttcggtgtgtctccaaagaagtcaggggcgtcgatggcagcgtgcaatgcatggagagttttgagtatattcagatggcctgcttctgctgcaaaatgagctggggtccagcccacactagtaaccaggcagggcctggctccatattctatcaggagccgtatc

SEQ ID NO: 478427 - DNA, 1000 bp, Homo Sapiens
tgtatatattctccagaccctttccaacaactcaagagtcccctgattcccattttaactctcccctcgttggcagccaagagtgtgtgtatgctcagggaaagtaataaaaccactgcagttttttactgggctagaggtgaggcaggccagagaaagtcgcaggggtgagaataagcctgtggaagcgacaaggcaagaactcagcatggagactcttcaggaggcttatagacgccgtgttgtcatccaggacgttcccctgagaggggaatccccggctttgcaacttcctggccagcgtgagggccaccagccggctgtaacctttcctgcgatgttctggcagggtgtagccatggcacatggtggcaaactggtctgtgatggaccaggagaccgggtttcccttctcatcccggacacacacactagggaagcaggagatgaggttggcgatgtaccggagacattgttcattgcctccccgggaccaagtccggttgagtagatccgcattggcaacactcaggtaggttagtcgtggggaaggccccttgaggaaactggtatctggcagagatgaaacaggagaaaaatgaacagccttgaaggaagttagctttatattcaactgctttgaattggcaaccgctttggaaacatcatataactcactctgcagcccttgtatttgaaaaacttggtcccagttaaaaacatcacattcttccaatagctgtcgataagccctgacatccttgtagaacacagcataggcattagtataatgatcaaggttatctgtctcagcctctctttgtcgtcgggtgataacagctttgaaatccggccatgaatccaacaccacttccttttgaaaggggttcccacgatttatgttcatcaccgctccgtaaaccttgagtgattcaggaaagcaactcttcaacattttctccagtatcagtaatttggtagaacagtttagcaccaacat

SEQ ID NO: 478428 - DNA, 1000 bp, Homo Sapiens
acaatttaaagcatgtctttattttataactctactacaatataaatcagctttgtaaggatatgttagctgggtttagtggctcagctacatgagaggctaaggtgggaggattgattgagccctggagatgaaggttgcagtgagctgagatggcaccactgtactccagccttgatgacacagcgagataaagactgtggcagttgacatacttccaggagtgtgcaatcttaatgtttccaagcacaatgttgtccttaatcctcttggcttgctctggcctctgtgggctaccccttggtggtatggatgggttgactgcagtctgtctcttgccttttgaacttgaaaaccatttttaaaatctgctccatttggtaagagatctggagtgtattcactgtagccacctacataaaactgactgaagacattgagaccaaccagtcttcctggggcgataatggatttatttttatgatcatctaccttcagccagccctcttggaagaacttgcccagatgaacagtgtggactccaaggctcagattgaggggctcgctcctgatgcttgctatgccagaccccaggttataactataaaccacactgccattgagcaggcccacagccaggaagtcatcgccattcaacccatggcctttctgtccagtaaaaaatatcaagttattttgcagtgctgagtggttgtttgccagctgaaacttcaggtggaattcataatggaagctgatgtctgagatccgtgaataagccaggaatgaggtgtatccaaaggcatctgtgccactgaaccttggctgagtaatattaatagcatcagtgcagaggggtccagacctcccatatgggcagaggcagacaatatctgttccggattttggaacacaggtggcaccatttccacatgggttgttttcacaacttgcaaactggcacagcttgcctgaatacagccttggacactcacaaaac

SEQ ID NO: 478429 - DNA, 1000 bp, Homo Sapiens; identical to SEQ ID NO: 346308

SEQ ID NO: 478430 - DNA, 1000 bp, Homo Sapiens
ggccatgtaaatgtcttctttagagaagtgtccattcatatcctttgcctatgttttgataaggttgttttttttttcttgtaaatatgtttaagttccttttaaattctggatattagacctttgtcagatgggtagattgcaaaaattttcttccactctgtaggttgcctgttcactctgatgattatttcttttgctgtgaagaagctctttaatttaattaaatcccacttgtcaattttggcttttgttgcaattgcttttggtgttttcatcatgaagtctttgcccatccctatgtcctgaatggtattgcctaggttttcttccaggatttttatggttttcagttttacatttaagtctttaatccatcttgagttaattttcatataaggtgtaaggaaggggtccagtttcagttttctgcatatggctagccagttttcccagcaccatttactgaataggagatcctttccccatttcttgtttttgtcaggtttgtcaaagatcaaatggttgtagacatgttgttttatttctgaggtctctgttctgctccattggtcgatatgtctgttttggtaccagtaccatgctgttttggttactgtagccttgtagtgtagtttgaagtcaggtagcatgatgcctccagctgtattcttttccatcaatgaacatttatattgtttcagtatcttcactgttgtgagtaaatctgcaatggatatgggagagtacatatctcttttatacatggatctcatttcctttggatatatacccagaagtgggattgtttgattatatagtattcttagttttacatttttgaagaatctccataatgtttttaataatgcctatactgatatacattcctatcagtggtgtgtgagggttccttctcttccacagtctcactaatacttgttattttttgtctttttgataaaagccatcctaacagctgtgaggtaatattccatta

SEQ ID NO: 478431 - DNA, 794 bp, Homo Sapiens
tattccttggtgggtttgtgtaatgcccacaataagacaatcttttcatttgtacaactatttgcaataattgaaactataatttgatcctcatttcatgtttcaaagtaaggagtgaggtaaatttattctatgcaataaagagcaagtatagggatttgatatctgcatataggacttaaaggagccaattataacccttctttgtgcctggtgggccaaatatggcatttactagtttatctcctacgctcacttgtaatttttcctgagtaaatccaatccccctttaaatttatggcaatgaaactctctccgaaaccatctccagattttggaagatagctcacccaatacttttgtttccagctttgctgtggagtagtcacaagtattagttaagaaaatcgtcccaccccatgtgtaagtacgttctgaaacagtgtatcataggcccagtgatgtagaggtacccaggagcttcagattttatgactggattcaaccgctggtcataaatgaatgacactgactggaagagaaagattttctggtctggatttgaaattggtgagatgtttcttgggctggttggtctgaggacctgaggttgtaagtggatctttctcacggagcaaagagcaggaggacgggggattgatctcccaagggaggtcccccgatccgagtcacggcaccaaatttcatgcgcgtccatgtgaagagaccaccaaacaggctttgtgtgagcaacatggctgtttatttcacctgggtgcaggtgggctgagtct

SEQ ID NO: 478432 - DNA, 1000 bp, Homo Sapiens; identical to SEQ ID NO: 346309

SEQ ID NO: 478433 - DNA, 1000 bp, Homo Sapiens; identical to SEQ ID NO: 346310

SEQ ID NO: 478434 - DNA, 1000 bp, Homo Sapiens; identical to SEQ ID NO: 346313

SEQ ID NO: 478435 - DNA, 1000 bp, Homo Sapiens
aaggtgagaaaagttcatttttattatgtttccccaagagacccactctattgttctcttgaaaacacacagctcatgtcctcctttagaacacacattctctttaaagtaatatacaaacatgccaaaacaaggtaaaaaattacatctgaattctcacatttcaaacatatatgaaatatcaaataaaaatttatttttacaagaatttaggggaactactacatagctataaatgtaatatatatgttaactaagtatcatagataaaatccatgctcccttcagcagcacgtgtaataatagatacaaagattgaaaggtaaaagatttaggatgaaaagaatcctctcttaaaaaggaaaacaaaattatatgtatgtgtatataacagttataatacccatcacacagctttgtagaaacagcatctattcaaaaataccagtatttccaaaatatttaaaataatatttaatgtaaaaataatatttaaataaataaatatatttaataaatatttaaataaataaaataatatttaaataattctatacccatgtttttcaaaataaaccaataaaatagatagtatatattagacgtgttagtatatatatctgagacatgttaaaaatcacaactgaattctcacaattcagtcacaaacctaaacagcaaataaaaatttctatcaccagaattatgtatttttctggtggggaactaccaatagctataaatagaagagattattatggaagtatcatagataaaaagagtgctcgcttcaggagcacatataataatacagaaacaaatttaaagataataaaatatttaggataaaagaattgtctcttaaaaatgaaaagaaaattatctttatgtatatataacaactataactctcatcaaaaaactacaggaacagcatgttttcaaaagtacaacaatttccaaactatttgaaataaatctatgaataattcaatggccg

SEQ ID NO: 478436 - DNA, 1000 bp, Homo Sapiens
tcatctttttgagaattttattcacttcaaaacaaattcaacacacctgtttacaaaggcattccagagcccagttttcgaggctgaggaaagaccccgagagcgcttcgcacagcacgcttcccagcgtccgaaacactgctctcagggcggggcacagcggaagggctgcacctctcagggttccctaacttttcccttattcagtcatctagagagcaaatacacagtaattccccagtttcctattgacgtcccagcggaagtctgactcctgcgcgtcacgcagtttctgaggcaacgaatctctggcacggaagcttttcctggcgcgtttccggagaaccacgccaactacaacgtccctcaccagaattcaatgaggcagagtccctgcatctgctccctgcctggcctgggctcccacatccacagaagcgccacagccggggagcttcggagtcaccgcacagagtgtgctctctgctctgctctcctcagtcccacagtcccctccaagtcacgggagctggaggccaaggagcccctgccacctgcagtctcactgcaggtcagaatcgctgtcctctgaggaggaggaaacctgaaggtcttcatagaggacgttcggtgggacacgaacacagggaccctcagacttctctgacacatgagggctctgagcgaggaaggctcccggcttctcaggagagtgaaatgagggggccgccaggaggctggagctccagcgtctgttttctagtctccggaagagcactctgagaggctgggccccatcatggctggccgctgggtgatgggacatggtgcaggcctgggcagtaggcaggcaaggtctgctgtgcggaggctgccggtcgacgccgggcacctgggcgggtgtcctcctgcccatctggggcgacgtacttggtccaagttcggttgcggctggcggaggttggagattctccggggcccccagctcacctccctggat

SEQ ID NO: 478437 - DNA, 1000 bp, Homo Sapiens
tcatctttttgagaattttattcacttcaaaacaaattcaacacacctgtttacaaaggcattccagagcccagttttcgaggctgaggaaagaccccgagagcgcttcgcacagcacgcttcccagcgtccgaaacactgctctcagggcggggcacagcggaagggctgcacctctcagggttccctaacttttcccttattcagtcatctagagagcaaatacacagtaattccccagtttcctattgacgtcccagcggaagtctgactcctgcgcgtcacgcagtttctgaggcaacgaatctctggcacggaagcttttcctggcgcgtttccggagaaccacgcgaactacaacgtccctcaccagaattcaatgaggcagagtccctgcatctgctccctgcctggcctgggctcccacatccacagaagcgccacagccggggagcttcggagtcaccgcacagagtctgctctctgctctgcgctcctcagtcccacagtcccctccaagtcacgggagctggaggccaaggagcccctgccacctgcagtctcactgcaggtcagaatcgctgtcctctgaggaggaggaaacctgaaggtcttcatagaggacgttcggtgggacacgaacacagggagcctcagacttctctgacacatgagggctctgagcgaggaagactcccagcttctcaggagagtgaaatgagggggccgccaggaggctggagctccagcgtctgttttctagtctccggaagagcactctgagaggctgggccccatcatggctggccgctgggtgatgggacatggtgcaggcctgggcagtgggcaggcaaggtctgctgtgcggaggctgccggtcgacgccgggcacctgggcgggtgtcctcctgcccatctggggcgacgtacttggtccaagttcggttgctgctggcggaggttggagattctccagggcccccagctcacctccctggat

SEQ ID NO: 478438 - DNA, 1000 bp, Homo Sapiens; identical to SEQ ID NO: 346316

SEQ ID NO: 478439 - DNA, 1000 bp, Homo Sapiens; identical to SEQ ID NO: 161405

SEQ ID NO: 478440 - DNA, 1000 bp, Homo Sapiens; identical to SEQ ID NO: 346318

SEQ ID NO: 478441 - DNA, 1000 bp, Homo Sapiens; identical to SEQ ID NO: 346319

SEQ ID NO: 478442 - DNA, 780 bp, Homo Sapiens; identical to SEQ ID NO: 346320

SEQ ID NO: 478443 - DNA, 832 bp, Homo Sapiens
aatttaaactcccaccaacagtgtataagtgttcccttttctctgcaaccttgccggcatgttattttttgactttttattatagccattctgactggtgtgagatgctatttcattgtggttttaatgagcatttctctaatgaatggtgatattgatcttttttcatatgcttgctggctgcatgtatgtcttcttttgaaaagtgtctgttcatgtcttttgcccactttttaatggggttgtttgtttttctcttgtaaatttgtttaagtttcttatagatgatgaatagtagacttttgtcacatgcatagtttgcagatgctttctcccattctgtagattgtgtgtttactctgtggatagtttctcttactgtgcagaagctcttaattagatcccatttgtcaatttttacttcagttgtgtttgcttttggtgtctttgtcatgaaatctttgccagttcctgtgtccaggatggtattgcctaggttgtcttctagggtttttacagttttgggttttacatttaagtctttaatccattttcggttgattttccatgaagcaaaataatacttgcttcatgggatcattacgattttatagggccaagcattgagtaggtgctcctgtgttcccatggatgcagtcacgctcatttccagtcaaccttgggttgaagaagttgcctgactcagcaagtctggcatttcctcctacacagttctttccagcttgttggcaatggtatccaggagtggctggagaattctgataacagcttactggttggattccaggggagtagctctggttctgctgaa

SEQ ID NO: 478444 - DNA, 1000 bp, Homo Sapiens
ccatgttctcctttatttggaaggaaacaaagatgtatataataaatattattcaactttttgatcctaatattaaagtatagttcattttcttaattgagttacataagatgggttttttttaaaaaagattactttcctcagttcctttattaaatgtaaagctaactgtgcttttacaacaggttatgatagacaatatgatagacaattactgtaactttctaccttgcgtaacagatatttatgaatatgcctccccattcctgttagatactaaagtcaaaaaggatggaaacaacaggcaaagcagggcttgagagagaaataaaactgtattcatctgctgtaataagattaccagttttttctcttgtgttcaactcaaatgtagttttatcattgaatgatggtctccggagttgatgttgattaatacatacataatctgtgaacttcgtgtcagctttgataacatttcacttttcaagaagggttagaaaaataccgtgattcattatgcatgattgccaagtgagaggttaagtgtggaggtatttttccaggaacgcccttgcacatctcacaggcagcacttactcatgattatatgtacactcaggcaagagtacagtttgcaccttgattgtcactcactgtgaaattattattcaagtaagacaaggagcttctttcagcatgatgaatgcttccagagtttgtgacatgacacttagattttttgggaaaaagctctttctcctacttacctaaaacctttcccaatatgagagatttgacggcgttgaattctgtccctgaggacaagatgacttgtttctttgcgctctggttaacctattagatgtcccatgagaagcaaacatcaacacaaagtacaattttaatgataaggaagcaaaggaagatgaggaaaggaaagatgaaaataaatcacttttaagtaccactacaaaagctcaagaagccaccttcaaat

SEQ ID NO: 478445 - DNA, 1000 bp, Homo Sapiens
tcaggagtagggctggtgagaggcgctatgcttctgtctccacctgagactggctcccgccgtgttgctcttgcactccgccttcatctctgtgtcagtgggatggtctcctgagcaagcctctgccttggccttgttctcctcctcagccagcctctcaaacattttggcatagaacttctcccgggcaagctgcctgtggatccgctgctgacccacagccagctgggccctggcggctttgtcgttggggtagagctgcaggaccttctggaagtcagcccatgccagttcaaagtcattcaccgccaggtgggcctctccccggcggaaggggcccttctcgttgttgctgcccagttctagggcattgttacaactttcaatggcagcagagaaggcctgtagtttcagctgacacatggccaggtcgaggtgagaggccagtcgaagggcctgtgccttctgtgcttcctcattggaaaaactagactcatattccagccaggacacaatcttcttacactgtagtaaagcttgcttgtatttgccttccttgaagtacacactgccctgctctttcactatggtgttctgttccagcttctcttctgaaatcatctcccaagattccttggccttttcaaaactcttgagatgtaattcatatttcagctcggcatttggtgggatttggaacttttccttcccaacactgccaaaagcatagctgggcttgaggtacacagtggaatgttctcctttctccaagtgctgaatggccctctccagatcataaggcagatccaggttctccccctcgctaacctcaaagcggagcgcccgttggtcaaagggctggtccttgcagcacccttccagcgcaacctccaccatagcgccctcatcgggcttgacatagccttcaccgcgagtccctattctgcggatgattcccccatcttcctcttccgtcagatcttcttccttaaacaattcc

SEQ ID NO: 478446 - DNA, 1000 bp, Homo Sapiens
cttgcactttgcatttaataatttaaaaggaaaaatttaacagatgataaatatcaaaccaaaaaagtcaacaaatcttaataatctcaaaatatacaagggcaaagtgatacataaaccaatacagaatacatttgtctgcacatttttgcataaattttaaaaagcatataattctgtaattttaattttatagagctttccctaaaatattttttattttatttaaaaatgagtttattttcaaataagaagattaagtctaaaaatcagtgcaaaagattgatggtgatgatgtatcaatgcaatttgatgcatccgtttcgctgtcttgcaaaaggtgcagtgaccaatgggctgtctgtactctcaatacagatgtagtattctgagaagagatcatttgttaagagcggatttaagacagagagtgtattcattctttcaaaaataacacatatgagaagatggaaattcatttacgtaacagtaacgctgaatcaatatattttcagcttgccctgatgtggaagaaatataccatctcattagtccttggtaggcagttggtatctggaatatgaagagcgtagcatcattgcttttatgtaattggtttattgaatccaaatggtggttccatgcattatcaaataaccactgcttcaatattagtccctggaactgtctccataaagttaattccaatcctttgctgtcttagtgtgtatgtaaaccttaatgagacatgttccagttaactgcacatattcaattttgggtaatctatgggaatttggccctatggtcataaacctttgatcagactggcagatttaataaacatcatgtaaatgctaacttaacttggagtgaacagccttcagtttacattccaaaagtgattagatgaaaggataatacacaatgatatttatgcctagagcagttcaaaatttagaaaaggaattagtgatcttcagttaagctatttttttta

SEQ ID NO: 478447 - DNA, 1000 bp, Homo Sapiens; identical to SEQ ID NO: 346321

SEQ ID NO: 478448 - DNA, 645 bp, Homo Sapiens; identical to SEQ ID NO: 346322

SEQ ID NO: 478449 - DNA, 1000 bp, Homo Sapiens; identical to SEQ ID NO: 346324

SEQ ID NO: 478450 - DNA, 884 bp, Homo Sapiens; identical to SEQ ID NO: 346325

SEQ ID NO: 478451 - DNA, 1000 bp, Homo Sapiens
tcacatgatgtcgtccagcaggttggcgctggccacccagtcgagcgcgcgcggctcggaggcggccatgatcatgcacatgaaggggcggccggtgcgccggtccgtggggtagatggtggtgggcgtgaagcgcctgttggcctcgacgaactcgcaaagctgctcgtagacgcgcgggaactcgtggcgcaggaagacgccgcgcagccgcagctcgcgctggatgtggatgaaggccacctcgcgcgcgcgccggcccgcctcgccgtcctgatccaggcccgccgtgcccggcggtggcgtcaggatcagcgtctccatgtcgggctcgcggctccgcgccgggggcggccgcgcggggctgccggccgccagcgctaccttggcgaacttgcgcactgttggcccgtggctgcgtggcgcgggcgcgggcagggccggtgtccccggtggcgcggtgccgggtcccacggccacggacacgctgagcaggaagcactctgccggttcgtagaggcgcccagcggccgccagctcgcgcgcgtagctgcccaggggcgccgcgtgtgtggccagctcacgcagcgataggtaggtgggggatagcagcagcccctccaggccaaagcgcaggaagttgtcggccgagcctggacttgggaagcccaggaagagcacgccgcggccgcgcgacaggaagccgacacgcgcgatgcgcgagaaagcgcggtgcaccgggccgctgtcgcggcaaaactgcagtacgtggcggcacacgctgcccacgcggccgtacacgcagcgcgccttgtgggcgtcccagtcctcgcggcggcacaggcgcgagcagtagtaggtgtagcagctgtggcaggacttgaagtagaggcaggcgttgaacatggtctcggtgcgccggcagcgcgcattggagcaggtcatcaggtcgtcctcgtcggcgctgggttcgggggacgcgtcggccgcctctcccggg

SEQ ID NO: 478452 - DNA, 1000 bp, Homo Sapiens; identical to SEQ ID NO: 161406

SEQ ID NO: 478453 - DNA, 1000 bp, Homo Sapiens
gaaaagatagaattttattggtgctgcatccatgtgttctctgctcagcagccagggtctcccacagtcttgaggacccccacccagcacccagccaggcagcccccttcctctgccacctcgggcccctcaccgaccttcccacctcatctctgactcctcttggctgtgggtccccagctgccccacaggagcccccgggacaaccccaggagcccagccctccatctgaggccaccgaattctccctctgcacctgcacccagggctcccggggaggggctcgcggctctgccacagacccccaccctgcaggggctgctgcactggggaggggcaggcagagccttcgctgtctcaggccagagcccgcagaggccttggccacagtcctttgaggatcaagagtgatgggccttggagcccttgccagcccagcccacctgtgaggaggctgcccatcccctctttgaggccaccctgtgtcctctcccctgcctctgcccagagctccagccggagtgtcttgctgctcagacccctccgaggtccaagtcctgtcctgccactcagctccccctgcaccccagaagaaacgcagggtgcggttgcatttgatttcagataaacaacaacttcttagtaaaatgacctccccactattgcctgtctgaaattaaccgaatgccctgtgttctcatctgtgaatctggccaccctcctacccagccacctgcctgccctccacccacccagactttagcacctccctcccaggcgtggggagtggccgtggtcactggctggatcctcaggtgagtcggagggagcagcaccaggacacgcccccctcctggacgcggtagaagagaggggtcagagggcccgggcgagggcggcacctcgtcctgccctgggcgcctgtggtcgtctcctcatcctgcatctccctggcccgggcctggctcctaggagctggggctggggctgtggctgcggc

SEQ ID NO: 478454 - DNA, 1000 bp, Homo Sapiens; identical to SEQ ID NO: 346330

SEQ ID NO: 478455 - DNA, 844 bp, Homo Sapiens; identical to SEQ ID NO: 346331

SEQ ID NO: 478456 - DNA, 1000 bp, Homo Sapiens
caatgaaaagagtatattcttttattggtttttgttcatacatgttaagtttcaactttcaataataaaattcaataaatttgattccttaatcataaaaactggctttacacattatttacatgttgtcaaagtccatacaaaacatcacaaggatttgattgactctatgcatggtaccatcacacaggaggagggagctaatccagtaacatacattcaaagattaaattgcagatatgcacagtgtatttggcactgttcattaatattataacaccttcctctcaaagacaggcattcttaagcgttagtcacgatataccagaatttgctattcacattaaaaccaccttttaaactttataacagtaaccgattattatagttttaagaaacaaaacacaatgagaactgggaatggaattcaaatcctccaacttcttgctatgctccaagctgccatccataaaacaggtttaattcggtaatttttccattgtggggagtgtcaacaagaaacaatttaaagacagtattttccaatacaaataaagacacatacttttgtttaaaattaccagttcttcttgggagtgcaaagggagccttgatgatgtacaacttgtgatgcttgtggcaggaattatagaacaaccaatgccattcaagttgtggagattgtactagcaggtgaactcataaagagaaggttctggaatgactacatctgaaatcagaatcctagtagtttgtagtttgcctcttcctagaacttcaatagactcaaatcataggctacagatgtactttcaagtatatacttatgaatggaaggagaaaataaaagcatgaaaatgcaaataataaacctttactggcttgggctatattccagtaggtaatttatttgactaacttaactttaacaacgattaaatcccttcattttaatcaggtccattaaatttcattcattaaagctatacatactccagaa

SEQ ID NO: 478457 - DNA, 1000 bp, Homo Sapiens
tcagtaggcttgtgtgttcatttctttcactttttctgactcatgttctagcacctgtttgtgatagaacagtaaatacccttcactgtccagtacgtccttaatactggccttagtgatgacggcatcatcacacttgaaccactggtccttgtggtgccggatgaagctggtatagtggccactctccaaggttccttggtgattaaccacagcaaacaaggaatacttattttcgttgtttccactattggttggcagctgcaattgtccattcattctgctctctttacttgaggccataaacggcgtcatatccagctccagaggaaaggaaatgtatgtagtgatcttgcgcctctgtttcgctgaatgttcaaaccgtttgaaatgaaaacaggcaacgacaggtaatttattcattgtgagctgtttggtagattcctggtagctttggcaactaccacatttgattttggcactgcttcctaagtgctctggcctcgtaaacctccgcaagcagtccgtgagggtggtgattcctggtatgtggctttccccgttcacactgctctccctccctgggctcatgggccagaaggaggtgcaagagccaggcaagtccaaactaatgtcccagcatgggtctatcgtggtggagacgccatggcaggcttgacaggtgacatcagactgcaggccacctgtgaagatttggtctatgatgcagttacagtggttgggattgttggccgccttcccgacatcatcacctttgcagtgcctgtgcaggacatctaacgctgcaatgaggaactcgtgggcatcctgttgcctgtaccctgctaaatggcgggcatgtatccacaccaggtgcagtaacttatagggcacatgaggagacgggtttccagaatacaactcccgaaacagcgacgacatctcacagaccagacacaactcgggactcggcatctcacatcggtgcctgtcagagaga

SEQ ID NO: 478458 - DNA, 869 bp, Homo Sapiens
gctccccgcagggccgcccgggccggtttcaggcgggcttgcggccccaatcactgctcctgttcgcggggacaggcaggggctgactgggaggacgtcttgtggatggccttgtgctcctcggcggcctcctcccccgggtcgccaccgccgacctcctcgatgaccacgctgcgcacggtgccctcgtccaggcagtgcggggcgacgccgtacacgcgggggtcagagacagctgcgtggaaactctgcaccccgcacctgctgcagaagctgtgcagcgccgggtgcgtgttggaccgataggtgacgatgctttctgcgccctggagcagcgtgaagcgcgaggccgggacgaggaagtggcggtgctgcttcttcctgcacagcctgcagctgcaatccacgacgcgcagatctgcaggggcccagaccgcaaagcggaccgcgccgcagtggcagcccccggtgtgatgcacgaggcccgggtactcgaaggtgtccagcaggaccttggcggcgccctcgcagctgaggccccgcagcttcctgaacgtctcccagcgctcccgctgtgcgcccaggtccagatccttgggggacggggcgggccccggcgggtccggggttggcgcggagggcagcaggtctctggggcccgccttccggacccgccgccagcggcgcttccgtcgccacctacccagccacctcttggccgccgcgtggctcccgaccccgacttggacccgggggcactgcgcgcggctggcgcccgtgaccgcgatggccgcgcaggcggcgggaggatccccgggccgctttcgcctccgccgctgagcagtggcgcggttcctcactctgcccat

SEQ ID NO: 478459 - DNA, 1000 bp, Homo Sapiens; identical to SEQ ID NO: 346332

SEQ ID NO: 478460 - DNA, 1000 bp, Homo Sapiens
ccaagaaaaaggaaaacaccatccagtttatttttctcctgattcatctcatgccaacacacagacttcaatggacagcaggcaaaatggggaggcatccccagagcaagccgattctctacacactgccttcccttcctgtaagactcatcaaaaaggcaccccaaccttgcatggatctgctgttggtattccttggggtgaagccagaagtcaggctttccacagagagacgggactacatggccacctgggaaggctagggagtcaaagggcctgaggaatgactacttccctccacaagggcattccctgccctgctctgcttcctgggggcttcagcaagccttccttctagagctcctagaaccctcccatggtcaacacaacagcagcccagacaatgagatgcaagaggcctgagctcacaggccattcaggtaagccagggtgagctgggcagctagatgacccaattttcagtccagaaagctctatctgctggactaatacttccggctaactgatgtctgtgaaaacttgccagacaaactgaaccccaatcagactctggctgcctccatttggataggttaggggtgaggaagggggatgagctgtggcgctgtagggtatggaccctggtaccctcacacacccttctggccccttttcattggcctcctacttctcttcttcatcctcctgctcttcatcttcctcttcttcttcgctgtctgagtcctcgtataggttgatggttgcctggacaggaaagttctgcagtaaaatctccccagcactgtacagatagtcgaaggagcgggatttaggccagaagagcctgacagggtgatggaacttggattcagccttggtgacctcagcagccgttgccccaccagcagccaaatccaccagcttcctcatctgccttggggagtcatttgtggaagacagccagggcctccagagacaagttcctctttcactcccattt

SEQ ID NO: 478461 - DNA, 898 bp, Homo Sapiens
ttagaccattcggttgcgcttttggattggggagtctgtgatgccatcactgcattgggccgaggtgcgcttgcggatccccccactgtccaggtggagggccagttcctctgagtcgaagggattcaagtcgtcctccaagaagctagtttttcggcgcccactgctggcgacaccgctgtcttgaggcgagtcgcccgatcgcatgctgatgccggccatagcaccactgaggccatgcagggcgatcgcctcctggaagggctgcaggtcgacgtccaccgatgagctggactcagttgccacagcctggctggtgaccccagtgggtggcttcgggggtgtcctaggagtgcgaggtggaggaggagcggggggcactttgccacacaggaagctaatcaagtcttcgcgacgaatggtgctccggccctttttcacccactccagcacatctttgatgcgacgctggtggccaacctggacacccaagtcaaaacttcgttggtgggcatccccgctctctttgtagaggctggtcacggccatggccgcattctggaaggggtcccacatggaaagtccttgctgttggcacccagaatccttgtaaagctgagcaacggcggtggccgagatctggaagaggtgccacagcttctgcttctcgctcttgagccctgccaactctgcagccgcctcctcctgcagctcggggggcagctgctcctcctgctcggcctcagccaggcactggcgctcccacttggaaaaccagtgctccgcgacctcggcctcgccctccttctgctgctcctccatcctcctcttcaggccgcgcacctccaccaccgcctcctcctccgccgccgccgctgctgcctactcttggtcctcc

SEQ ID NO: 478462 - DNA, 741 bp, Homo Sapiens
ctaggaataagtccaggatggagaaggcatcatccagagctggaggtcttggtgattttggatcatcctaggactgctatctgcttcgtgttgggttactgcggtctctgtctggccctcactgtccaccacagtccagcgctcctccactatcccatctggcttagtgattttggtcacagagatgctcttgaagtagatctgggctggggctgtagaaccgggccaagacgctcctggtgctggtttgggggattcacttcttgcatcactctccaagaccccctcaaagatcctgggctggtgactatctggatacttaagcattgattctcgaagtgcctgtccctcccgcagtctctcaccaggtgtctctgactcagaacctggaagttcaggaggatgggaaggcaaggtccaggcccccatattgctgaagatgctattgaaatcttgtactaggtcatcaaagccgaagttatcgtggaaacgtatccctcctcctgggctgaagctctgaggtccaggaaagccgaaaaagccccggaagagatcaaagaggctcattcccatattagaactggaatctttgaacccctccagtggtccattcgcagaaaggggaaacctgcgcagccctgcatacacaaatgcttcagacacactatcgtggttatgttgaaatttatgttcggagtcatttttaggagtttcaattcttcttggatccagaccattcat

SEQ ID NO: 478463 - DNA, 1000 bp, Homo Sapiens
tttttagtacaaacttagggctctttattcaggtagtaaagtaaggaacagcaaagtgggagggctacaccatcaccatggcaacagaaagcctcaaaaacataaagtccctcgacttatgtcgggtagactcttcctagctcaggagaaacacattttaactggctgaggacaaggccaggcagcctggcctcactgtggaagggcagctggacgcatggcctctggtcaatcctggaagtgcttggtgagggcttccagcagctcctgcttcttcagcccactcttcagcccgtaagcccggcaggcctctttcaacatgggcacagtgaacttgcccagcgtgcccttgctaatgtgggtcttcagctcctcttctgaatactccaccttgggccttttgcttccagaaccttcattatcatgttttctcttggtaactttcccttcaggattgtaatctggtgggtgaacaagctccttaaactcatccaccagggagcccagtcttctatttattgcttcaaccttgggcaatgtcaggtccactgcttgttctggctccatcaaatccaaggccaaggcctccaggttcctgaagtgctgctgcagcacggggttctcaaagctgtcacttctgtacgtgaagcgaagcttctcaatgatagccttcatcttgtccacctgctctggagttgccgtgactttttcagtaaagggcatcttccttttatcatcagcaaagggtaaaaagaccagctggaagcccggaggagtcacctgaattttctggtcatccaacacttcttcctgtgtcaccaaagccacaaaataaggggggatgttcctgcggggtgtgtatctgcacaatgctgcaacctccttctccagacacttgatgagcagagcactgaacagggttgagctcccaatcaccagcgactcctctgggtacacagacagggagggcctcaggtaatggcgtttcttcagcagtacc

SEQ ID NO: 478464 - DNA, 1000 bp, Homo Sapiens; identical to SEQ ID NO: 346333

SEQ ID NO: 478465 - DNA, 1000 bp, Homo Sapiens
tcctggagggagggaggctggctggtgagcctgcccaagctgcatttattatgttcaagtacaaaccagtgccacctttcgcccctgggccatttgctaagtgaagcggcctcaccagtcaatgggaagtgggtgcactggaagcagtggggtcttctagacctttctcccagtggtgcaaaggccaagcacacctcagcctgcccctccaccccctcgagaagcagagtgtgtgctggaggaaggcggcaggcaggactaggagccctcctccccccgccgctggggctggaggaccacgctgtgataggctcgggtgcaggagaaggcagtgggcgggatgcggcgccggtcaatgaggttgttctccaggtgtgtggaggtaaggttggagtcctgagccacgcgcatgtcacagatggaattcaagggcacttgtctgatcctgttgtggctcaggcccagcacctgcagtcccttgaggcccaggaggccgcgtgggatggcctgcacctggttatgatccaggagcagctccgccagcgaggcgcgcaggcccaggaaggacacgctgtggatgccgtcagcctgcagcctgttgtgggacaggtgcaggaactctaggcctggcttcatgtgcgcgaacgcgtagccagggatgcgctcgatgtggtcgtggtgcagcgtcaggcgcctcaggccccgcggcaggaagcggggcacgtgcaccagccggttgtaggacaggtcaagggtctccagcttcgggagatgaatccaggctcggggtgccagccagtgctcctgaagccagttgtggctgagcaccagcacgctgaggctgtggatgtggctcagtgcgccctccgccacctcctcgatgaggttggtgcccaggtgcagctcctccccatcctgggggctccagctcaactgcagggaggacggcaggccgcgtgggatggcccgcagccggttccggtccagcctcagatagagc

SEQ ID NO: 478466 - DNA, 684 bp, Homo Sapiens
ttattcaagttgtccacagtcagcaatggtgattttcttgctggtctttccattcctggacccaaagcgccccgtggcctccacaatatttatgccttctttcatcttgccaaagaccacatgcttgccatccaaccactcactcttggcagtgcagatgaaaaactgggaaccgtttgtgttgggtccagcatttgccatggacaagatgccaggacctgtatgctttaggatgaagttctcatcatcaaatttctccccatagatggacttgccaccagtgccattatggcgtgtgaagtcaccaccctgacacataaaccctggaataattctgtgaaagcgggagcccttacaaccaaatcctttctctcccatgcccagaacacgaaggttttctgctgtctttggaaacttgtctgcaaacagctcaaaggagatgcagcccaagggctcaccattgatggcaatgttgaagaacaccgtgggattgactatggctgatactacagggctcctggtggcggcagcgtctgcaaaagcctcttcctccctcctggccagcccttccacagctcccggcagggcagccagcgcgagcccatcccccacgcctcccagcccagacgcgcggcgggcacaggtgagcggggcgccgactttggcccttaggctcgcccacat

SEQ ID NO: 478467 - DNA, 559 bp, Homo Sapiens
tgtttttttatttatttatttatttattttttaagtacaatttccattttattttttctccagagaatagtctgtcttcagtctttaaggactcagctccttatatgggctttggtaggggaggtggggcagcacccgcaggtctaaatcggggtgggggtgttcggtccttgcgggcttcacaagattgattcctgactactttgttgtgaattgcacaactcacacagtaatgtagcttcacatacagcttgggaagcacataggcatcgaagatgcccgcttcagaaatgtccctgactgctgcggcctccactatgtttcgaatgacgaatttcttaatggccttgtccttgggcacgcattgggcacagttagtgcagcaaataggctgcacgtggccatggccctttttggcacgaccgttgttccttcttttgtcatcttggaggcacagacctcgcacggaatagtagcactgtatgccttcatcaagctttggatatagaagcaactctcttgatgggttcactgttagttcatcaaaattgctggtcat

SEQ ID NO: 478468 - DNA, 969 bp, Homo Sapiens
ttacaacctcctcagcaggttctggattccctgcttgatctccttggttctcacaccataaacaatggggttcagagctgggggaataaggtggtgcaggatgttgagcaggatggggacatccggaggaattctcttcctggccaggttagtgatgaccagaaccagcaggactgtggtgaagaagaggatgaggatgaagtgggaaccacaagtacctagagctttggccatatctccctcacccttaatccttagcacagttttcaagataaaaaagtaagagagaacaataaggatgaggtcagagcccagcagggtccaacctataacaaactggtagctctgattcaaggtgatgtcatcacaagagagtttagacacagacacgttagtacagatgcagttcttgatgatgtgtcctgcacagtatctgagtcgagaagaaagtatggggataggcatagtaagaaggccattcctggccacaacaaagatggcagccctagcgacaaattgatcagtgatgatggatgagtactgtaggggcttgcagatggccacatagcggtcataggccatgatcatgaatgtgcaggactccatagtcagaaaactgttcatgatgaacacctgaaggaagcaggcagggaagctgattgatctgaggtcaaaccagaagatggccaggaccttggggatgacggtgaggcagagtacgatgtccagcagggagaggaggctgagcaggtagtacaggggctggtgcagagaggcttccagatagatggtgatcagaagggtggcattggcccccatggccaggaggaagaggaggctgaggggcagagacagccagtgctgccagctctggaaacctctgctcattttcttttccttagtccactgtcgctgaaagattctttccttaacttgtgctttttcctgcctcttatgtgtagtccccat

SEQ ID NO: 478469 - DNA, 792 bp, Homo Sapiens
tcaggtgcccagtcctggagcggcttccagggcgcggaagctgcccccgggggcgcccagagcccgggaaccagcgccgcctatgagcaggtcttcctcctcctcatcgaggaacacggtgtccgcgacgcgcgggggcccggtgacggggttgtggtcgtaggagaagacgcgcagcgcgcgcagcgggtgcaggtcggggaagccgcccaggcggttgcggtcgaggtcgaggatgtgcaggcggcccatgcgcagcagcgcgggcgggaactcctcgaagcggttgccgtagagccagaggccgcgcaagcccgtcatgcgcggcagctcggccggcagcgcgcgcagccggttgtcgcccatctggagcgactgcagcgccaccaggcgcagcagcggccgcgggaagcgccgcaagaagttgccctcgatccagaggcagcgcaggctctgcaactgcgcgaagtcggcgggcagcgccagcagccggttgccgcccagatagaggcgcgtgaggcgcggcaggcggcacaggccgtcaggcagtcgctcgagcttgttgaagtccagcgccaggatgcgcagctcgcgcagctcctcgatctcctccggcagctcgcgcagccccgtgccgctcacatacagcttctgcaggcggctcagcgcgcacactgcgctgggcagccgccgcaaccgccgcccgctcagctccagctgctggtcgccgctgcgcagctgctcctctgcgtccgacggcagctcatccggcgtggactcggcgatgcccat

SEQ ID NO: 478470 - DNA, 1000 bp, Homo Sapiens; identical to SEQ ID NO: 346337

SEQ ID NO: 478471 - DNA, 696 bp, Homo Sapiens; identical to SEQ ID NO: 346338

SEQ ID NO: 478472 - DNA, 999 bp, Homo Sapiens
ttatgcacgtggcttgaacagatcatgtcctgttaggaggagatcgaagagcatttggcaaatcctgtgattctcaaaaagcagcagcactgcctctctcaactcatctaccagaagcaatttctgcagctcacctgctacctccttaattctttcacgattattgctatctaccacaaatataagatattgggtatttgggaagtaatacttccggagaggcctaattctatcttgaccaccagcatcccatactgtgaaacgaatgtttttatagtctaccgcttccacattgcagccaacggtaggaatggtggtgactatctcccctaacttcagttcatacggaatggtcgtcttgccagcggcatccaatccaaccatcagaatgtgcatctgcttcttgtcaaagaggtgggagaagaaagaggagatggtgaggcccgtggcggtagtggcactggcatggcagaagcagaaggggctcggagtgtctctgtgatttctcctttcatacccccaggagaacccaggggaagacctttgatgcctgaaggcagctggctgcagtttaatcgccaggtagttcatctcagccatacactgaactgtgggcttacacccgggatgcctttgaattggagagctacaggaagtgactgtgccctgggcttctcttattccctttccaagcttccattcatccactttcaacccacattcatattcctgccttaacggcaagttgcaaggaatgagaggcatatctgtgccaagcactgtgcaaacccagcctctctttccagaagccgtgaaaatagcctctctttccagaagctgtgaaaatggcctctcttgggtgccagggtcagtgtttgccagctggtgtaggatttccaagagcagccggcttcttccagagaggcctgagtcctccaatccatcagagacttcagagtccaggtctgtggacatttctaggtcgtttctttcccccat

SEQ ID NO: 478473 - DNA, 1000 bp, Homo Sapiens
ctaataactgatgccgtgatacccgtggaagccccgagaagtaattatgaaggagaacagagacctgttgcggagattgggatgcactggtgttccagggtctaaagattcacataagacgaccacgtctgtagcccacgttcccagcaggggagcctccccaaaggtctctggatccccttcggaaatgggagcaatgctgcggtggtcacggaagcgcctactgggagtaacgctgcggtggtcacggaagcgcccactgggagtaatgctgcggtggtcacggaagtgcccactgggagtaatgctgcaagggtcacggaagtgcccactgggagtaatgctgcggtggtcaaggaagcgcccactgggagtaacgctgcggtggtcatggaagtacctactgggagtaacgctgcaagggtcacggaagtacctactgggagtaacgctgtggtggtcacggaagcgcccactgggagtaacgctgcggcggtcacggaagcgcccacggggagtaacgctgcggcggtcacggaagcgcccacggggagtaacgctgcggcggtcacggaagcgcccacggggagtaacgctgcggcggtcacggaagcgcccacggggagtaacgctgcggcggtcacggaagcgcccacggggagtaacgctgcggcggtcacggaagcgcccactgggagtaacgctgcggcggtcacggaagcgcccactgggagtaacgctgcggcggtcacggaagcgcccactgggagtaacgctgcggcggtcacggaagcgcccactgggagtaacgctgcggcggtcacggaagcgcccactgggagtaacgctgcggcggtcacggaagcgcccactgggagtaacgctgcggcggtcacggaagcgcccactgggagtaacgctgcggcggtcacggaagcgcccacggggagtaacgctgcggcggtcacggaagcgcccactgggagtaacgctgcggcgg

SEQ ID NO: 478474 - DNA, 1000 bp, Homo Sapiens; identical to SEQ ID NO: 346339

SEQ ID NO: 478475 - DNA, 372 bp, Homo Sapiens
ctacacctgggcctctgtacccatcggttctcgcagtctggttcttattcctcgcaaagagtagggagcctgtaaggtcacctgttgagcaagcacactgatgcactgggccagggagagctccatctcgatggagatgagctgtgaggagctggcggctgggcggatcaggttgtggtaacgggttttgttcagaaggtcgtccatcagcttctgctcggcagggccatgcggcagaaccctgcgtaaacacacagacctgcttggtccttgtgcagctgtcccccactgcagctgacagctatgaagcaggagctttgggcctgtcctgcctctctggcattcggctgaccctgagggcctctccctcat

SEQ ID NO: 478476 - DNA, 402 bp, Homo Sapiens
tcaacacttggtcaccaaggtccccgacttccaggcctcagtcaccactaacgaggtgctgcagccaggagtcatccacgggcccccgtgggcgtgctgacagtggtcgtgttgatgttcaccgatgttgctgggtgcctccgtcagcacgtggcgcttgcgcagcatctcgccgccccactgtgccttctctgccaactcctccatcagcgtgttctggtccccatgcgagtacaggttggacagcagctctgagaagatgaattccttggtctgttctgggccaccctcatccgtatatcccctggaccgcagctgttggctgctctgaccctgagagccgatttggacaatgggagctgaggtgctggctgaggccatgccaggcttcctggaggtcat

SEQ ID NO: 478477 - DNA, 1000 bp, Homo Sapiens; identical to SEQ ID NO: 346340

SEQ ID NO: 478478 - DNA, 1000 bp, Homo Sapiens; identical to SEQ ID NO: 346341

SEQ ID NO: 478479 - DNA, 1000 bp, Homo Sapiens
tcaaaaatgtgcgctcaacttcgcccagctgaggtcgcggcccagcagatggtaatggaccatgccttggtgcttgtcttcaagaacgctgcccagtgggggctgccggggccggcacacacctggaaaggtcaggtccacgaaggccttgaactcctccagcacctcctgctgcccttcactctgcaccttggcccgcagggagtagccactgctgaacttgctcttgaggtgctgggggctatgggaggtgatgatgatggccttgccagactcgtgggcgtgtgccacagcattccagaacaggcgccgggccacggggtccatgccagtggatggctcatccaggaagatgaaggcaggctccctcatggggctttcagcaatgcagtccaccactttcacccagagctgaattgtggcttgggctatccactcaggaaataacttgttcccctggacacagggatgagtccagggtgagcacacggccgacgagtcttctttgagggtttgaagtgttgagggcaagcacctctccatcgctgtgtgcctccgggggcgctgcacacaacacgaagggagtccttggacctgcggggcctgtggccttgctttaattggagtcgggcttctatcactgtaggtcttgaccagcttgttggcgtacatgtacatgactaaatcctcaagaatctggtccacacaagcactgatggggtgctctgggatgcccccgatctgggcatacatgaccagcatctcatggcagacttcattacactcaatatcactcaggttcttgacactgcaaaacctctgtagttcagagttgtaatataagttggtgaaagccatccccaggcagtgcctagcttgaagtagcaattcttgggggggccacatggagaccctgaagcagatccctctgctcctaacaaagctgggaacttgagtcttcttctgccaagggatgagggagatctcacaccctgtgtcc

SEQ ID NO: 478480 - DNA, 1000 bp, Homo Sapiens
gtgaataaataaaaatttatcattccatgcaaacacactcattttccacaaaagacaacagtttttacacaagcggcggtgtcccagtggtggccgtggcacgtgtggagcggccccgcagcggcgttctcatgggtggcgtcacagtggctccaggtcctcatccccgcatgcatactcgtacaggtccacggcgcccaggggtgagggcacctcgaagaagggcctctgggccagcggggactgcagcgcactcagcttctgctccacaggtctgagctcggcctcgaacctgcaacgaggggatggtgaagacgtggacagcggcgtggagcaggccctgggccctgttttccgagaaatgcaggctgctccgcagccaacctccagcacgagaaagtcccctgagccgaccttgagctccagccgctgaccccgcaacaggctcctggctgagaaagccggctccaccaacgctcccgggggaggggccagcggtgcaggtgaaaacccacccaggacgggacggagccccaggcatgaggtgcacagagaggaaccgggcgggctcatcttttccccaaagcgacacgacggtgactctcagagggcagcctctgagctgcaaggggcctgtgtttacacaactgggtcatggtgtctacacaggattggagaacaaacgggaccacagtttggacaaattctcccaaagcacagaagctcctagtggaggccaccacttccattctgaccagaacacacagcagtgcgaggactggacgcgcaccttccgttaaggtctcggcagtgacatcgggcgctactccggggaaaccagcgcggccaccgacaacacagtctcatagagatcctgcagggacacctctgctttccaagatgccccccacagcctggcactgagctcccactgccggagcaggcatggacacggtgaaggcagtcaaccccagtgtggtgctggccactggtcaggtgt

SEQ ID NO: 478481 - DNA, 684 bp, Homo Sapiens; identical to SEQ ID NO: 346344

SEQ ID NO: 478482 - DNA, 429 bp, Homo Sapiens
ttacctctctgccagcactccaggattcactgagcaggaggagccggcagagaggtcctcaaaactgtcctgcagcctgtggtagggagtgttgggctcatccaccatcataaatccatagtccttgtcagcagggcggtaggtggccaggatattcatctcgtcccagtgctgagacttccttctggggttctccacattgggggatttctgcatcaagttggagctgttctttcgtaggatgctccggggccggtcggagccccctgagtgcacgtggggcccagaaccgtgaaacaagactactctggagggctgcccagcgcctgcctcgactcctgtgaccgctgcgggcactcctctggctgcccctccaggggaatcccggttgaggccgccagcagcccctagggactccaccttctccat

SEQ ID NO: 478483 - DNA, 1000 bp, Homo Sapiens
tcaccctgtaggatgctcacacatcggcctctccaccttttttgccttaaattcattaaaagcattgctgtggcatagattcatacgcaggtgctctggccgtttggagatcatgggaaaagcttgttttttgtatggcccagagttcggctgtcgtattggaagtggtgccaatgcttccccactcgttgtcacatccatctgctctgtgccacttgtttccattgggtattccacaggtgtctgaggatttgctgtgctggccgaagcgcctctgacaggtgttcgtgggctgccaataaatcttcgaggtgatcggatttttggttcaaaggaaaacttttctttcacactacacagcgatgcacacctaaaaccaccaatgtgtacagtctcccacgtcctcaacctcatttttagacctgttaacttctttccagccatttcgtgaggcacacacagaaagacctgatgggcactttcactgagagttgagtcatctgggctgtcgacaggtgtctgacgtgtaaacttggaatcaaactgacttacatcctcttcagattgaattgtttgttgttttttaaagtgggtcacattatgctccatgaccaaaaaataatcactatcatcatcctcctcctcctccaccaacagaggtttaaatgggggctccacctttcgagccagaagttcttcccagttaatgtgtctaaagaatggatgagctgctccagttggcatgtcatacattaatgctcccaaactccaacaatccacagcacaattgtggccacttctcatcaagatttcaggggccgtacaatgaggaaaataatatgcttggtgattaagcatgatattctccagcttcaagtctctgtagatgatccccttttgatgtaaatgccccaaagccatggagatttctgccaagtaaaagcacgcagtgtcttccataaatattccctctctttctaactgcataaatagttctcca

SEQ ID NO: 478484 - DNA, 675 bp, Homo Sapiens; identical to SEQ ID NO: 346345

SEQ ID NO: 478485 - DNA, 828 bp, Homo Sapiens
tcacagggctgagtaattgcttagttctgcctgcttcgttcccttctgcttcataggtactacaaaatagttgttgtccacagtggtgagccccgcagtgagtgaaaacaagttctggaagttcagtgtgctgtcttggcactggtccatgtccttcattgttatgtctgcagccagagggtctttttgattctccaaaaatccaaggaactcctttcccatgagtactttcaggccctccttcattaagtagcctttatccccggcaaatctttccctaagaagctctgaccctgaacacccttggactgtggcatccccaccctcacaccggcctgcagcaaccgccgaccaaacaacaggccccgattggaaggacaccaggaagctgagaatggcagcaactggggtgtctctgaagacctcacaggccaccgttagagacccagcccctgtgggcttcagcagctccaggccacctccttccagtcctgccccctgcacctgtgaggcaagcttggcagaaaagtccggagaaagagatccaaagggtctggcttgtaacctttggccgctccgcatgtgggaaaggctgagctgcagagaccctgcatcaggtagggttccgggatggcatggcagccccactagggccacgtggttggaatagggggagaagctgcccccaggaagaaagggtgttccagagctgtccgtgcgcacaccccccacaaagggccggggccggggtgggagtcggcttacagggcacagcgcggcgcaggcccgccctggaatggccgtgaacttgttgtttttccacgtcat

SEQ ID NO: 478486 - DNA, 1000 bp, Homo Sapiens
tcagcaccagttcagtgtcctacaccgagacgtcgcggtgccacacggaagcacggactgctctgtccataggaacagtggcacgcacgccacgtggccagtgtgggccagctcatcagcactcacggcccgcaacccagccatgctcaccaccaccatgttcgtctccacgaaggtgggatcaaaatcctggccgtccaccgagggcttccccaggctggactctgcgctgagtagggtctgctgaagcagctggtgccctgggtcccgccctagtgactcaatggccaccctgagtcccaggatccagaagcctgcaggccacagtgcctgctttgtgtcaaccagtcccaccagggccaccgcagccagcatccccacctggtgcatgcttccacccagggctttttggaggcgccaggcttcttcaatgaagtccttgggcctcccagccagggaccccactggggcgcccaggccctgggaggtggagaggagagactcctgccagctcacatccctgtccttgggccagggtggggacagatgcgtagccccatctgtctgtgggaggccagcccagggctttcccaccttggagaggcagaaagacacagagtcacagtgctccacaatgtaggtgggcgggacatgcagggccagcaccacgttcatcagctgggccctgtccaggtggacccaggccccataggtctgggccaggaggtgcacctggcgtaggtagttgatggggaggatccggacccccgagatgctgtgtgagttctccaggcaaatgagctcgcagacctgagccaccccaccctgctcatagacgtggaggtggcactcctgcccaaggaggagctgggagccccggcgccagcagtgacacatcacagagatgaggttggccatagtgttggagggcacaaagagggtgcgccccagccctagcagctccacagccatttcttgcagctcatcacggacagcgctc

SEQ ID NO: 478487 - DNA, 1000 bp, Homo Sapiens
tcactgtggcttagaagccaaggacaccgagagcagcacaagtcccagctgcagagcccaggcttccttgtccaggcaccgttggaagacaagggagagggtgtgggtgtggggtgctgaaggagggagtgttttcctgtcaaaggcaaattgcagcagatgcaacattcccttcggggcacaggagggaaactgtagctttcctcggaatcggcaacttcccatgcaaggagcccaagggtggcacatgcagccctggattccagggccagccgccacttctgctaaaagaagtaggactcctagttcctctctccagacgctctgaaagcgaagggaggagctatcactctccagccaccagccatccctgcgccctggggagcagttccagaaaagcacacgcaggaaagcattcacagtgattccggagtggtgtgaccgtgggggctgctccagacaggaatccagggcagttgggccctggaggccctggcggagagtgcagaatgggctgccgtggcctggagatcctggtatcattgactgatacaggaagtcggggctggctggagtgcgaatcaccatggccatgtacagtgttggacatccactgcgcaaagacttttcatgaacatctgatcttccatagacattcagttcacaatctccacagagaaaatcattgaccaaatgagcactgtgagtcgttgaggtaggcagatgctccttaatgggacctcgaaggccgaaaaacaagacattgttgagtccattctggaaaagaatgggcagcaagcctcgataacgctctccaattctatggcatttcagtgccttgaaagcctgataagtgctggtaaatttgtcatgatgcttgtggtcttgaagcaatgtctgaactctttgcagtggagtgaaaattgcttctgctgtccttgcaagcactgccaccacgacacgggttgcaaactctggagcactgacatgatttataata

SEQ ID NO: 478488 - DNA, 855 bp, Homo Sapiens
ctacgtgaaggtcactctggcttcattgtatactttgaacactttctcaatggcgttgacatagacggtggtcctcatgtccaatcccaggttatacctcatggctatgcacaaaatttgcctggcagaactctccattgcgtacaccaagtcagcatgcatggtgtctttctctgatgcacctgatatcctgtcttggaactctgctgtgggtataatgagaatagttccactgtgctttccaaattttcttgctaaattctcttgaacagatattagcaagtggtagttacactccctttcatatttgaaggtcaaacagccatagctgacatgatttagattcttcagccactcaaagttggatgctgtctctcctttggcattcatgtagagatttatgatcatttctctccattttagctgttttctctttaatatgtcaacaatgcccatgacacccacttgaaactgggagccatgagaattaaatttcagtctcttcgatttcatgggctttggtgggggttgtagagcagcacccgcaggtctcaatcggggtgggggtgtttggtccttgcgggctacacaagattgattcctgactactttgctgtgaactgcacaactcaaaaagtaatgtagcttcacatacagcttgggaagcacataggcatcgaagacgcttgcttcagaaatgtccctgactgctgcggcctccactatgttgtgaatgatgaatttcttaatggccttgtccttgggtatgcatcgggcacagttcctgcagcgaataggctgcatgtggccacggccctttttagcacgaccattgttccctcttttctttgtcat

SEQ ID NO: 478489 - DNA, 471 bp, Homo Sapiens; identical to SEQ ID NO: 346347

SEQ ID NO: 478490 - DNA, 1000 bp, Homo Sapiens; identical to SEQ ID NO: 161408

SEQ ID NO: 478491 - DNA, 1000 bp, Homo Sapiens; identical to SEQ ID NO: 346349

SEQ ID NO: 478492 - DNA, 453 bp, Homo Sapiens
tcatgagtacaaggcttgccacttctccagggggccatgactagggatggatttgaccccacagccatctgggctgagctgtttctcagccaccacatattcaaattcatctgcattgaacttggtaaagccccacttctttgagatgtggaccttctggtggccagggaacttaaacgtgaccctatgtagggccccaatcacatgctccttgttctgcagcttggtgtggatgaacatgatgacttggccaatgtgaaccctggccacggtgccctggggctttccaaaggcaacttgcatgcctgtctgaagcctacacactgcaggagcggccgccggcgccagggggcgcctcctcgataactcggcgctcggctggccaggcaccggcgcgtcggccgctcgattggtcgggtcggggccggcctgagcgccgcgggcctgcgccat

SEQ ID NO: 478493 - DNA, 1000 bp, Homo Sapiens
tcaacagcaacaccgatctacctccaggtcgtaaagtgacctgttgccacactgagggcagtagtcggtacagaacaagatcctctcgggctcccttaaggccctcactctccccatcagctcagccccaagttgggcaaatctgctccggcagacgataccacgaacatcataactctcccgcggggcaggatacagctccaggcataagttgttgagtctgattgtgtggcacagcaggttctccagggtggccgtggagatgggatttccacggaagctgaaggtggtgagctcaaagcagcggctcagggcaggcaggatggcgttgacttgggagtctacgatgccacagtcatctaagtccaggtactcaagggtggctgcaactttttctaggagaacttggagcggcacaaggctgaaattggccagtctggtgccactcaggtccagggtctttagttgaccaatgctcgggtacttggacagatgcttcaagtctgattccaaaagcacacagttagttattgcgaggatgtttaacgaggtctttagacagctgagcatctggtccaggtggccttcgaggaaagaaacagagttcatataaagcttttggaggcagcgcagcttgaggaactgagtggtgaactgggtaacaaactccttcttctgctctggggaaatgtagcgagaatctatgtcagagagaacgagcttccgaagattcctcatctggccgaggtatggggtaaactctgccaggacgggcagtgtccaattgcaattcacttccacctcctggatacagtctaggttgactgttttcaggatgtttctgatattgtggaagagcattcccaacattttcagcttcttacagcacaggtgtactaaaccttccctctgcttgacccatagaaagaggcaggtgaagtattcatccagagtcctgttcttgaggcaaaggtctatgaacacagtcaagggctgctgt

SEQ ID NO: 478494 - DNA, 1000 bp, Homo Sapiens; identical to SEQ ID NO: 346351

SEQ ID NO: 478495 - DNA, 1000 bp, Homo Sapiens
ttaagaaacagtttcattttcatgaccagcaaggggttcaggaagcatcctaccacagggtccctggaaatgaaacctgaatcttctcatggctgaggtggtctccatgttaaattcggtcactggcactcccttggcagacatctcctccagaaaggcgggatccaagtttttgccaaaccacagggcgtgaggttgcggcaagcccctgctctcgactctcataattctcagacacgactccacaagaggtacatggagtttaaataagctacagtggatttccagaaggttcttggcgccagccttgggtgccgcccatggatattctgtcatgatcatgccctggcggccctgtccgcccagcagggcatcacattcgatggtggcgaggtgcggactgggctcctgctcggcctgacctctcacccgcagtggggagctcccacacccagaaaagcgtgggcagaggacagaggagctgccagggcctggactgacattttccccatgacctccggcttgtctgaagggtggaaccccacttaccgcaataacatcagcccctgaaatgacgaccacgtgctttgcttttgcaaaaaacttccgaaaatctgccatacttgaactgagaggaaccattgtctggaaaatcttggtttctgtggtggctggaggcttcaggccacaaacagcaatgctttcagactccatttcaagtgtggactctgcccacactggttctaagtgacctactttggcctcacctcttttctctccaccctcctcgccagcctgcggccgtgcgccccgcgccgggttgggaggcccccagtgttcccagccgtggcttgtggtggtgtcaggcgttggaggagggctggcatgtgggggcgacagggacgccacgcccctctgcctactttctacctcccgggaccagccggcgggagcgcagccttggaatccgctgggcgctgggggtctagcagggaaatag

SEQ ID NO: 478496 - DNA, 1000 bp, Homo Sapiens
ttagagatcagatcctgcctcttcttgccaatcaggataaacccgtgcagcaaggctccccatggggcacccaatggagctctccatggaacgggcctggctagtaaggcctgaatcaggggagagggtggggaacacagccctgagctctgctggctttggagcgagctgcctcctctgcagagaactgatgcagccttggctgtgcggaggagccaacatgcggtctccaagaacgcgatgctgactaaagcacagggctgtttcagcgcgaacagctggctttggctttctaatgtctccttcaggtatgatggtctgtgtcccgccattcccacagtgtttgaggtaggaatgccaatcccccttctgtgcctctgcagctagattcattctctcagagctcatgctgcatcccagcttcccctcggcagcacctgccagtgatgacaagccatcctgccttatgcccaagttttgatagcacacctgcaggttattcacagaacaccggtattctgtggcacacaatatgagaaacactgtcgtggggatttcattgtgatggtccacagttccgtgctcaccatgtggggtgccattattctccaggtgtgggaatggttggaaagtagggatatgctgtccagaataggccaagtgaacaatcttcaaagtggcctgcatgaaccaatgcccaatcatgatgatgacatgttcattgatactttcacctcctgtgtagcactctaccatgctagaaccctctgtagcttcagaacacagccctaggcagtctgaatgatatttcttgtctagtgatttcacctgaaacttgaccaggaaggtcttcaggatcacagcagggacatgtatgtctccatagctgtcaaagttcatgggcttccctgcacacagaacacagtacagctgaggtctgggctctggcctggagtttgctgctgcaaaacgagctctgaagcaaaatggcttgaaaact

SEQ ID NO: 478497 - DNA, 498 bp, Homo Sapiens
ctacaccctggcgggcgcgcgctgacccgcttggttactccacgttgctgccgccgccgcttgcaaacgcttccagcctccagctccctccttctcctgctcctccttctcttgctccaaacgccaacccagccacagacgatcagccgtcgcggttgcgttcaccccctgcggatcacaacggcagcccttgcgacaccctggctggggagttttattcatgagctttggtgccagcatctgcaggtctaaatagaagtggagatgttcagttcttgcaggcttcctgctgtgaatggcacaactcacacaataatgtagcttcacatacagctcgggaagcacatatgcattgaagacacttgctgcagcctctactgtgttttgaataaagaaattcttaatagccctgtccttgggcacacatgtggctgccaccctttttggcatgatcattgttccttttgtcaccttggaagtgaggacccgaaagagcat

SEQ ID NO: 478498 - DNA, 605 bp, Homo Sapiens
gacagaaagactctttcattctaatgatcatacagttaatttccaggaaagacaaaactagggtcaggaaaatagcaaacatatggaagcttaaagcattatggaaatattacaaagatttcaaaatcagtctgaattttcttgtgtctttatttcggatggtgcagcagacaacttcatgagttcacatcctctcacctcggtggtttgtattttgcaacacaggctacttcacgttctattttaagcttgaagttgttaaggttgccattacagccggagaagacaaaagtttcacatcttttggaggttctgttgtagaaatatctaaagtgaacttcatagcagcttccaaaattcatgtccaatttgcagggatctttgaggtctccacatatcttctccgcaattttattaacaccacccaataacagggtattcaatgagcagaagatgaagaatcttagaagaaatcccagcttggcagacttcatggtgcagcaagcagcaggcaggatagttgtggtatcacctgatgttatattttgggcttgatacttgagacggttgagctcactgattagacccttgatagtgagtcccat

SEQ ID NO: 478499 - DNA, 1000 bp, Homo Sapiens; identical to SEQ ID NO: 346352

SEQ ID NO: 478500 - DNA, 1000 bp, Homo Sapiens
tcagagcaccaggcagccctccgcggtgcccagcacccgctcagccagggcagcctgcagcggagcctggagccagcagcttctcatctcttggcccgtgagcggtatggggtgaaagtgggagggtccagcctggggcacgctgtggaacagggtcatctgcacccaccggatgggtatggggtcctcgaagacggtccagagcaccgtgggctcgcagtcaggcggggtcagtgacccagcgaagcgacagtagctcgaggtgttgggccgcatcgacgccagcaggaaggtggacctcagattcactgagagccctggctcaggcactttcctcaagcccgacactatggcgcagaagttggtgttgctacagtcctgctcctgggaggggctccaagtgcaaggggttctgagtgggggagtctctgtgtggctgtcattctccagggtccaagggcctggaggtgctgagtcatagcctcggaagatgaagggccctagggtagagttccgccggaccctgtgaaagtcaatgtcgatgagggactggcctgggcccccacaggcaggggccagcttcttccagtgggtggggactgctggaacaaggactggggcctttggggtgggggtggggtcagggaggcagcttgggctggccacagtaacaggcacaccagccttgactgactcgggaccggcgatcacagcaggcccagactcacacacagggggacagtcacacacttgcacctgatgcccagtcagtctactggggcagacgactacagacagaaacaggcacagatacacgtcggctatgccgctttccacgaatgcatggaacccaggacgcgaacccacagctcgaggtcttataccttcactactgagctgccgccactgcagcagcaacacctcttcctgcttggccggtgaccgcagtccttcttcgccagcaagtgtgggcttccaaagacagggctgggcctggcct

SEQ ID NO: 478501 - DNA, 1000 bp, Homo Sapiens
ttatacgctgtcctcattagcaatgtcgtgtacagcgtccacgttagcgtgccttgtcggtgccattagcaatgtcgtataaagcgccctcattggtgatgtcttgtacagtgccctcattagcgatgttgtgtacagtgtacttgttagcgacggcttgtagggtgtcctcgttagcgatgtcgtatacagctcgttggcgatgccgtgggcggcgtcctctttggcgatgccctgggcggcgtcctcgttggcgatgccctgggcggcgtcctcgttggcgatgccctgggcggcatcctccttggcgatgccctggacggcgtcctcgctggcgatgccgtgggcggcgtcctcgctggcgattccgtgggcggcgtcctcgttggcgatgccctgggcggcgtcctcgttggcgatgccatgggcggcgtcctctttggcgatgccctgggcggcgccctcgttggcgatgccctgggcggcgtcctccttggcgatgccctgggcggcgtcctctttggcgatgccctgggcggcgtcctcgttggcgatgccctgggcggcgtcctccttggcgatgccctgggcggcgtcctcgttggcgatgccctgggcggcgtcctcgttggcgatgccgtggacggcgtcctccttggcgatgccctgggcggcgtcctcgttggcgatgccctgggcggcgtcctcgctggcgatgccgtgggcggcgtcctcgctggcgattccgtgggcggcgtcctcgctggcgatgccgtgggcggcgtcctcgttggcgatgccgtgggcggcgtcctcgttggcgatgcccttgtcggcggcctcgttagcgatgtcgtgtacagtatcctcgttagcgatgtcgtgtgtggcgtcctcgttagtgatgtcgtgtacggtgtcctcatggggagctttcttggcatccagattgttttcttggcaagtgattccagaatacttactagattcaagcctcaga

SEQ ID NO: 478502 - DNA, 1000 bp, Homo Sapiens
ctacttctggctgtaaggagcccgagcgcaggtggcctctggttgtggggaggcccccacggcccctccgaggtggagcacggagctcgccagcgtcttgggaagctgccgcaggcgcttcttccttctcggcaggaagatggcgcccggctctgcagtggccctgcctcccctcgccgttagatgtctcccatccccagacaccaggatttcattccatttctctaacaggacaacacatatctggagagcagtgacccaagacacatcttgtccagcgggtccctcatccctgtcacagaactggggactggcccctccaactgagcactgctgcacacctctattcccaaatgcagtgttttccctgataaactttctgaagacaaagatttgtcctctgcgaccctccaaagtgctggacttccttgctagctcagcagggcctgacagggagaccggctgtggggtgtggacgcccatatgagtcatggggatctgggtaccggagctggctttacatccatccacagagagaaggatttgtggagacagcgggaatgagaaatgttgttttggcagaatcttcagagatgtggtctttccagtgggctgcaggcggctgcagaggctcttgggggcaggaacgctgtttctggatctctgtaaggtgattcggtacaagggcgggggacttgagaggtgggtggagctgaccactttccgggaggaaaggagtctgacagaaaggccgttcctcactggaggacagcgtttgctaaggtggaggtctggacagcgctgaccctggagagcaatcaactcaggttgcagctcaggggcgacaccggacatggccttgctgctggcaggcagccatatgtacccatctcgtgggccgaggaagcccctgatatcttccagggcatactccagtctcctggtagtgggtgaactgcagagtttggctggaaggagcaggggccacacgggacttgtt

SEQ ID NO: 478503 - DNA, 1000 bp, Homo Sapiens
tcaggtggaggcaccctggaggccaccagggccttgcgggctaggtgccggcacgtgcgctggggccacggcctcgcccaggatttggcagagctcctggaggtgccgctgcatcttgggaatgcccgccagctgctgctccagccgctgcttctcctctgtcaggctcaggcgggcagccgagcctagcttctcgaacttccagccaccctccccatcgaactgtagcaagtgtgtgtggtactccctggccaggagagggacagggtcaggggcatggcacgagggctgctgatgacagccgcctgctgctgccgcctggcccaacaggccacctcctcccctcaggcagccactcccactgaccccaggcagggagacagggcacctaccacaggagggctggtgggtgatggagagcagggcaatgcctgcgtccttggccgcctggaagatcttgccttccacgtcgatgctcacagcactggtgcattcatccaggagggcgtacttgggcctgtggtagaacatgcgggccatgccgattctctgcttctcgccacccggcaggacatctttccagtcacacatagcctcccaacctaggcaggggcaatggtcttggctcagttccaccagtacccagacctggggtccagccggggagctgggggagctgcgggaatgagctagctgtgacgacagggcccctgtgcctctgcgtccttgtctgtctccctcccactgcaggatgtggtgcaggtgcacgatgtccaggatggcttccaggtcctgctccgggtagcccttccttcgcatgccctccactgagtccgggtagatcacccgaggcagggtgggggcaaaaagccgcggccggtaaaaagccgtgggggcagggggtaaaaagccacggcggggaaaaagccgcagcagcggggagtcaaaaagccgtggcgggcaaaaagccgccgcggacaaaaagccacggcggcgggtg

SEQ ID NO: 478504 - DNA, 1000 bp, Homo Sapiens
tcaggtctggggtggtctgcagagaggcaggcggcggtgcggaaccgggaaccacgcgctcacccgccaagtcggacaggcccggcgtgggtgggtgagacactgggaacagcggccagctccagagggcgcgaggcagggcgcgcggggaggggggtcgagcgcggttggggggcagtgagggtcgccgcgggggcgcgcagcagggcgggaacatggcgcgcggaactggcgcgcgcgcctacctggcgggaccgttagctcgaggccgacgcggccaggaccccgtggatatggagcagtcgtcgccgccggcgcccgagccgacccaagggccgacccccgcaaggagctgaaggcggcgggagcccgagtcgcagccggcgtcagcgccggtgagtgcgtgaggggctcgggccgggagactttctttgtgaaactccggcggtggcagccaggccaggcctcagcggctgaggagcgcatgggtatttgctggagaggagatggagactctctgtcctggatgtgagacaggtggctggcatctgggtaaggatgacattccctcattgtgtcactctgttgacagtaataagctgcaaaatcttcaggctgcaggctgctgatggtgagagtgtaatctgccccagatccactgtcactgaaccgagagggaatcccactttgcagactggatgcagcatagatcaggagcttaggagttttccctggtttctgctgataccaatttaaattattgctaatgccctgactcgcccggcaagtgatggtgactctgcctcctacagatgcagacagggaggatggagactgggtcatctggatgtcacatctggcacctggcagccagagccccaggagccccaggagctgagtgggggccctcacgtccgtgctgtgtcctgactggggctgactcctgcaccgggtgtgagcagcgcttctgaggatggccatggggcaaaaagccacggcg

SEQ ID NO: 478505 - DNA, 1000 bp, Homo Sapiens
tcacttcaaattgggcaaggcaatttgatcaacaagggcagagaaggccctgcacactcgctgagctccactgtacaggtccatgtttactgaagactccgggcctgatggcgtttctagattgaaggcatccataagttttgacaatagttcttgcagttcctcttcctccagctcatcctttctctccttgatgttacctgcctctttcttttccacggctgccagagcaggactgctcatttcagcaggaaccattttggggatgtcctgcttcagtccctcctgataactgggtagggcactaatgactttctgtggcatcttttgtgtttggctttgtgccctggtgctgtgcaaagtggtctctggtgattctggatttcgcagagcatgctctgcatttgtgtgacttctgtgacttctgtcaacctcatcaagcttaggaagaggttcccctgttgaagcatcttcagtggcattcttgatctgcaaataatcccctccctttggaaccttttcagttgaagaatggtcaaccttgttccccacattttgaaaggaagaagatgaaggaccgggtggctgcaaccttgcctgtaggtcccgtcttatctgttgtagcttggtccatagactatcctggttggttttgagtttgtgaatccttgtttcaaatcgacaaattctttcttcctgggaggtgtatatagcttgcaacttgtctttgtattggtttaactggtaacatgagttgctgtcctcagtttgttgaccccgagacattctttcaggtacaggtataggcttggaggcacctgtggctgctgtttccattggtccagttggccttacatctgctgttcctttagaactcttgtactgaatggagacgctattactggcctgcgcatggtgaggcacaccctttggattcacctggtccagcagctgctgccttctcgctgcttctttcttcctacagcgcccctgaagaagg

SEQ ID NO: 478506 - DNA, 798 bp, Homo Sapiens; identical to SEQ ID NO: 346354

SEQ ID NO: 478507 - DNA, 780 bp, Homo Sapiens
tcaaactctgtcttccttggccatggcatcctggtactgttggtacttgggcaccaggtcattcatgttgctctcagcctcaatgtactcatccatctcattcatgccctcacccatgtaccagtgcagggaggccttgcacctgcgtatgacagtgagctgctccaagatgcgcttaaacagctcctggatggctgtgttgttgctgatgaaggtggaggacatttttagctctggaagtggctccctcatggacatgcagtccctgaaaatggcagctgctgctaggtagcagccacagcaggggtcacatgtagccgttatgttcttggcttcttggtctgctgatgaccatctagggtcagggcagtctgtggcttgggaattggtgttgcacagaaaactctgagaagaataggcttctacaatctcatggctaatctgtgggtcttttcccagacggtaaaagatctgactggggccatgccctgagaaaggcgctgggcggcagcaagttggtgagccagggaagtcttccctcgccctgagggtgcggggaagcggcgttggcgccactgaagctgggtgtgagggaggcgtcaccgagttcagccccaccctccaccgctccccaagcgggtccggcgtccgcatcgcatggccagaaggcggggagccagaggcgccaggaccctcgcgtggcgctccagcaccccagaccgtggcggcgcctcgccttagggaagagcaagggaagaactttatttgaaccgcgaacat

SEQ ID NO: 478508 - DNA, 1000 bp, Homo Sapiens
ctaacagcaggagtcctcaaagtcacccaagatcttgtagcacagaatggagtgttcctgggccaaggccgccagctccttcaggaactctgggaagagggcagcagccagcatggggttcctcaccggcaggggcaggttggggggtgcctcagccaccttggttctgtgggtcaggaagggctgaagcactcttggaggtccatccaaaaggttcttgccacttcctgtcctggaagcctcctgaatgggatctttggttagtgctgcaggggtcatatcagacatgtccacacggaagagcaggtactgctgagcttgaatgaggagccctgggaagtctctctccacagaagcaaactgttcaatcttgtttttcacagatgcaaggacctgatagagagagcggacgcttggctggaagaccatgttggtgttgagcagaaaggagcgcaggagtggctgggggtagctggctagctgagtaatgatcccgataagcagcaaattaacatgtaaagagttctccagcatgttctccagctttgacaggactacgctgatgaatgggccttttcctaccttcctttcctgttccaatatatacaagtactttcgaaagcagaaaccacaaagcaatttaagatggtcacctgtgaatggggtgctttgagtcctcacgggatggcgactggcaaaggcagcctcatctctccccacaaatggggaaggcacagtctctacagcaggcatctccgtctcttccttcccttcttcctccttagtgagaagcaagggatcaggtgtggggtaattctgttccatcaagccctcggcgccggaatccagctctttaatgatttggtcatactgggcaatgagctcctcgctctccgggtgggcggctgtcaggttagagctgtgctctgcctcaggggcaggggatgctaactctgagttggattctggggctgcttcaggttccctctcttgctttggc

SEQ ID NO: 478509 - DNA, 1000 bp, Homo Sapiens; identical to SEQ ID NO: 346356

SEQ ID NO: 478510 - DNA, 1000 bp, Homo Sapiens
tcacttaccagctagttttgggaaacctgcgtgtaccagctcttcatacagttgcttggccgggtcaccctgagtcatcagggtcccgtgtagccagataagcagagccctgtggccatgttcacggaagctttcatttcccgaccactgctcctcaatggctctaatctggtcatctgtaaagttccacgaacgggccagcctctgccactcattggccttcagctgatggtaagccaggtcccagagaagcgtgcgaatgtgtctggtctccagactgtgatcttgcttgaatgtcagagtaaagcctgttgacgggtccctgatgctctcatgatgctcctctctccaggcgtagtatctctctgctttaatgagcatgcccacgacaaggctatggttgctcctggaggccacagccagggcagtctttccttgcttgtcaacagccttcaagtcacagcctgccttcagcagggtttccaccagttccacatttccacgatcagcagctacatgcagaggggtttgctgcttctgatttaagatgtcaatatcatgctgtgcacttaataaactgtttacaaccgtgatgtggttgttgataacaactaaatgaagaggggactccttaggttccactttctggtgcagatcaacgttctcactgagaagaaagttgacaagggatgcatggccgttcctggttgctatctgcaaactactgatattgagctcattcatctcatttatgtcttgccactgggctagcagcacctgcactgcaggactgtgaccatgcttcgcagcgaggtgcaaggcagtgtttccccccttgtccttttctgaagtatgcaggtttaggaaggtaagtttttctatcatttcaacatggcccctctcagctgccaaaagaaatggttttcttcctttctcatcaggctggttcaggtccttgaggtgcagatcttgaataagatactccacgatgcgcacatga

SEQ ID NO: 478511 - DNA, 525 bp, Homo Sapiens; identical to SEQ ID NO: 346357

SEQ ID NO: 478512 - DNA, 1000 bp, Homo Sapiens; identical to SEQ ID NO: 346358

SEQ ID NO: 478513 - DNA, 1000 bp, Homo Sapiens
ctatggcctgtagatcttaatgacgtccttgatgggccgccggcagatggggcagcaggcccgggcctgtcgcttgagccgcaggccgcagctgtggcacaggcacatgtgtccacacgtgtagatgaccgtgtccacctcgccatcgaagcacaccgtgcactcgccattcttgatgcctgccggctccggtggggagaacacgggggacaccggggggctcagcggggagctgggggccgtcaccagggatgactcagatgccgaggaggactggttgacactgaaggtcatatctgaatcactatcgtcctgggagccgctgagggaccctgatggagtcgtggtcgcagggctggactgcagggtaccgaggagacgcagctggcccgcgacgccgccgcgcacggcgaagaaggcccagagcgcctgcgtggtgtcgacgcacagcaggcggccgcgcggacgcccgttgatgcccaggagcacgtcgccgccgggccgcagcgtgaagctgagcgcgtcgccgccgctcggcacgggcccggcgcgcgccaccacccagtactctttgcggtcgagcagcgcgtctgggtcggcgggcagctcgttgggccgtagcacgcccgggtcgcacgacgtgatgccgaaggccagcgcgccgggcgccgccagccccggacggcccacctccacgaagaggctctcgccgggccgcagcgggcgctcggagaagaccagcgtgcggccgccgtcgggccgcggtgcgcaggccaccagcgccaggtggcccagcttggccaccacctggttgttctcgagctcgttgttgtcgaagttggccgcgtcgtggctgctgggcggcaggcaggcgctgaagcgggcctggctgaggcgcgcgggcgtcagcgtgtcagcgaaggcgctctccagaagctgcacctcgtcggtgatgccgtagacatcaatgagcgcccagagcgggccgcccacggccacg

SEQ ID NO: 478514 - DNA, 1000 bp, Homo Sapiens
tcactggcacacaagcagagatctcttgctgtgtttgttattccctttggatctcctggtgctcccttgcagagaagcgagtgtgccagtgttcatggactcctgatctgtcggtttcgtcgaagagaggtttagcagggagctttgctgttcaggatgatggtttttcataccacacttgtattttgattgatgaatcacaagtacgttgggaggcagggtaccttcaacttttctgacgttgaactcaggcttcgttttgttttgctcttgggggaatttccagtggtctaaggtgctttcctgagtggctctttccaccaagtgctcgtccaactcgggtacctggaggcaagggtggtctctcttgagctctccttgcgttgctggcctgtctgtgtcttcagcaccaagggctcttggttccctgcctcttgacacactctcactgtgtctttcccattcactcttctggatgtaaaagaggacataggcctgttgactcaggacagaggtgatgccagaggcagtgacctcggcatcatccattttataccactggccttcttgagctttgacataagagaagtaatgtccgttgtgacaactccacccagcgtggaccagcacagcatagaggacatagacaagaggtcctgtgttctgctgagacatgtatggctgcatgtcacggcacttaggatattgcacattcttggcaagtttgttgcctgtgacatcggagaatctcttcaatacaagaatgaggaccttggcagaagtgggtaaagttaacgtcttggaggcaggcgccttctggagacaaagaccacaatgataggcattctctccattgagttctttgggcttcaccaactgttccaaagcttgcttgacactctgagctgcctggatatccagggcgatgtccaggtaagggtcaaaggtgtctgaaacgccgtggcagtggagatacttgatttgagatctccaatacgct

SEQ ID NO: 478515 - DNA, 792 bp, Homo Sapiens
caaaaggcatcttccccacagcctcaacgccgagcaaggagcatcaagagtttgtctcggttgttttgttctttttacaaactatagagatatacagttgataactcaggatttctagccaataaccatatagttaacaccaccttacaaataaaaagaaaacgccagaaacatctttaaatgccttgtcacaccaacggcaaagtgcattcacaaggagacagataaacagtttctttgttcatcctcctcgtccttctccttctcttcttcctcctcgtcttcttcatcttcctcttccacctttttccgggcaactttagcaggacgctttgcgccataaaactttcctttcaacttacagtcaacaacatccttctcatacttctccttcagctttgccgccttagtgacgtaaggctgcttttcactgtcatttaagttattccacatctcacccaacttttttgccacgtctccaatagagatgccggggtttgtggatttgatcttggggcggaattctgaacagaacaggaagaatccagatggtggccttttgggggcattaggatccttcttcttgcctcccttagctggtccataatccttcatttcccgatcatagcacacttcatccgcctttgccatttcaccaaatttaaatttctctttactggacattgtcttccacctcccagagcatttcttggaaaatttgcagcatgtctgcacagagaaggcataagcagacatcttgccctgtggtttcttggggtcacctttagccat

SEQ ID NO: 478516 - DNA, 1000 bp, Homo Sapiens
ttaagctctcagtctcaatgctctctctacctcatctgtcaaagcgtcttcatacagatgtgggtataaaccgggactggtgttattgatctcggccaaaacacgcaggactctcatcttggtggtttcagcataggctcgtggaccccacaggaactcatagcatggaggatcactgttgcacacctgccggtaaaccacgtacttatcttgcaccaaatcttcagtaatgatcttccgagcatccccatagattgaatgcaggatcccatcatatatccccaacagacccaggaacttccagacctcctcttcagtggcacggttgcctctcatgaagatcaaacccaggatcgacatcaggagacccgacttcggcagcgcattatcaccactcagacttccttcattggagagacccagcttgctgacaagggtgtaggactcgccgctggaatccgtttctttcaattcaacgccaaagaacaccgtcaaatgttcggaggttctcttgaggatctcagggaagcatggcttgtactgtctgcggagacgcttcagcatgtctgccttcaaaatgggctctttcttctcaaacttcttctgcaggaattgcaccatcttgtttgccttcctttttataggatctccgtctgtggttgtaaagaacgcagctctcttggaggagcttaaactttcctcatcttgacccttggcagccacatcagattttgagcctgaaacatctgcatcaggcgagccagtgggtgaagctccctgagactcctgaggaacagaggcatcacgggaggtgcttggacttttctcattttgacccttggcagcctcatcagattttgagcatgaaatacctgcatcaggagggccaatgggtgaagctccctgagactcttgagaaacggaggcatcacgggaggtactaggacttttctcatcttgacccatggcagccacatcatattttgagcatgaagcacct

SEQ ID NO: 478517 - DNA, 951 bp, Homo Sapiens
tcaggcattcattggaggttgtctcagaggaaggctcagccatcttggaggcaactgccagtggatgtgaggaacggacaatgatggctgaccaccagcgggatggccttttgtagtcaccccatggcttatgtcacgggccagcaactccacatctgactgaatgaagtgccacgcagggagcctatcagcaagcctcctggccttggaggcgattcgatggtctcgttgcttggcaatcactgtgggtgtcggtcgacctgctccccaacactcacatccactggcagttgcctctgagatggttaagccttcctctgagacgacctctgacaaaggcctgagcacgaaggagcggaaagcggccgatgccaatggatccgagtggagcttgtgctgcgccatcggacagcattccatgatccccatgacacgtagaggccagtcatgaagattttcaaaaacaaaagattctatcctgagggtggcattcgtgccctgagactcagcgagcttgcccatcttccccggcagcagcaggcacacggccatccgaatgtcccgggaggtgatggtcacgcacttggagtagtgggccaggtgaccagcctcggtggcgatgcggtccagtatgtcacgaaccatagaatccatgacactcacggcctcctgggaaaggctgagggcctggtgaacctgcttcagcacccgggggaaataggcggcaaagttcttctgcttctgggccgtcatggagttggcctctttgggctcctggatgctctggtcttcctcagaggttgtcttagagaaagcctcagccatggtggaggcagtggccactggatggcaagaacagacaatgacggttgtggacaggggaagggtgggggggaatttagtgtggccacatggctctatgtcacagtccaactcgacatctgattgcat

SEQ ID NO: 478518 - DNA, 555 bp, Homo Sapiens
ttaagcacgttctccacgtatgcggcgtgctagctggatgtcttttggcgtaattgttacacgtttggcatggatagcacacaggttggtgtcttcaaaaaggccaaccagataggcctcacttgcctcctgcaaagcaccgatagctgcgctctggaagcgcagatctgttttaaagtcctgagcaatttctcgcaccagacgctggaagggaagtttgcgaatcagaagttcagtggacttctgaacgtctaatttcacggagcgccacagtaccaggccccccttctccttcggctggagctcggcgagcgagaggcggcgctggcgttggagagcgacggcggcgcggcggcgcctcatggcaatgaggctctgtagtttatgcccacacatgcaaattacgcttttatagccattagtttgcttggcaatttttctgttcactgaagtacaggtcgttatataggaggtaattagtgagtggagactatttcttcggactgttctgatgatgccaacggcaggtatgcagttagttacttgatagcccat

SEQ ID NO: 478519 - DNA, 1000 bp, Homo Sapiens; identical to SEQ ID NO: 346363

SEQ ID NO: 478520 - DNA, 1000 bp, Homo Sapiens; identical to SEQ ID NO: 346365

SEQ ID NO: 478521 - DNA, 1000 bp, Homo Sapiens; identical to SEQ ID NO: 161411

SEQ ID NO: 478522 - DNA, 757 bp, Homo Sapiens
gagtttttgttctaccgtttattttttatatctttgggtaaaggtaacattccattacctacgagcaaatactttatactacacctttagctatttctcccatataaatgacaaaattgccaattccagaatattgacacaaactttataacactggacagtctttctggcaatctaaaaaatgagaaataaaagccccaaatattaaattgattttctgtgcgtttacttatcacatattagaaaaataaatggttatgatagtctctgaaaatcctcctcattgtttctcatacacatttgtaaatgctagtgtgttttctaactgtatttacagctctttcgtgcccatctctccaattctaccaggtaatgtacttggtctttttttttttctttctttaacattgtaagtttgtgaagcaggatgatgggagtccaggtttctatttctgtacttgtgctccctagaaggaacagagtttggaggactgtaaaagaaaagtggaggtaaaagtgtttcctccagattggaaggagatgcctgaggtgcaagggaggagcagcaggagtggtcagttggatcagatcgcagcaggtgcatttcactttcctgtagcctcatcgtcctagcaatggctcagcattccaaccatggaagctgcagaggagagtagagggacgctggatgggattccctttgactgatgtttctctccagggctctcacatcagcttcattatccgtgaacacctg

SEQ ID NO: 478523 - DNA, 940 bp, Homo Sapiens; identical to SEQ ID NO: 346367

SEQ ID NO: 478524 - DNA, 1000 bp, Homo Sapiens
gttgtttcaaacgacgatttaagttttgaagtaatttgtatgcagaaatagataactattacaaagtccatgcataaaagttcttaagtcatgttatagttgttgaaaccaaggtatcaaaagaccaaatgtattttccatagtcaaccagggaagcagtgacaaaacaagaaatggagtttagatgccagttgattcccagacttattctctcctatataaaggttaatgacattttgcatgaaataatgctagtagaacccacgaggttgttagccatgctaccttccttatcttcccttgactttctttttaaatctctttatagagtaaccgttgagcactgagccttttccccagaaatattatttttttaacaatgcatcctttgtcttttctaaaacaaagagattccaggcattcagtgtgcattctaaaaagtgagatgttgaggcatgggaggaaagtgactttcaaataagcacataatgatcaagtaatcttctctctacctttcatgctgagaacagtcacaaatatttcattcctgagaatcttgttcccaaattgacaatgcttcaataagcacctttttgtactttcttcttaatcaagtagaaagaaaaaacatcataaatacaagaggggtattttcccttctactcaaagtgtgtagccaggagccccagcattctttccacagagagatagtatggttctaaactatcacttaggcgactgagcacagtatttggatagaaggatgctttgtatcaaccatgccaatttaaaaaaatcattgaagaaatctaacatgcactttagtaagagtgaagaactagtaatgttaggatatattctaatacctaacattaggataaaatctaacctaatgttggtaatatcaggttagagtactcccactttataggaattggatatgagcagaagttctttgacagaaaactgaggatcagaagggtaaatatttgtctaaggc

SEQ ID NO: 478525 - DNA, 897 bp, Homo Sapiens
ttctcttccagtctttcagttaaacgttaccatgcatgatcgtgaatgaattcaagcacacctttccttctcttggcttgtgtctaacaggcacattgatttgatccacaacctctggggacactgacagaatcctggttccaagcaggagtgggtaactgagacagtaatctctcaacccactatacaaggctgttttgcaggagagccttatgatgaccagcatgatatataattgtgagaaatatactgaacaatttatgtgtcagacaccggtttaaatgcttttacaacgtaagcgcctccaattctcataaaacccctgctaggtaggcactatcagcctcattttacaactgagggttgcggccagagctgacaggcaccgtctagcgccgcttccaagccccgcatcgcatccaccagcctaactcgggcgctcggcctctccctctgcgcatgtgcatccccgcctcccgctccaggcgagtccttccctggactccagtcccttgtgggaaacaatccctcgcctccggaggcggcgaggagcggcgggtgagccccggagcactgggcgagggccagggggtccccgcgctgccctgaaggcgggcgggcggcggctagacctcggcggtggggagggacccctggcgcctgcggcgacggtgggacgagggcgtctctgtcagaaggggatgaggtctggcgtgggaacgcgagttccggggctcccgggggtccgtatgcgtccagtccctgcgcctggcgctcagcgaagtcctgtagcacggggtaggcaatgcgcactggcccgaaggggagggaactggctgcggggaggggacagcacgcgcgtgcgtagcgtgtgacgtttgttgtgcgcgtgcgcat

SEQ ID NO: 478526 - DNA, 1000 bp, Homo Sapiens; identical to SEQ ID NO: 346369

SEQ ID NO: 478527 - DNA, 1000 bp, Homo Sapiens
tcacagttttgtcattggtatatggaggttgttccaggggcccatccaaagctcttcatcatcagactgtgtgtggtcactatgaaattccaaagcctccttgatgttcttactgtcaatcatggactcctgttcaactgtgcttttcagcctgttccttagtggcttcaccgctgtattgtcagtccccacagggcaaggggcaaatgtaaccagagttggtcttgcattcattttttcagtagaaaatggcccctttgataatgtgttcagaggtacattctcctcatgtgtcactgccaacttgtctagtttcttaaagggccctcccagtcgaacaggggaagcaacttttaagttgtccgtgaggcaggcacggcgggttctcaccacagaaccattctgtgcaatatatatattgccgttgatattactgtggatactaggatggtgaagacggtttctctgacattcaggagcactgtcttctccagttgagctggtttcatactctcgatcaacaactaacttgatcattctttttcttgcccactcttcctcctcatattcttcctcagcttcaccaaccacctcaccatattcctcctgtccagctggtggtaacaatcgacggcgactcccatattgaggcatttcatacccatgctcataactgtaataatcttgtccatattcctggccaggatcaattccagactccatggataattcctctggtttaagaagagagggcctcagcagttgctgttgctctgatccataacctctcctgcaaggcagaaataaataaatcagtattaaacatcttagattttcgttattaaacaaaatgactgacagataagggctttaaaaaatgtctgagtaaaactgagaagacaatttctactaaacactatctcagtgggaagtatattttgtggaattatcaaaacaggaagatcatggtttcacacctgaattactaaaataatgatca

SEQ ID NO: 478528 - DNA, 431 bp, Homo Sapiens
tagcttataaaacaacaaaaatttatttcccatgttctagaagagtccaaaatcaaggtgttggtcaggtagctttcatcctgaggcttcttcgtatgggctcataggcagccgagttctcactctctactcacatggcctcttcttcctgcaagctctgtggtttctccttgagcctggatgacaggatgaaggtgctgtttgggggttataaagggtttttgaaggctagaagatcctggtccactccagaggactacttggtcagtgagtagcagtagtggtcctctttctaccaaggccatgccttggacattggtagactttacactagtcctccccaaagccacatgtggtatccatctttggttcctctgcacagcatatggccatgtatggctctgctgatgaaatgcgagttgccgcaccat

SEQ ID NO: 478529 - DNA, 775 bp, Homo Sapiens; identical to SEQ ID NO: 346370

SEQ ID NO: 478530 - DNA, 808 bp, Homo Sapiens
tgcaaggatgatctgaatttttatttaattttagttaatgcctatcacccgggagagaaaggagggcaagaaaacaaaggcaggatgacaggagggaatgcagtgacagagaggaatccagatgttaggagaagattgggctgcatctcaagggttgagaaagatttcaccagctgcacagagcagaagatgcatccaattggtgatgacgtgatgagtccgcccaggtggggaaattccaggttgcacagtgtggccgcaggtgggaagagagtcctgtggacagttgaggcagctggagggaaggggaccagtctaggttgtgagggactccctctgtcctcctaaggatttttggcttcacattgatgctgatgagaagctccagttggcttttaaggagatatgttttggcagaatcaccttgctgcagtgtggatgatagacagtgtcaggtggtgctgaggctgctggaacctcctctgggttccagcaggagagaagaaggctggtaagcagagctcagtgtggattttagcagctgggatcatggagtgtgataaagacagtttgctcctctgcttgtcactggctccttctccaccaactccagggtccagcacagactctcgcagagtggaaatgaaggacacaggaaccaccgaggaggacagacttgccatctcaggccctcctttcccctccgcctcagttaccatcggtcctgggtataggcgcagcatgtagggtacagggacataatgtggtgacaaaggtgctgtccccttgccaagccagctgccatctc

SEQ ID NO: 478531 - DNA, 471 bp, Homo Sapiens
ttaaacaacaggaatttattttcgcataattctagagactagaagtccaaggtcaaggtgtcggcagggttggtttcttctgaggcctcactccttggcttgcagctggctgtcttctcgccatgtcttcacatggtcttttctcggtgtgtcctcatccctggtgcctcttttcctcttcaaatttccttttcctgtactacttgggtagcggtgataggtgggccacagcctgggccttagagcaaatgcctctggctggaaaactggagggtgggaggggagcagggagagatgcaggctgtgtttgaggatctgctctccctctattccttccatctccaaagccactgtgccaggcactgggatagaccccacagaaacaaggatcaaggacaggcaggctcctgccatcagcaagctcatggtctactggaaaactcgtgacagcttcacaaaatgaactcctat

SEQ ID NO: 478532 - DNA, 1000 bp, Homo Sapiens
tgcactgtgcaaatatattgactttatttgtctcctttcaggagcctcacagacatatccaggtaaaaagatcgttaaataaatgccttcagccatcgcaatgcaaaaataaatatcaatcctccagacgcagtagcagccgcgctgcgcccaaagtcccaacggccacgcctaacaattataaaagtgttcagcgagagtgttggcgtgagtgtgaatgggtgtgcgctggggggcacggtggagcggtgtgcaaaatcggagttgcaaaccatcggacaagggcatggagtggctacccgccgccgactcagcgcgggcgcgcctccccgcacacactcacagcagagttcgcactgggaagagttaaaaaataaacatttacaaggacgaggaaagcggccccgctcccggcgctcccgggccagggcgagcgcggcgaggggcgcaccgaccggttcgcagcggggcgggagtccgagcgcgcgaggagcggcggtcccgggtccttgcgggtcccccgggagcagggcgcgggcactctcggggttcacacgccggtccccgcgcggaccgcggacgcgcgcgtcccccccgcgggcggcgccccttacagggccgagtcggagtcgctggagtccaggctgttcctcagtttgcagctgctgagctgctcccgctgcagcgacaggctctgcgtgctgcggcgcaggcactccaggctctgcaggaacgacttcttggccttctcctcctccatgggggacaccccctcctcctccacctcctggatctcgtcgaaggtcaccggctgcgtcttgaagcgagactggcgcggccgccgcagccggccccggcccttgggcagcttggcgggccgcacgggctgcgggaactcgtcggccaggcacacgaagtgcggcatcaccgcctggtaactggagcagatgcccatcagctcgccgggcttggcggccatggcgcctccggcgtctgcggg

SEQ ID NO: 478533 - DNA, 1000 bp, Homo Sapiens
tcagaatttggggttacaggcctcggtcctgggcgcagtggggagcgtccgaccccggcggtcccccggaagggcgctctcggagggagacaagcgctggagcggaatcaggcaggcgaggctgctgggccagggcgcggggagctctccgaggtgctgaagccgccccaaggtccgcccagcctgggcgaggcccggagtcctgaggctacggcccgtgcggttcccagcgacctctgagattggctgcccgctctccgggatcttgtcccgggctccggccccggcgaccttgggcaaccgactgtccctcacaggcggcggtgaactggcggtccaggctgcgcctggactggcggcgcgtcccatcccagggctgggagagcaggggcgcgccccttccccggcccggaacgctgagcaggcagccgagcgggtgcgggcgagtggtccgcggtgggctcttctctccccggccgaacctctccagtccacccgctcctgcgcttccccaggccccgacggcgcccctcctcgcgggcggcccggccggcacgcagcggcgcggctggagctcccggccctcgaccccgacggatccctggcggcgcagcccgccccacccacccgcagcctcccgctggggtcagactcccgcgcctcgcggccaaaccgccagcggggccacgcagggcgctgaggtcccggagaggcgcgaaaatagctcagggtcccgggagtatggtcagggcggaggcgggagcgcggccggacccagctgccagctccttccccagcccgcgagggggcgccgcgtccccatgacaacgcggacacccccaccccccggagggcagcgccccctgctcccctgcgtcgctggccgtgggcggcgccctctgtgcccaagcagggagctgccggccagcccccgagaggggcgcggaccgccggggtctccgacgccccctccggggcgagcgcgggccgggagcggcag

SEQ ID NO: 478534 - DNA, 1000 bp, Homo Sapiens; identical to SEQ ID NO: 346371

SEQ ID NO: 478535 - DNA, 559 bp, Homo Sapiens; identical to SEQ ID NO: 346372

SEQ ID NO: 478536 - DNA, 1000 bp, Homo Sapiens; identical to SEQ ID NO: 346373

SEQ ID NO: 478537 - DNA, 1000 bp, Homo Sapiens; identical to SEQ ID NO: 346374

SEQ ID NO: 478538 - DNA, 814 bp, Homo Sapiens
gaatgttcgggtgactactgattaatgtagtgaagatgatctgtcacttgccagaccaacaggagttggaaagagaaacctagccatggtgtctgccacagagggaccctctaaagtgctaggaggagggtggggggcagtcgccacctgtgggatgccatgaacagcctctgcaactggccagcaccaggaaggggggcctcctggtggtggagttggagtcctttctggctgaatgaggagcaatgtggctggggtgtgcgggtttctggtgaggtccgggtgggaagccgtctctccgcattctcctgaaagctctgttgtagtttgaaggtcggtagagccttttttcgcctctgtggacacccttttgaaattttttcttccaattgacttggatctcctctggattttttttccctctttcccccgtcggactcttaaataaaagtgagcaagtccaaagcgtggtccggagagcgtggacaaggtaacctgttttggatgtccgggagaagggagtccggccgaaagggcccagcccctcgaggctgctccaactggggcgcgcggcggcccaggagggaggcggggaggtctccgggttgggccggggaacgccggcctccaggctgggtagggaggacggtccagagcgcgggcctccgggtctcaccccgggaaaagtctgggtctgctctgcgctgttgcgtgctgcgctcctgggacctgctgactgtcctcggttttcgtccgagtcttccccggcagtaggcgctgggttacccgcagccctagccaactctccctccat

SEQ ID NO: 478539 - DNA, 1000 bp, Homo Sapiens; identical to SEQ ID NO: 346375

SEQ ID NO: 478540 - DNA, 670 bp, Homo Sapiens
cacagagctcaagctttatgcactttgctatgctgcaggaagagaaaatggagctaatcatgccattaaaccacccacttcgacgactgatatacttgtcatagtccatggaatgtagagaagcatcatattgtcttggaaagcaggggcatcagaagacttcccggatcttccatggggtgtgtgagttatcatttgtaaagtgagaatgtggttacccgtagtgccctgattccaggattgctggttcaacctcagctgaacgtggattccaggtgactcaatgtttttccccactctgtgcatgtctgagaatgaccacaaaggctccacaagcattgctaacataagaagtgcatcctttctatcaagcactaaggagacgggcacgaacattaaaggatgaatgctggcaaacaaatgtattccatggaaaatgaatggagtgttttttctactgcaggccttctttccaaggcgttactactggacaaaatcttgcgatggcctatttgaaaggcagtaggaagccgaagtccaataacgatcataaaatgaatattgaataagctatttactctggtgtagtgaaagacatctacgtttaaacctgaagatttagagatctcatgtatcttctcgtctaacctaagaattcaaaggatgagaa

SEQ ID NO: 478541 - DNA, 988 bp, Homo Sapiens
ctattttgaataagtttgctattggatacttaatgtttctcaagtaccttgaattgcacaaaattattttaacccagtaccatgcctgattgttaatggacatgtgttgttttagtcaattgaaaacaatatttgctacattgatacagagatactctacagttgtatgaaggccgtagccactagccacaagccacatttggctatgggctacttgaaatgcaactagtctgaattgcagtacggtataaaggctgaattttgagatcttagtacaaaaaagaaggtaaaatatctcattaattattaatacattaaatacctattgaaatgataatattttggaatattggttaaataaaatatatcattaacattaatttcacctatttatttttacttttattttaagagcttatcactcagcattatattatacattttaatgcaggaatgtccttattcttggaagagtaaggggctactgataggctagtagagtttggatgtctggcctttccaaatctcatgttgaaatttgatccctagggttgaaggcagggcctggtggaaggggtaatgagtgacttattgctctgagttcctgggtccagatctgattgttaaaaaaagaacctggcaccttctcctctctttctttctctctcatcatgtgatgcctgctcccctctcccttctgccgtgagtggaaacttccataagtcctcaccagaagcagatgctggtgccatgcttcttgtatagcaatcacagcagaaggtgaaggggaagcaggcaccgtcacaacgtagcagtatggtaagtcttgatatgtagtatcccatttaattctcacaatatatgcaagtcccttccagtcagaaaactgattccggagaataacagaaaaaagtacaagcagagtaacttcttttccaatgcggcttcctagaataattagctctaagacatgttttgataccttcat

SEQ ID NO: 478542 - DNA, 1000 bp, Homo Sapiens
tatatgtacagcatgatctatatttatttatttttctccaatttgttttctttaaagaccttaaaatgctggaaagaactccaaatcagatgttatactctacctcattcttttaaaaggcgtaataacatcctatcttaaaatttgacaaacttcattcattaaggcataaccaatttactactcgcagctgaagaaatccccaaggtaaaatcttctctgccccagctctccaaatcttgttctgaatagtggtcccacatctctgaggagttctttactcaggtcccctgggacagagtcacagtatcagcctttatctttaaaaagggcaaccttctaagtgccaccttcaatcaatcagctcccaagtctctcaacattctgaactagctttcttttctatgtgttgaaagtctggcttctccatttaatattctgcctgcattattacttttgttgttaagcgatgcttcactcctttttcctcccactctccaaacaatctgaatagcttccaccagaagaaactgagttttgtctaaaatcattatgtgtcaccctctgactgaaagttcttttgtgttttgtgaatcgcagtagatctaaacccagtgcaaatgtcttagcttgtgtccttggattcttattcaagcagagcaagtcagggtgctagcagggaggcaactaaaagtggtcttctcctttcactctttacaggatccgcgttatatctgctttcagtaactggctctcctgtccgcatccagtaaggtttccactcttctctccgttgactgctgaagttaactccagggcaagcgggcccaggcagcgcactcttggagaaggatgcactggcgcagagcctggacctgctgaagcgggaaggaggagctagggctgggggcggagctttcacacgcgcaccctctgttccctccctccctccctcgacacaagcaactgggtctccagccgccacggcttgcgtcacaat

SEQ ID NO: 478543 - DNA, 712 bp, Homo Sapiens; identical to SEQ ID NO: 346376

SEQ ID NO: 478544 - DNA, 833 bp, Homo Sapiens
ttagtgagctgcggtggtttttgtttttgttttttttttcttgacagtgtctcctattgttttgtatttctcttttgttttgaggttttctgccatcttttctggaaggtgcatgatgctcagctctgtggttatttttgcccaacagctgtgtttccggtgagcggctgtgggattcttctgactcagcaaaactggagcagtaaccgtcaagaagccattcaagcaaggccgctggcacaggatctggccctgcactcccgagaggtggctgcgagccttgcggaggcagagagagaacaaaatggaaaggaatcttcctcccggagagccatcttctgtgcatgccggtgcctgcaaaagacaggcgaggcgagacagctgcacctcgggcctcgtcgctgttgcttttttttttttttctcccaatagagacaggctcttgctatgtttcccaggctggtcttgaactggcctcaagtgatcctcctgactcagcctcccaaagttctgggataacaggcataagccactgcacctgctcggtgctggagcagaacaagataaacaggtctttgtcttcatggaactcatcactggttccagtctttctgggagactaaaagatgtagaggcttctctcatttatcctagaacatggctatgaagtagtaaaggtggatcatgacagatgaggcagcaaagaagccgagaggtcacgccacctcccaaggtcatgcagctagatggagaaagaggcgagggtggaaaacgggcttcatgtctcttggtccactgcaaaacacatgatagccagaccagggaggaatcgc

SEQ ID NO: 478545 - DNA, 771 bp, Homo Sapiens; identical to SEQ ID NO: 346377

SEQ ID NO: 478546 - DNA, 1000 bp, Homo Sapiens
tcagctcaccttgcgccactcagatgaacagtgcagcagcggcagtgtggctggctctgctcccgcaccgcgcgtcctccctggtcccacaggcagccaggcatgtccccctgtgctgatggcagaggcacagggagtgagcctcagtgaggagctccctggagcccgggcagcgcctgtccactgatgtttcactggacaacgcaggtgacatggctttgattggagcaggatattccacacctgagagacggtgagccgaggggtgacccggggcagggagcaatgaagcccctgaaaatgcacaggctgcgtcacgtgggagggaggagtgactgtttctgagagcgaggagcctccagactcatttccacggttcaggagcttgtcactgctcctgacctgctgctgggtcctcctgggtgcttcaggctggagcaaggagcacgggcggctccggaggctctggagggggaaggagccacccagagcccgggggagcaggagcagcgtgaacagtgacttgggggttatttgttgggtgccctgcagacttggctggaggtctgggttctgtgcagggttcagccttggccttttcagattcccgctccttgactgccgatatggatcccccctctcccccgcactccgaagctcggcgtgttctgcactcagtggccacagagcccgggtcctggcgcggatgcgctggggctgaactcctactcctgacagcgccgtccagagaggtgcggcccgcggcggggctgggggagctggggacccgcgggcccagaggaggcgcaggacgaggggggccgagccccaccaggaccgtcccggaggcctgaaggccgtgcctggtgcccgggcaggtgtgaggaggctgagcccccgacagcatcctctctcttcgttcccagtccccacgtggggccgagcctcgatgccagccccaagcccgtggagcccgctgtccccttgtatgtcggcggca

SEQ ID NO: 478547 - DNA, 688 bp, Homo Sapiens
aaaactatatattgtttttattagataaaaataacttgctaaaaactgctaaccgcagtaagaagtgaaagttcattgagaggttggtgttctcgaggaaggggaaggcggagaccttgatttctgagtcccaagaggggctgcttccaaactgagcctcctcagacaggaacagctgcactcggcaccgagtgagaaggtgtggtggagcagctgccaggctgtgggcgccgtgatcctcctggtacttctgtaggagaaggcacagcccctggagggcgggagtggggctgctgcagacggctgtctcctgcctcctggctcttgcactgccaggaacacgctctccccaacacctccatggctcattccccaaattcaagcttgtagttggttgaattgtggccccagagatgggattaaggattttgagattatgccagattatctgcgcgggcccaggatcatatgagtttgtctcttctcccgaattagttttgtccgcgctcggccgccgtgcagtcggtcgttccacttccgccttcgcccacgtggtccggctccggctcagtcagccgcgtcgcgaatggggcaggagcgagcctctctggtcccgacgcgggtggcccgggtctcctcgactcctgaggaaagcccaccgggcggggcgggaggtgaagaggctggg

SEQ ID NO: 478548 - DNA, 1000 bp, Homo Sapiens
acccgtggcagacggcatcatctaggaagaatgtctggaaattgatattctgcagttcagattttaccagttcacaacgtaaatatccccaggagcagccccacagtgcaaaggagcccacacagcggctaatggctgctcaggtttgtgtgatctgtctgggttcaggcacaacctccaggggcctctggcccaggttgcatctttccacctggagcctccatttcctcatcacaaaatgggggagataatcttcctgtgcagaggtgatgagatgatgactgcaaagacacagcacggtgcgtgccacagaggaggtggggttcagtcgatagtcctgaatcctcctgcttaccaacgagctcccggttcccacccatgccagggaggtcagtaggcagcctgggtgcctgaaggtccgtcctaaggatgaagtctgtgggtctccacaccagccattgtgaggacaggatgaattcatttgcagaggacaagcacaaaatctcttcctcatcaccgcagggactcaggggcggttgccttttgaagccacgtcctgaaggcagccctttgagagtccttttggagtctgacctctgcagccacatctccttaatcgtggtcatctcagctgctcttgttgcaaccttctccgggtctctcctcttcccttgcagcaggagtaagaagcgcatggtgttttctggtgcgggctcccagtggttccctgccaggtcgcagtgttcagtgctggagcgcgtgtgaatgtctaccatgcgctgcccaccgggccaaaccctggtcaccagggcagctttcaactcggcaaaatggacactgtcatcatcaatgatctcttcactggcctcaactccatggtcttcaatgccacgactggcattaccttcaatggccactttgtcaggctcctttcctgggatgaatttggcagcagcaacagggtggtggaccttatggtccacacggcctccaaggagta

SEQ ID NO: 478549 - DNA, 438 bp, Homo Sapiens
taattttgaagaaaagaaatttatttcttatagttctgggggctggaaaatccaagatcaatgtgctggcaggcttggtgtctggtaagggcctggtttctgctcccaagatggtaccttgaatgctgcatcctctgatgaaaggaacagcattcctcctggcttcccgcctgggtctcttgccatgcctcctctgtgtgttccacttgctgggtcccctctgcggcccctgaatgctggagctccccacagcttggtcctgggccccaactgccatgcagtccaagtggttccatctcttcttagggctttaaccatccttgctatgtgactgtactcaccattatgttctgaggatagtccctgcacttgtttattgcgtgttgggaaaacccgatgtaggtgaaggaagaaagtttttgactgctttttgtgcat

SEQ ID NO: 478550 - DNA, 471 bp, Homo Sapiens
caaatattgaaagagcatttattgaagatttgaaagactcatttgtgggaaaatatatgtagctctaaaagtgagctgctgagagtaaatatgtaaaaccacatttaagcagcatgcaattaacgtaaatttataatagaaaaaaatgaaaaacatggtgagattttggtgaattatgatatttgaacaagggactgttttctttttcttcaaacaggaagctagctgtgactgcgtgctccttaatgaactgtagtcgcagccacttgggaagttgaggcaggagattgtttgagcatgcagattttccttgacctcttccatctctgaaatggaaagtccaaccttcctcttcctctcttcctcagccatgtgctaagcccaagttgctctctggtaaatcgcatttcaaattcccaaattcgactgtctcagcattagatcagatgcatttctcattcagtctttcag

SEQ ID NO: 478551 - DNA, 1000 bp, Homo Sapiens
ggcggcagtttgccctttacgttctttgggtccttcgtctgcagtggcgtttgctggtgagctccccgcaggtagcggcggccgggcagagcgctcctcctcctcggtcgttctctcttaaatgcaaagcgtccccaaaagttgcgtcgcggagactcctcgaagttgagccgaggagcccgccgccgcgtgctgccaagtgccaaagggggctctcagcggctggagtgtttgggttctcctcggtgactttctcatttgacagaagcagatgggggtggggaaggcggggaggtggccctggaggaggaagaggagggggaggcggaggagtgtccaggcgtgccacgagaacgcagagcgcagcaatggatataaatacaaatacagcagcaccagcctgtcttcttggctccgggcagggtgcgccgatgggaaacccccaatcggctgggtgattttttttttttggaggggggagctgtcccccgcagcacctgcctctcgagtcttcctctcccgctgctggactgacgggtggggcgaggaaggagggtggatgaggcttgagcaagcgttggtcgcccggcctcagaggaagttctcccggctcgccgaggagccgcgtccggccgtcccctgggccatgccggctctgttcgctccgagccccttcaggcgcgcctgccgacttagggctcccggagctcgccggccgcggagggcagcgcagcctccacgcggcgccgcaggcctggcaccggccgcgtccccgcctcgctcttctcggcagccgcctggcacttgcaactaacttcgcccaagtttcctgcgccgcggcgcccctctcggcgcgctcctgggagcgtgcgcccgcgagtccgccgcgcccggggcccctctgtcctcgctgctgtggccagagccgagccggcgcaggggcggaggtgctgcatgtgtgcgcgcccggagccggcactgggtgtgcatgtccagccgc

SEQ ID NO: 478552 - DNA, 519 bp, Homo Sapiens
ttactgatgtggaacctcgggaaagctacttaacttctccaagcctccattttctcatctgtcttattttttcttgttcagtgtcattggagaacattcggaggttcttaattgggggtcttacatgagtttcaaaggcttcctggaccttctgaaaatttctgcaaggttttgagtgtatgctcatgtttctgagagtgagtccatagtttggatcagatttcaaaggggtttgtgtccccataaatggcaaagaagcgctcttttgcaacaaattttccaggaaagagaagagcagaaaatcctttctccatgttgacagctcagttaatttcatcacacttggcctcttaaaaagtctctacattcttctcctcctcttcctcttcttcctcctcctacttttccttctccctgaggtttgtcagcagaagagcatggctttacttctccctttccttccacatgttggagctgtgtgaaaatctcccatggaagaagacaggatatgaattcaac

SEQ ID NO: 478553 - DNA, 1000 bp, Homo Sapiens
ggcggccgcaaggagctgagattgcaccactgcactccatccagcttgggcaacagagcaggactctgtctcataaaacaaacaaaacaaaacaaccctcttcatttcttgtttccatcagatccttcaaagagattcatcctcttggttattagactctcctccaaatgccactgagcactacctgcatccaagttgatagacccgctggctgcgcaccctctgcgctagtgtaggacttcccaagtgcgctcctgacgaagacgtttgcacaggacgctggggtgaatgctcaggcctgccccaaacccctgcagacagccccttgggatcaacgccttagcctggcttcaacccatgctgggcggggaggccgggtctgtagacacagaggtgaaggatgtactcacactgccgagtgcctcccgagactggcaggacaccagctcactgtggacgagatgccgagacctctgtggccatggccgtcgcctccggtgtgtcttgaacaagcctgatgacgtcagacacatcaatttggtgatccgtttcctcctttttggcctcattgggccgttgtggggaagaataactgttgcttccaggtctcttgcacaggataaatctccaacagtcaaacatgaggctgcaggtgcccagaccaccccacaggcgctctcagggccactgctgtcagtccccagggagctttgcaaacaccaatgcccggccctggagagcaggcccgtcccgagaaccactgccccaccacatggagccctgaaggacgaagcctgcccaggacagggtgatacccatcgccaacccacagtccaggtcccaaacactccagtgaaggctgcagatggcacgcgcggcccgtcacactgacatggtggaggaagggatgcagcgatccctccgtccacagggcaggtccaggccatcctcttccgcagcaggtgccagtcagctccggggtcctgaggacccctgggtg

SEQ ID NO: 478554 - DNA, 1000 bp, Homo Sapiens; identical to SEQ ID NO: 346381

SEQ ID NO: 478555 - DNA, 899 bp, Homo Sapiens; identical to SEQ ID NO: 346382

SEQ ID NO: 478556 - DNA, 1000 bp, Homo Sapiens
gggagtgcagatatctctttgatatactgatttcctttcttttgggtatatacccagcagtgggattgctggaccatatgatagctgtatttttagttttttgaggaacctccaaactgtttttcatagtggttgtactaatttacattccccccaacagtgtacaggggttcccttttctccatatcctctacaccatgttttatttgtctattcatctattgatgatacttgggttgtttctaccttttagctgccatgaatgttgctgtgaacattagtgttcaaagatctgttaaattctcttctttaagtggaattgttatattatgtatttggcaattctgtatttaattttttggaaaccaatcaactgtcttgaatgcatgaaatttacattagggcatgtgattgaaaaaaatacaaatcttctatatagaatgctgaggtgaaattcaactacgaaatagcaaatggaccaacaggaccaggtgtgtctccttggtttgtgggttctgatcaggcatagagttaagggaaatcagtgacggtgaacatgatgaagtcagtgacggggaacatgatgaagaagagatcttccttgcctcactgtgagtccttcaccaacaagcggccatccatttctgtctggttcctgcccttcccgggtactgtgggcccagtctgggcttctctttgggagcggaccgtggcttggggcgcctccccgaggggacccacgcgcccgccgctccagccgccatttcccagcaggcctccagggggcctccccgccgctgccttcccgtcggcggcgccgggcacgggggtagccgcgcggcgcaggcagggacacgcctcggcgcccgggccagcgcgcggacaatgaccccttctcccctcgccgccgcctcctccccgacaccgccccctcgcagctcacaggcaaacctattagccattcaggccgacaaaaccccgcggccccgcgcattgtccc

SEQ ID NO: 478557 - DNA, 1000 bp, Homo Sapiens
ttatttgcggtccaggctggcgtgtagctgggcctcccgcaccatgcggtcgaaggatcgcgtgttggtctcctcgcgcaccttctcacgcacgtggaaggaagcccgggctgtggagcgggcgctctccagcgcactgcgccgttcccgcgtcagctgctcgctgcgctccagcttgcgcccgatggcctggagtagctctcgccggcggcagtcttcgtccctctccaccttctccttgttggcgcgctgggctcgttccttctccagccggctctggcccacgcgccgcgccttctgctgcactgcttcctcggccacctgcgtcgcgtgctgcagccgtcgctcccccgcccgggccagcgcctccaggtgcgcctgatgttcccgctctttgcgctctgccgcctccttggcccgccgaccctgcagctcctctcgccgggcccgctcccgcagctcccgggtgcgctgctccaccaaatgctcgtagttctcctgcgcacggcccaaactggcttccagcgagctccgcaggccctctcgctcctggcgctgctgccgggtccgaccctgtagcagcgcctcgtggcgcgcccgctcggcccggctcagctcccgcttctcccgctgcagctggccctcctgccgctgcttggcgcgggccgcgcgctgggcgcgctccctgcggatctgctcagcccgctcccgcccttcctgtagaccttcctcacgttgcttcaggttctgctcctgctgaagcttgcgcagccgatcctcccgggccgcgcgctccgcccgctcccgccgcaggaggccctggcgttcggccagctcccgccgccgctcctcgctgcgctcgtactgccgctgccgccgccgcgccgcctcgcgctcttcgcggccacggcggcctcgccgctcctccacctgcgcggcccaggctcggcggccctgctctagggcgcgctgcttctcccgctcctcgcgctcccgccgc

SEQ ID NO: 478558 - DNA, 1000 bp, Homo Sapiens; identical to SEQ ID NO: 161414

SEQ ID NO: 478559 - DNA, 623 bp, Homo Sapiens
ttttttttttttgccagacaatctttttattgttcactgaaaaatgcaggtctgcaaagagtcaattgcattgtatattgaatgcaaggtctgatattgcaagtatatatgacatggtataacatataaaatattacatattttacacagtgacagtacccgcctcttctaaacactaaaatttaatagaatgaagtaaaaagcctattaaataagaaacaaacactgcaatcataaacaaaatgcactaagcaaaatactttaaaattgttgtgtgtgacatctatcttgtctacctggagttaggaatggtggagcccagaaaaaaactgagctaacaaaaacagccaacaccctccaggaactcttccctggaatcaggccgctggtgcccgtcacaggctgcccccatctgatgacccagccaggcttcagggctgcctgagggcccacactgaatgctaacgcctgtctggggctgggctgaggtgaatgggaggagtaccaggtaggaagaagcttctctcccaactgcttattctgcatccatgctatggatatgaacacctagtgtttctggtgtgaatctgccactctccacaactacgcagtctgcagatatc

SEQ ID NO: 478560 - DNA, 1000 bp, Homo Sapiens
agacggcctcccgtctgccccgccgctacccgaaaggagggagccccgtccgcattttctgttcggtccattttagttcgagaggggctaaggactcgccgggcctcggctggggcgtccgacgtccgggtcacggttggcaaggcctcccagcggcctcagtttccacagcgcacctcctgcttgggctacagacgacgctgcaaattgcagaacactctttgcagggaggagagtgtggatggagtgggagagagctcacggcacagggaatcattcagccttggctttcatttctcgccctcggctggctagtgggggtcccgggttgagcccttcttttatctttcctgggtctccgtttcggcctctatgaaataacacgcaggcctccgtccatgcggctcgtagaaggcgggcggcaggccccgcgccaccggccagcagctcgggaccgggagccctgggctgagggggccgggaagtttcgtggcgggttgtcttggtgggccttggacggagccggctagtaggggcgtgctctgggcctccccgaagctgtgcagacgaggagtcccgctgcgcggtacagccaggaagccagtccctagagtcctttgcgctgggggtcggagccttggagtcccaggatgttccgacggctaagaccagagcggacacaaaggagataacaatgaagagggcgccggcaaatggcgaagcatcgcctccggacaggccatctccgggcagggcccctctagggagcgggaacgtttcatatgcatgggacccaccagatccgctttccgctggaccggtggcgaaactgaggtccagagaggaagagactggagtctccaggccgcgccagggcccgcggaactgcgacggggcgggacagcgcgggtgtgggagtttgccggcccctttccccaccgcggattgcacctttggaagctgcacttttcttctctgtaaaatgggcatcaccattacc

SEQ ID NO: 478561 - DNA, 1000 bp, Homo Sapiens
cagagcggcaaaatcccttgtttatacttgcacatcctataagtgatgtggtggtatgcttggcgtcagggcacaagtttcagaaacccgttcagtgcagtctccctcctccttttcctccaggaaggctgtgctaaagccatctgccaatgtcaggccacattcactaatactcaaggctgcttctttattcttctttcttgaattcctgtagccccagtgtccaaatcctatggcttggcctggaatttatctaccaggcctggccagggctctctgagaacaggacagagcttacctccaccggaatatttccctgtggtgggccagcaccgagcggttgcccactgggggcccaagcagatctggggcctgagggagagcagcaggggtgtcgggggccccaaagcctggacagctgttccagtgccagatccacagagcccagtgagccacatctggattcttcctccctgttcttctgtcccccagaacccagggaccctccaggagccccgacctgggcctccagggatgctcccctggagtacaaggggagtccagccgcagcttccaggaaggccctgagagatgttggtttgcagcccctgacggtacagctgtgtgtgctgagtcagggtagaggtgtggtctgaaccatcttctccctgggatgaggcctgggggtcctggctctccggccgtggcccccttagatcccacggaaaaacggctgcttcccagaatagcaaagccataaatctgctgtaacagcgcggaagctccagagtcacttggccatccattcagaagctgcccgtatttgtatttgcttttgaaagcaaaaggagctctcttccagagcagctggtggtcagcctgaggcctgcagagagtgcccgtggtcagccccagcacagtggtttcaattccagctgcaggagcatggggacagaggggcatgtactgggagtagatgggtgggagttccttaagggag

SEQ ID NO: 478562 - DNA, 431 bp, Homo Sapiens
tacaatctgagcacagctctttactattcaaataaaaatatttgtgggtctacaaaaagaagcaaaaccacaaacacataattcagtactaaaccccacatagggaggcccacatttcagctgccttcagctaaccaggacgtccaggctgccggcagtctcttcagctggcagggaaaagggtaggccagaggcccccgggaggtgagctccagtgtggcaaaggtcagtcccttaggtagctctgtgcttggggcaaggcagaggggccccgtggcctgggaggaacacatcctctcctctccagcagaggagattgtggtatgtggcagcagccaggaaggcagtgattccccagtgctggggcagagggagcaggccccagcacagatgtttccttccctctctccggtcagggccgtaggtgccat

SEQ ID NO: 478563 - DNA, 722 bp, Homo Sapiens
cctcttggcatgataagtcttaagtcccctcccagatctgtgacatttgacaggtgtcttttcctctggacctcggtgtccccatctgagtgagaaaaggcagtggggaggtggatcttccagtcgaagcggtatagaagcccatgtgaaaagccatactccaaggggctccaagtccagcgcacagggtggagaaccttcaaagtccaaagagtatgacttgttgggattcaacgctgtaggcagtagggagccatggaaggctctgaggtggagaaatgacagccggacattagtgagcaagccctgtctccgtgagcagcatgggtggtcctctgagcacgccaggcacgagtgtgcagggagctggtgcaaatgcctctgtgtgcgggtgagcatctgtgttgtgactctgcccacgcatgtgcttcagtgtgccgagtggctgcacgccccagatccatgtggcacgtgccggccggtgagggtgctgggcattgggaggtggcggggagggcgacgtatgcgtgttgtttgtgggcatgtgtgttagcgtgtgcatgtgggccgtggggcctcacagcatgtgtgtgcacactccggcatgtgcgtgtgtgtgtcccccacccccaggcctgccccacccatgcatgtgacctgccatgtgatttgaagctgtctttcagaatcactatcagtggcccctgaggagcgtcagccat

SEQ ID NO: 478564 - DNA, 630 bp, Homo Sapiens
cgggtgtggtggcgggcacctgtagtcccagctactcaggaggctgaggcaagagaatggcgtgaaccggggaggcggagcttgcagtgagccgagatcacgccattgcactccatctggactacagtgagactccatctgatgggccctcgaggccaggctgtaggcaggcaggagggggctgaagcagtggggtcaggcccggggagcgggggccctgccttccttcctcaacacacggggctgcccaggccccgctcctggggccgggcccacacctcacagacactggtgttggatgcttcggcttgaaggagctccaaatggactagccgcagctgcccctgggtccacctcggcgcctgctgttcccccgccgggcgcgcccttccattcgggtctcagcggcagtgtcacctccccggagaggcccgccgttgcaccccatctcccactctcaagctcgtcgctcttcctgcccgcacagcccgcctgccgcgcccacccggtggaggtccgcctgccgggaggccgcgtccacgggaacaccccaaacgccaccagtggattttgaccgcacgaacgcacgccctgccccagcccgtctctccgagctacttccgccgtcat

SEQ ID NO: 478565 - DNA, 1000 bp, Homo Sapiens
taaaatgctgcttatttattaacatcagcctaatactcaaaaaaaattgcctggaaaacaaatgttcagaagcaccctaccacagaggctaaaaattcagagccgttccagagaaactcagaaaatattccttaattgtagaagttcaatggcagcaggaggttatcagttacaagggctgtatttcattacagatccagccgcagctcaataaattaagcaatcactcagaataacatgttgctttaatcccctctcttggagcggttccaagttgtttggttttatacacgctcagccctgaaaggggactcatactgggctcatttctttcccctcaattcatcagcccctctctggaaacatctttgcatctcccaaccagcaggagagaggattccaagccaagcaggcctccttttatcaaaactggagccttttccatcctctggccttgacgtgttccacgtttcatttgctgaaattactggcaggtttatctgccgcgatccctgccttggctggcggaaggtgccaggcgggaagaaggggagcactcaccgccgctgccgcctccgggggtgcacgggcccccccacccagggctgcgccttcccgggctccgggcaggcgtgcgccgggcggggggcgccccgcgggccctgcagcctccgcctcgattggagcccagccttaaatcctccaccgtggagaagaagggtacttccagaaaaaaaatccgcccctccccagacgagatccaagtgatgggcggggagcgtagaaaatccttttctgcagagagcgcgcagccgacggggctgcacccggcctccacggtccgctgcatccaggtttctagccccagggcgatgccaaggccccagccagaactagggagcggccacgccaggcagaaggagccctggagggccgcagccgtgctcagcctctgggaaagtcttggactctgggctcccaggcccgcacagagagggtg

SEQ ID NO: 478566 - DNA, 555 bp, Homo Sapiens
ggctttcatatatccctttatttcttgctaccatgcacttaaaggactcccaacagcgggtcaacccggaaagtctgacaatgctgccccccacagcacagcgctcggcacagcgttagggacagaagtcatcggagttttagcacagggcagcggtcccaggctggctgtgtcctccggaagagaggagaagcatcgggtgtagtcctcgcagggcaatgctcgccggggtagggacaatgggcagggggcacccgaggggttgctacagaggaggcagcggcccgtcccagatggtcgccaaggaccagggggcgattgagcggcagcgggcgtcccgctggcctcgggctgggctgtggttcggtccagagccgaccggcccatagtcaggtcggccacctgctgatgaggttgaactgcttcttcaaggcagcggcggcggcagcccgcggggcgccgcctggcaggtagggctacacccagacggctcctacatggttcacagctgaggtgaccggtggctgcgacggctgctgtagctacccgggccat

SEQ ID NO: 478567 - DNA, 1000 bp, Homo Sapiens; identical to SEQ ID NO: 346385

SEQ ID NO: 478568 - DNA, 645 bp, Homo Sapiens
tcacacccggggcggccgcggcaggtgcagtgcgaggggcgccacctgtaggctggtgtgggcactgcctagaggttgctgtggcgccgtctggaggttgccgtggctctcgttggcgcccagcgccgcgcccggggcttcatggctgtgtcgctgctgccccctcccagggccgcagggcccgggttccacttggcggcgtcttctcgcgagtcgctttcgctgctccaagaagtcggcggtgcagcaactgacgccgctgctgctccggtcgccgcaggtcgccatattcctcgcgggggccggccgggctctcggctcaggccgcccaccctgctccggccgccgccgcctctccgttcccgcagccagaggaggcgagggagcgacctccaggcactgggcgcccgccgcttccccagcagccggcggggcggggaagaaagacgccaggaagcggaaggcccccgccggcccgagggtcgcccggggctgtgccccatggttcctggcccgcgagcagctgctgggacccccccttgccaagttgctccccgaaaagctctgaggaaggtgagtgagtgcagacagatggggcctggtgcccttgagcagttcccgggtctcagctgccacacatctcat

SEQ ID NO: 478569 - DNA, 1000 bp, Homo Sapiens
gaagggttagctgtgattattattgttatcattcttagtattatggttcaaggtcggttgtgatggccacagatttggtcacagggagacccctccaacctccctggcctcaagtcttactgggggtgggatgggttccctggtcttggtttcccatgagctcctgcctggaaggggtggctgtccctgtggcagtggctgacttccacggatccctgaggggagagttctgttgaggttggtgggggtgccctccaagactcctggttgtggggaggggtggaggctgcctggtgtggcagctgcccagggctggtttctggagcacagctcagcagatgcctcaggaacctgtctggcaacaacattcctccgccactcagagcagccagctgtcactcgcagcccgtgtggttttgtaaggcgcagacaaggaacgtcagctgcttcccagcagggcccgtgagtcacttcggcagctctgagcccagagtttcccctgtggcggccaaaacctttgcctcttggcccagcttctgtcctgtgaccaaaggcgggtcttctgaggccttcctcaagaggaagccaggaggggcaggccccaggatcctgaagacacacgggaagacagatcccaccgcacttccttacttcctcaggcttctgggtttggggcaaggagtgtcgtgatttgggttgacactttccgggcctcggttttctcacgtttttggagcctccgtttccaacatcaggtgcagcagccatgtgggggcacccccagcctccctggtgagggtgactaaggcatcagtgttggtcttggagggcatcctggtagaagagtcaggccaggtgctgatgtggtcccagatcagccaggttgggggtgatgggcagagtcttgtaagcagcccctcgggctttggaaaatgcttggaggggatcctgtctaccagggaccgcatggcttttatgtccaggagagcatggggttctg

SEQ ID NO: 478570 - DNA, 767 bp, Homo Sapiens
cagagtgagactccgtctcaaaaaaataataataaaaataaattctaaaaattagccacaaaaaggtagtgcctttaagaaaaacactaacctggtcctatgtgagtcagcagccttattgggttggatggtcagatgggagaactaagttgcccaaggctgggctgcttctctggagagcccctgtcatggtttctctcggtgtccccatccaaatcgcatctctaattgtaatccccaggtgtcgagggagggacctgcatctcagcagagcttccacggagttggaaccccgctccgagagggtgtgggctcaggggccaggggtcacacaaactccagaaggaggacgtagttggtttgcaaggctgtcctttgccctggttgaataaccttcggtctgccccgagaggaacgtgggcattaggctgcagcccgcaggaagccatgtattttctgagaaacttggcccatggtgcagatctgctccagctcactctggtgggatcacgccagccacggccgggccacggcacatcatggcaacgtgctgcccacctgctacgccgcctgtttttcagaaggaccatagccgaggtcctcctcccagggcccggggctggggagcggaagccatcagtgggctcggaggacactgtcccagccaggacacggccatcggtcactaattctgcctgctgtcgggggcgggctggccaggccgaggccggagcaggcaggcatccccgggagttgtctcttttcat

SEQ ID NO: 478571 - DNA, 1000 bp, Homo Sapiens; identical to SEQ ID NO: 346387

SEQ ID NO: 478572 - DNA, 504 bp, Homo Sapiens
tcagagaggcagagggcattgggttttactaaaatatgaagacatacgtcctgtctccacgtcagcaactgcccaaagtacacgcgttccagcgaaaagagcgggtggggtggggaggctcagggccagccagagcttcggtgcttgcacgcccaggcctccgggtgacgactgcttccaattccgcgcccagaagcgcctatgcaagacgcagggccccgcgcgggctgctcccacctctttctctccttgcaggctaccgagaccctggctggggcggccggcggcccctccggcccatccgtcggaaatgatgagtggctccagtggccggggtccgcaggacctaccccagcgggcatggcgggagccccgcagccccacacagccgcgctctgagccgctgaccccgcgtctacccagcgcgcaggatggcaggcaagtgagtcctgaatcctgcccgcggctacccgacacctcgcctgtgagttcccggcccggcat

SEQ ID NO: 478573 - DNA, 1000 bp, Homo Sapiens
ttttttttttttttttttgagaccgagtcttgctctgtcgcccaggctggagtgcagtggtgcgatcttggctcactgcaacctcttcccgccgggttcacgccattctcctgcctcagccttccgggtagctaggattacaggtggacgctaccacgtccggctaatttttgtatttttagtacagacggggcttcatcatcttggccaggctgatttcgatctcctgacatcgtgatctgcctgcctccccctcccaaagtgctgggattacaggcgtgagccaccacgcctggccaaggcctgctcctcttatctataccccctacccctgcagctgtgccgggggaaagctgggcagtttccctcctccgagcccctgtacataccatgaattgtgggaccttcagagcttttcacttttcggaaaatagctcctgctggggctacaagatggagtgtgaagagggccttgggccacagggaggcgcctgtggactagggggagttcatgcaccccttctttccccagaggggctggactcaggtgagtatgggggtgggggctcctgcacttcgacacaggcagcgggagggttttctccccattccctctgcactcccaacttgagctatactttttaagaaagtgattcaccctgcctttgcccccttccccagaacagaacacgttgatcgtgggcgatatttttcattgtgccaaaaagttgccatgaccgtcattaaacctgtttaacaccaaataataaggaaaataaaataaaaaattcgggcttggcgcagaaactcactccaaataaattacctatcaaaatatttacataatggtggaaatattccaaaattcaatattttgggatttatacacaaaagataaacaaattagaggccaagaggctgccggaagggaaaaacggggcctggaatggccgacgtgaggaatgagctgggcctaaagaggccactggcaggcaggagc

SEQ ID NO: 478574 - DNA, 767 bp, Homo Sapiens; identical to SEQ ID NO: 346388

SEQ ID NO: 478575 - DNA, 704 bp, Homo Sapiens; identical to SEQ ID NO: 346389

SEQ ID NO: 478576 - DNA, 1000 bp, Homo Sapiens; identical to SEQ ID NO: 161416

SEQ ID NO: 478577 - DNA, 644 bp, Homo Sapiens
acgtgtcctatcaattccaaggactcatcatttttgtattttctatttttctattccaattcttcaaagtgagaaagcagaggtcttaaaaccctgctccaagtttccagttggagctgtccagcctcctgacctagtgtcagcagagggcacaactgagcctcaggtgcagtgaaaagaggtttcttgatcccagccagatctcttcttaacttctatgttccaggtgcccctcagctgtacaaaaagagttgcttctgagattccaggttgaggcctgggaactggcagtcattgtgacaatggtgagatgccaggagagagatgggaatgaagaagtttccagtcactcgcttctggctgaccttaaggctctgtagcaagcagaaaacgaaagctaaggctgtcttgtaaactgcctgaagtatgaaggcatgccttctcacacagattccgggtttgatatggtggatgctggtttgggaacttctgtgcatgcatggcaccatctcctgtgaacactcatgggagctcaggcctgatctctacttttatagagatcctatgaggaacataggaatccccatctcatcccatggaatgcaggccatacaggggatcaaggccctttgttttgggttaaa

SEQ ID NO: 478578 - DNA, 1000 bp, Homo Sapiens; identical to SEQ ID NO: 161417

SEQ ID NO: 478579 - DNA, 1000 bp, Homo Sapiens; identical to SEQ ID NO: 346391

SEQ ID NO: 478580 - DNA, 1000 bp, Homo Sapiens; identical to SEQ ID NO: 346392

SEQ ID NO: 478581 - DNA, 827 bp, Homo Sapiens
tcattcatcgagtttattgagaacctgctgcccgcaagcaccactctggagatacagctgtgtacaaaagaaggtgcctgctctcggggagcttataatgcagttggcagaagacagacaataaacaaatatttaatacatgccatagagaaaattatagcaagagggcaagggagtgtggaaggtgggaaggtagtcctgggtttccagggcgatctcatggagatgacatttgggcaggaagtgagggagtgagccaaaaggatgagcttccaggcagcaggaacagcctgtgcaaaggcccgttgactctggataatgattgggtccttccctcctcctgggagaaaggtgcacaggcccctcccggaggtgggctgccatcagccaagagcacgtggaccatctgcaggtgccctgctccatgtccctggctgggaaatcctgttcactggctcttgatctttctctaaaatgaggggacacttacccctttgtatcccaaacaaggctaacgaaagctccatgagggtgacatggtggaaccccaattcaccctgaaggcggatcccttgactcccgagaggctggcggtggagtgcgcggcaggaccgcagggctgatctctccagctgggctgggctttggggacataggccttgaaaatctcctaattaccggtgggggcggagccgcgtctccagggtctcggggagggcgtcgggggtcggggattgcaggtgcccgcagccggcctcggctgtttaccaggcacccgttacgctaattgaaatgtgccaaatagctgcccggggcggggccgagcg

SEQ ID NO: 478582 - DNA, 829 bp, Homo Sapiens
gggtggcacatgcctgtagtcccagctacccaggaggctgaggcaggagaatcgcttgaacccgggaggcggaggttggagtgagccgagatcacgccactgtactccagcctgggcgacagagctagactccatcatgttggccaggctggtcttaaactcctgacctcacgtgatccacctgcctcggcctttcaaagtgctgggattacaggcgtgaggcactcctcctggcgaagtggggtcttcttagctcagctcacagccacttcagcttgagctggaagcagggggctaaggccttcttgtccttggtggaggctccaaccccacttcttctagcccacttctctgccttcaaagttggttcaggatctcaagggctattccttgagtcttctttgtcttccactgggctctacccagaagtgtatggtcatgcagccacgtaacactggcagtgggccgaggctgggtagctgccacgaaggggcgtcccctgcagccctgggtctcccctctggaatctgcccgcaggtgactgtcgcacgtctccaacctccggctcccgggtctgaccccagccccgctgcctggctgtggggtagccccacttccctttcggctggcccgggccgcctgacccgcagttgggccctcggggaggcccgggtggcggcgagggggtgtccccgcggggtccgggaaaaggggaaggggaaccgggaggctctccaggtcggcctcctagaactgcccgctctcccgaagcggcgcccccgcctcctccgcgctcagcctttctctgctgcgagtagtgactaaacat

SEQ ID NO: 478583 - DNA, 1000 bp, Homo Sapiens; identical to SEQ ID NO: 246642

SEQ ID NO: 478584 - DNA, 752 bp, Homo Sapiens
tttggaaataaatgttcaaacaagaaaaaaaatctgaacgatggctgctgttgaatcttcttaaccagttatcctaaaaccagtcttcatggctcccattccagtccatcctccatattgctcccagattgtgtccaaatataaacgtggacaatttatcaggggtaaatggtgaaggtaggataacgccgtgattccaattccttctcaaaccaaatacaagttctcctaaaacgggggtggcatgtccctgtcaggcgcacttcgacaggcccgttcctacggcctccgaggttagacatgtccctggcggctggggcggcgggcgggacgggggcgacggcgaggcgcggcggagtcaccacagcggccggggctggggcccgagcagccggcgacgcgactgcagcggcctgagggtcccggatgtgccaagcgtcgtcgccatgagccgcggagggagcggacgccacggcctttccctcctctaggcgaggcccgccgggaacttgtcgtatttctggcgagggaagagacagcattcccacgccgatggttccagcaaagccccaggagtgctgttcccggtcttgtagttgacgcctccatccgggactcactttgagcaaggtccgcaagcagtattcctgcacttctccagtcatgccccagcgccaggtcggaagctgtccacatgcggggatggagcctggcgtcggttcctggtggggacactcaggcaccagcttcat

SEQ ID NO: 478585 - DNA, 1000 bp, Homo Sapiens
ctcaattcactgcgattttatgagattttaaggagatgaaaaagtgctctgtgaactgtaaattcctgtgcagcggtccgtcttgtgtggccagtgttagcctttaatcccacttcctggcttctggtccctggaactctcctctgctccctgctccctggctcctgggatcaggctgctggactgtgcaggtgtctgatttcctcctctcaagaaagattcggggtttctcaggtctctccatatgtagcctttcttctcatcattctttcaggattctaatcccaaaggggtgacaataggggggcagtagagggttgaccagataaacgaacctttccagtcactcattttaaatgggcaacctttgccagataacacagtgtcttgatccaggtaaaatatgtgtgttcattaagaaggctctcaaagactgaaggtgctgctggtgatgactggaaactcaggcttgtgtgtgaagcttttggaggagtgattctggtcagcaggccccatcactccccaagttacaccaggcagtacttgcctgtgaggctcagtgtgaatggcactgtctgaagagaagccagggcctgggggagggtaggtcttcctgtcttcccctcaacatgtgtgcctgcacaggcatacacagtctctctgaggagaatggtcaatccatagaggttgggctgggggcaagtcagagagctcaattctgaacatttgtcagtaaaataatgctgcctcttaaaatagctcaaagatgtttctgtgcaaggtgcttttgtggatatctgcctgaaggcagtactagggctaccagggagagagggattaccctcaaggagctcacatgtttttcttttgttccacttggtcagattgaaattttcaaaaggacctttaaaagggctcttggctttgtgtcccacaagcttttttgtgcctggattgtgggtcaggcctaggtaggctgtgcacgtgtctgagccccatg

SEQ ID NO: 478586 - DNA, 1000 bp, Homo Sapiens
tggtggtggtgaaaggcaagctgaagctgtgctccatctcagggctcatcgccctctgtgggatcctggtgctgctggtgggcatagccatggcggtggtgggctactggcccaaggccaccgggaccaatcgggaggggggtaagcagctgccgcctgcgggcagcagccaccgggtcccaaccacggccaacagcagtagcagtggcagcaaaaaccggtccaggagccaccctagggctccagggggtgtcaactccagttccgcgggcgcgcccaggagcacgcctccagcacgagccgcctccccgtcctcctcctccacgtccgtgggcttcttcttccgcatcttctctggctacctgcactctgacaagctcaaggtcttcgggcccctcatcatgggcatcggcatcttcctcttcatctgcgcaaacgcggtcctccacgagaaccgggacaagaagaccaaaatcatcaacctgcgggacctctactccaccgtcatcgacgtgcacagcctccgcgccaaagacctggcggccgccgcggccgccgccgcggccgccgccgcctcttcgtcgtcgtctgcccccgccgcggcgccccccggggccataccgctcaacggcttcctcagctacgtgcagtcgcggggcctggagctgaagcccgggggctgcggtggctccggggacgccttcggagcggcggcgatgctggccaagggctcgtggcctcctcaccccgcggcgccgagcggcggccgccctcggggcgccgcgtccccgccggacctggcctcttccccgcgctgtccgcgggagcccccgagcctggccgaggccgtgtacagcgtctaccgcgagcgctcgggcgtggcaggcagtcgccgggccgccgctgccaccgccgccgcagccgctagcagctgcagcagtccggcgccctgcagcccacccgagagctgggggcgccagagcacggccagctccttcgt

SEQ ID NO: 478587 - DNA, 781 bp, Homo Sapiens
taaatcgaagacttttttattgtttaagcaaagtacagactcattatattttaacaatgattttaaaaactatattgcatcttttatttttttctccaaattctgcttgtagtcactttaattttgcatttggtattccagaagggcagattttctgttcatgcacttctatccgtatatatgtagttatgaatcctaagttgtatgcagttctgcatggctggggaggcctcaggaaatgtacaatcatggcggaaggtgaagaggaagcaaagcacgccttacataccagcaggaaggagagctcaggggaaactgccacgcttaaaccatcagatcttgtgagaactccctcccccggcttcttcgccgccacagtccccaacccaagccccagccgcggcgcgggtgtgggtggccggacgggatggcttccgtagtcccggggtccggcgggctcggctgtggtctgcgtgggtcgcgtccgcagaggccgagggagggcgggacggagccgggaaagggaggaggtgccgttgcggcgcccagggagggactccctgcacccccgcgcgctccagcccttcccggcgacgaaggcccctcccgcttccacgccttccgtccggcacgaggatccggctcgggatttgcggctgcatcctctctctgcgccctggcgggccgagccgcggatcccagccgggtcctcaccccctccccgcccctcccccagatccgcgcggctgggatgtccttgctgccgccgccgcggccccat

SEQ ID NO: 478588 - DNA, 1000 bp, Homo Sapiens; identical to SEQ ID NO: 346396

SEQ ID NO: 478589 - DNA, 1000 bp, Homo Sapiens; identical to SEQ ID NO: 161418

SEQ ID NO: 478590 - DNA, 747 bp, Homo Sapiens
ccctttcttccagaaccttcttccagcagccgtggctgcttcagagtaggagctgaggggccgagaccctgtactcaggagcagaggacagcgtggctggggttgagcccatccaagttgaaaaggtgagcctgccatgtcaactcagcttcaaggcagtcccttcatacccccagccacatctttcaaacagacactgcagccaaccccctggttcatggaaattctggaaggaaactcaggctgagagacatttgcaaattctgtctctctccagcttccatgagttccagaagtacaggaaatattgtctctcttgatctctgctgagtcttcagtgtctgtaatccagctgcttgggaggcaaaggtgggaggatcgcttaacccaggaggcagaggttgcaatgggctcagatctcatcactgcactccagcctgggcaacagagtgacacccagcatcctccatgtgccatccattcatccaggtcgagctccaactgcagctgaacccccagctccggttcctcacagactcggcactcagccagaggagctctctgtggctgtgctcaccccacacgccagtttacgtggggaaaatgtgaggctcagcaggacagatgatacacccaaggtcgctcaggcagggctggttggagctcaggaaggcttgagaccagatcctgttcattttccaagtgtaggcagccactctgctggctgggagacacagcatccctcgg

SEQ ID NO: 478591 - DNA, 691 bp, Homo Sapiens; identical to SEQ ID NO: 161419

SEQ ID NO: 478592 - DNA, 771 bp, Homo Sapiens
ctgaagcggtatccaatcaggggcactaggggccgtactaactatccaatcaggagcgtagccgtagccgggggacgtggcgggctgtggaagcttcagtttctggcggtttctttgttttttggggtttggggtctttgctgctcgcgcaggccctcctcccctctaatccccgtcgccgcccctctgcgacgtgagcaggcccaggggaggacgccgggacacccggaagccggaaatgctgagtgtgcggggccggacgtcccgagaccggaggaggagctggtggaaccagccggatctggctgtggcgggacccgggcctgtccgctgcgactccggggtctgggacccgagttcccctggagcagctcggccctcggtcctctcggccgcagggtggggctgggccggcagctgggactccgggagtcctgtcctgtccctgcgcagtgactgtcgccccagagccctctctgggcagctccgcatctccccagattgtgcgggggccacgggaggatcatggggggatcccgcctccggcctggggatcctgtgggaggagccatggcctgtgggctccccagtcccgcctttccccccgaaggcggcccccgcttctccctgagtcttccaaaaggtgtgcgaagccgggtctccgcgacccggtcccccagcctcgctcccccttgggctggccgtaaatcttgtaatgaacgtttccctccccgcattctctaacgccagcgtctccactgcaatccacat

SEQ ID NO: 478593 - DNA, 1000 bp, Homo Sapiens; identical to SEQ ID NO: 346398

SEQ ID NO: 478594 - DNA, 756 bp, Homo Sapiens
gggacctccactgtccagctctgaatctcagccccgttgtttacatgcgagtgatcttaggtgtgacaagatgctgctcggtgcctcagtttccccatacttaaaatgagaataataaatactccatccacatccttgggttttcatgaggatgaaatgtaagaagctaatttgtactctcatctgtacagagcttagaacaggacttgccacagaggaagtctttattatttacaactttgcttggaaggttagtgggtgagttcggaggaccagatcctgctgctgggataaagggagctgttccttgggcatggagatattttggggaaacagtcatctgccccagacccaggatgcccccacacggctggtttttgaacggaacaaaacgtcccggtggtaactgatttctgggtgacccctcatagacactcagggtgtggggcagggttaggagccgtggctgactgagttctcctctaggctgcccaaaggccacgactgattttacatagttgccctgaaagtgactttctttattccacgactgcttgattttagcatccaagcgtgacctgggatattttattactttgtttttttctgtttgttggtggtcacagcctgacgttataaatgctgtgtcttggaggactggtgtgatgcggttgatgacactgattgctgtcatctgtgagatgggctatcaggttcggtgcttggcattggaggtgtgtgtctcagggaattccc

SEQ ID NO: 478595 - DNA, 1000 bp, Homo Sapiens
tcactggaggtgcgggggcagcggcaaggccttctcggccagcagctggtagaagggctttggcgtctcccagtcctcagcctcgctgctggagccgtcctgcttcacgatgcggttgtgctggcggctgaacctgcgagccttggtgctggggagacggtggcaggatggcctggcttcctcactcgcctcccgggcatccctgtaccactcccaatcctgtgtccccgcaggggcctgggccaccgttttagcctctattgggcgagccagtatggcctccgctcctgctgggtcatcacccgccacagctgggccagctccttggtggcagctgtggaagcggttccagggcaggatccaccggatgtactgcttccggttcatcctgcagaacatgatgaagccgttgacacacttcttcttcatctggggtgggcaggggcctttcttcttctccttgggcttcacaggggccctggctacttggcccttcgtggcctttttctcagctgccagcaggggtgaggccagccgggtgggggtccatgtggtgtcttcgtcctcttcgctggagcccggcgtgcccacagggttggcctgcatatccttttcctgtggagcctcctgcgtgtaggctgaaggtgaagactccagatctaagcacacttcttcaaagaaagccgcttgggtcaggtactccatgtcatcctccaagatctcgtctggcagcagtttccctggggagctgaaaaggctagggctgagcccgaggatctcacttgggtggcctgttccactccagacatcaatctggggaggccccaggaacagtgggctcccttgggggctgttctctggggtccaggcagggagccaagggtcagcgtctagggaccctttgtccacatcctcgctggaatcatagaacaccagcttctgcctgggatggggctgggtcttgttgagaaaatggatcctcgccacatcttcctgagcc

SEQ ID NO: 478596 - DNA, 1000 bp, Homo Sapiens
tgaaacacggaactcttgtttattcggctctgggcgtcagtgttcttcgcccagcctggtcccgtgtgcttctaggtccaacctagtcgcagcccggggagggactggggaagacggtttcaggggctggagttaggggagaagaaatgtggagtagaagctccaacatacagataggcaaactgaagccgaggaggggacgagccgtgcccgaggtcacccagcgagctgggcactgcgctagccccctcgctgcaggccggaatcctgggaaccgagccgggcttccgcctcgcgccaccggcggcgcccatagctgtaggggtcctggggctcgtggctggccttccccgagggctccttggtggagacagcgaatccagtatatgatctccgccaggcggtgggtccggcatacgcccaggtagcagacgtgcccgcggtgctgggggacctggtgctggcctcgcctggctgcagtgtccaggtccccttgggcggagaaggcgaggagcaacagcaggatgaggatgtggatagtcatcgtgggcagggcgggtcaggatccgtggcccgtagttgcggccaccccgccccgttcccgcaccgggctgatcgcctctgggtgcagctctggagccaggtaccagggccagtccccacttcccaggcggggaacactgaggccaaaagtctgtgggaagaggccgcaccacaccagaggggcaggattcaaacccgggtccccgcttcccgcaccgcggctccagagacctcactgggtgtgtggggtcacaccagctgctgtctatccccctaggaggtctgtggagactcgcccccttcaaagcgtggggaaatggggcggggccaatgacacccgcaggtagctaagcagcgggattccaagaaaaggggtggcggcggggaagcgctggctctggttgtagatgcgacctcaccctcaccctgtcgggaagccggttagtagacagttggg

SEQ ID NO: 478597 - DNA, 972 bp, Homo Sapiens
tcaccaagagtccgtggccaggccaggctgggcgtctaggaccggcaggcgctgggccattcccaaggtgggaacgggatgcttctcaccccccaggccgaggacggggtccccaggggcaggcgagcctccacagatccggggccattcatctctgcagcggccgcagccagccgccagggtgccctgctcccaggtgtagccaaaatggccctgagtctgtttccaccaggcccgggagcgagaagaggcgcaagacgctgattgggccaggcaccggcacacgcaagtagcggtatggaggaggcaagaatctggttgggcaagacaaggaactaaccgggcaggcgagacgctgattggatgaggcaggttgcttatttgccaaagcgtgactcttacccggcaacgtgtgtcgccgcttgatcgcagcggtgcggtgattgggtaggtcagttctggcgggccgcgcgcgcgggctttggggacgtgtcgtttccggcctccagcgtgaagccgactgtgggctctggaatagtcggcggttgtgtgtcctggtgctcgaagcttagccgggcgacgcttcgggagagaggcagaaccagcctcccagagttgtgggctcggctggatcgcgactccgccattaacccctccgccaacgtccccgcttgtcgtcctccctcgggccctggtcagcctccccagggcctgcagcctttgacgcacttcgaggtggagacctggccttggaaagtacccggggagccactccgtagcatcaaatctggggctgatcattccacacttgtttaacatgcctgtgaggttcacgacaatttccccagctctgtgatcatcagtgatgtcaaatttaccaatgtaaccatgcttcatcatcacaattagaaaccggagaatgtctttggagcacctcctagtaataatctgtcttttgcctctcttcagcat

SEQ ID NO: 478598 - DNA, 622 bp, Homo Sapiens
gtgggaggatcgcttcagcctggaaggttgaggctgcagtcagctgcgatagcactactacactccagccttggacaacagagggagacccataatgtagaatcagtgggcgtgttaagcttgttttcctgcaactggatgttcccacctgaataacatgttgcccagtcagtctctcttcctggattcacaagtctttcatggtagatccagctccagctctgtggccctgtggttggagaccgctgctcaagtgcatttgaaaggaaccaacccacgccattcttcagagtcatctttactgctgcagtggtcaacttgtagcacccctaagctcgcaggacatatgcttcaactggcatttcacaatcaacagtatgtggcagcttgagtcattgtgagctcacatcctggaaatcaccagcatcccatatcccattgcaaggagctcagcactgctccttggataaccaaacctattcccaaatcccatctgtgtgcgtctatctcctggtacccttcctagcatcaattctgtatttgtaggagtccaatcaggagacacaaaccactcaaaagtttaaactagaatgagcaagatggctcacacctgtaatcccag

SEQ ID NO: 478599 - DNA, 1000 bp, Homo Sapiens; identical to SEQ ID NO: 346400

SEQ ID NO: 478600 - DNA, 1000 bp, Homo Sapiens
cctgacttaaaagaatttaactcagatgaagaccccaggaattgcacagcagagggggcagccctgcctctgcctcccatagaaggaaccactcggggtgtccaggtgctggatggacagggctattgctgacgtcacgtgtccccccacaccaactctaccacagagtctgagatctctgcaggagagggagcctcagagtttcccctcagattgggttagtagggctggtgccctgtgttccctgccctgtaagagggaggtctgagtagcttggaaaaggtaagagacctcaggtgtctcctgcctcttcttcctgcatcccattgctggcgcggcattctgggcaccagggggcagaattgagcttcacaaggctcaggcagcccttgccctctgctcttagatccactgtcgctgcgacttctccagtgagatcctttgctcaaactccattgcgctgatggggaaactgccagcaccatcttcatctgaaatcactccgtgatctgtgactgtggatgtcatttgctgtcttgctgtgggggcctctttgaggtccatgtgtgggtacatatggaacctcctggaccatatgtctcctcctccccttcccactcctattccttccaccatggagggtttggttggggtacaacacgggtccaggttctggctctctttcctctgagacattgtgcaagtctccagcttctctaagcgtctgtaacttggggctgaagatcacgtctgtccagctgcaggatgagacagaccctcagaaaccgagggagcaggtgggagggactcgggctccggctccccagtcgctgtggggtgaggggcctgctcaggtctgggtgtctgtgcccagaattcacggggaggagccagcccctcatgcgggtgcctggcaacacaccccattcaattccatgatccagacctgactttaccatagggccagaccttgtccatgttgctcagtattgtgcccttg

SEQ ID NO: 478601 - DNA, 806 bp, Homo Sapiens
atcgccggcgggagaaactgcccatgaggtttcggagagcgtagtcgtgcagctgccaagggttattccttaagtgttcaggggtccgcagtggagtgggcgccagggtcttcggaggagaagaggagggaaggagtagaaggtaggaagaacaggagatagaggggaatccaggaaggtgccacgttagaccatgatgccagtgcccttcaggtggacggctggagaggttcccgcgggaagcggctgaggggaagcccgaagcgccggcgggggaggcaggagcgcgtccactccccagcctcagcctgcccagcgcgccgcgctagcgaccgcagcagcagcggcggcggcggcggcggtggcggaggcgcagctccctccccgcccccagaaggctccacagacaataaatcctgggcggagaagagacaagcaggaaaggcgaatcctgcacccaactccgtaacaacccctgcccgttgccgcgcctgtgcagggcgaggatccccaggggccagggcgcagcgggcgtctcggaggggctgagcgctccgcaactgcaggaggcggtggcggtggcccgagtgggcggctgcaggtcccgccggcgagaacccgctgcactggggctgggtgtccgtggcttcaagcccggtgttcacccggagtagggtcctcctcggtgcagtggctcggcgcacaggtgccaggattggcaggcgaggaggcgccgctgctgcaggttgttggctgccaaggagaaaagtctccgcttgtgcgtcaggtcgcttcacatcagtcat

SEQ ID NO: 478602 - DNA, 1000 bp, Homo Sapiens
aagaggaaatggaaaggtttattgctcccataatgagcttttctgggagaacaaggcaaatctcaagcaagtccaaagatgactcgagaaacaaggaaagaaaactggcttggggtttctatggtcagggattgcagctgggatgacggttcctacatggtttgaccttcctgtccaaatgaaggaagaagcaagcaggctttctcatcagcttgtctgaagtttagatcttgtcttccttttttaatttcaatttggacctctaagtgtataggcttattattgattgtgagtaccttagatgatgatagtgatgattatcatcatggtcatatttataacattaaaggctcctttcatatttgaagttacctttcaatgtaatgaaatgaaatcaaaagttgttcctgtaggagatgaacataataatgtgactactgtatgcacctccaaagtttcactctaataaattatagctctgttccacctgacttagagattatagaaataaattcgaaggatagtaataatccaggatctatgtgggaaaaaatgatatatctcgtctttcttgacatgtgcccatgactttgcatctgctaggcctgagcttaaataccatttctgccatttagttgtcatttaattagtccagatgtccagtattcttgaaccttcatttcttcatctatagaccagggaatatgtactcaggaggccgaggttggaggatcactcgagtccagtaattcaaggccagcctgaacaacatggcaagatcccatcaatatttcttgtaggagagattgtcctactttccatagtttcacataaaatgagttcatggattcatttattgaacaataaatattaatatgtagtgagacactatatatgtatgaagcattgtaatagatgctcagaatatgcaaatgaaaaagatacagcctctgctctctagaggtcacagtccttactgaaattttataatgccttcttt

SEQ ID NO: 478603 - DNA, 1000 bp, Homo Sapiens
gaaaactttgagtcagtcttatttctgatcataagtctgagaatgggtctattttgcttattaaaagaaacatgttctttgttttttatttctgatgcacatcttcattgtgagaggaattggtcatttcacatgtttctagattatttacttcaatatattacattatatgaagctatatttagaagggctgaaaaaataacttgtgatgattttgtcactaatatctcaggagctggaagaaatttttgagatgatatcgcacatatcagaaaacagaagagcagagagattgagtgacttgtccaaattctcagagcgagaaagaacgtggccactgtaaccaagtttctgctggaggccaagaaatcacacctccggcttccaattcctccaacatctgagagcgtgaacttccctcttttcccacagccccaagggaactatcctgggccctcactattaagaacttcagggccagaacacagccattcttgcaggtgtctgcccgtgggctgcctctggaattccatttctctcccctccatcagactcctgtttccctctcccctctttccttctcggttcgggaggggcagaggcaaccgcgcgcttcggggctcatcgcccgcgtggaattcgggctcgctatcctcgaggaggctgtggaggaggacggctcctgggccgggtcgcaagggacagtgccgtcctcccgcaggtggccagagttctggttggcctgtgaagacgggtgtctttcttgggcccagcgcgtcctggccttttgagagggggcttcgaaggcccagaggaaggcaggccggaggcagactccatcagactctgcctggctttctccttcccggccccagatggccgcggtctctccgcgccccccagcagctccccgccgccgccaccgttgtctttccagtagaggctgctggatgacggcgcggtagccggttggatgggggctggcggtgctcgcagatgc

SEQ ID NO: 478604 - DNA, 494 bp, Homo Sapiens
tcaaagtatgcttttagaaaaattcacagagaaaaccataatttcacgtgctttatatgataatacaaatgcactccacgtcctttgagatcttgacaaactcagatattggagttctggttgacaagtcagcgatgagtccaaggtgagtctttcgatgtcgttgaaacatgcatctggttgtggcaggcccttgctttgtagtgggataccaaccttgtactggatcctggctatcttcagcataatgcatctggaaacttgtaaattctccataaggaaaattatctctggtccatggtaaagagcaaagctgtaaaacgtgcctggcaaccgagtgtcaatttccaagctgcttcttatgggcattaaaaaatcttgctgttagtattttctatttcttgctgctgatatttccactgaaaacgattttattaatgcgaggattcaaaaggacaacgtgaaatgaaatttaaataactttttcatattac

SEQ ID NO: 478605 - DNA, 1000 bp, Homo Sapiens
gtcaaagccattcaacaaatctctagaagttccaaactttcccacattttcctgtcttcttctgagccctccaaactcttccaacctctgcctgttacccagttcaaaagttgcttccacattttcagatatcttttcagcaatgccccactctactggtacctatttactgtattagtccattttcacactgctgataaagacatacccaagactgggaagaaaaagaggtttaattgcacttacagttccacatggctcgggaggcctcagaatcatggtgggaagtgaaaggtacgttgttcattaagtggacgtgaatcatcataaaggtcttcatccttgtcatttttacattgtataggctgaggagaaggaggaaaaggaaggattggtcttgctgtctcagaggtggcagaggcagaagaaaatccacgtataggttgacccacacagttcaaacctctgttgttcaagaatcaactgtaattggattgaccttcatcactgccaaagccaaagaaagagagtatggagaaatacacttgactcttaaatgtttccacccagatgtcccttctcctcctgtttcactggcaacatgggtcacatggccatacctagcttcagtggagcagagaactgtccctccttgccccttccaaaaactgtcttccttgggcctcatgtcaacggatttccttgggactcattttcaggctttaaatccaaagtcaatctgacaactttatgggcaactagaccagcacagagatgaccagaagattaatattgttccatgaagctttctgcttctgcaagagtacatccagactttcttcttccattaccattgctcttgtctccatggaagctacgtcgcacaaagtgggcacaggcatcggtggacagagccagagtgaccgcctggtagtgcccttcatcaggtagataggaaatagctccagctgtatttcttgttttctgttcagaataatag

SEQ ID NO: 478606 - DNA, 714 bp, Homo Sapiens; identical to SEQ ID NO: 346406

SEQ ID NO: 478607 - DNA, 573 bp, Homo Sapiens; identical to SEQ ID NO: 346407

SEQ ID NO: 478608 - DNA, 1000 bp, Homo Sapiens; identical to SEQ ID NO: 346408

SEQ ID NO: 478609 - DNA, 682 bp, Homo Sapiens
tgagttataagtgttgtaatagggggtagtaacaagacgttgtaggactacacaaaataaaacaaggaggccaaatcgcaagcgtttgtgggtttcacaggggacatctgacagcaaacattccagggcaccgagagatggtgaggagagatgatggcattgaattggagagatgagctgagatggactgcgcagaggacgagggaaagccggtgcactggagacggaaggaacgcgaggagcgcctcatcaccaggcgggtgtatctaggggcgaaggctgcagatctggggcgcaggctggaaagtggggtgcagccggttgacgtgaggtctgggagttggatggaccgaatgaggatggagacacctagggatgtgtccgaaggatctggcgctgcacaaatgagggcggtttgggggacggaggcccgggcgggggcggagtgttgtccaagagtaaggagggggttcctggagacgtggcactcggagcggggctgggttccgctccggccgccttcccggagagtcctctcggtccctaggttcccctcaagacgccggcaaccgccccgtcccttaacgtcacaccgggtctgctgggagccaaacagctgcggcctgatctctgggaaaaatttgttgaagggaaggcggttttcttctccccccacgcccat

SEQ ID NO: 478610 - DNA, 1000 bp, Homo Sapiens; identical to SEQ ID NO: 346409

SEQ ID NO: 478611 - DNA, 802 bp, Homo Sapiens; identical to SEQ ID NO: 346411

SEQ ID NO: 478612 - DNA, 1000 bp, Homo Sapiens; identical to SEQ ID NO: 346412

SEQ ID NO: 478613 - DNA, 1000 bp, Homo Sapiens
ctagtgaagacatttatcttattaaggagagaaaagaggcacaaagaagctggtcgaacttgcccaagatcacacagccagcccaaggcccagcttgctttgagctcaggcacccaactccacatcgtctgatacattctggttcctctgacttcttcccatctgaagctccctgctctgcgttcagatgccccctctgactcgctgctcaggaacataggcttccacagacagaggtaaggatatgaaccagccaggctggcaaggactgaatccaaatcccaggtttctctccaagtccaggcctttcctggcagatatgagcagcaagaccagggtagccacagaggcgagctcggctgggtggaaactccctgaatagccaagtgtgcatgggattcttccaggggacagcctggtcctgtcctgttccgggtaggaggcactgggcatctgggcactcaaaacctaccactgtaaagaagactgaaccagtaaggccacacgccgggcacggggccccattttcagaggatggagccaggcctgtcggggctgctcatgtgtccacctccttcaggctccctcattatccaaacggcatttccacacatgggaatttgcaaaaggagagagtgaaaggcccagggcatttctgtggtctgtactaaccctcaaagatactcttggtctgtgtgatcctcattttcaaattagaggctaaagatggacaaggccggtagcagagtgtgcaggtcgcctggccagccctgcatttactcctctctccaggcagagtggccagtgccacttgcccacgcagcagtcacgtgaggtccatcctctgggaaggtcctccctgatggcccctctgcgattctgaccacaggatgcccgcagcacagcagagtcccaggtggagcagaatcggccatgagaataagcttggttccgaggactttctgctgttatgtctgtaattactaaacttttttcatat

SEQ ID NO: 478614 - DNA, 758 bp, Homo Sapiens
ccagcctgggtgacacagcaagactccgtctcaaaaaaaaaaaaaaaaaagaaaacgcagatagtttccttcaagaaaatatttattgcatattattagtgattatgttttacagcaaatttaaatacatacacttttcacaaacccaaaatgggaatcagggcaactatcaaatttaaatgttgaaccaagtcctggttttcagaattcagcagccagtcatggttctgtaccagggccaccagtccatgatttccaatagttgaggatcttttctgtatttggaacaaaatcttctttatatgtgacaactgtttccacataaaatccttttgggcgttcagagagttcactgggtacttcacttgctgagccatccttttggtctgacgacttcgccattgtccggctatagtaaagcagtgagcccaacacagaccaggtgccgatcccgtagaccaccgacatccgccggtaccaggccgtgaactcatttcgatacatgggtacgccagcgagtgcctcgattctcgcaggcccacggcagaggcgggacttccggtgagggcgtcgctgcggtccctgccgccggaaccattaaggagccgccagttttcagcgtccgcttccggctctgccccgatgcaccttggggcctctggcccggaaagtcgctcaggtgtccggactttcgggtgtagaactgtgggcgtgcgatactttttaccacgtgacgaggacccacctgcacctttcat

SEQ ID NO: 478615 - DNA, 1000 bp, Homo Sapiens
acgctaggggactgccatatcctgcttccatgttctcctccactgccaagtccccatcctccacatggtctccaccatcctccagcagatgcaggacgctgggccggggtgtggaccggggaggtcagtcgcttcactccaacatttatgactgtttcattcctgccttggcctgcttcagccttctttgcctgcaagcgttgcttccatctgacaatttcctggttgggcagctctgtaggttgctggtggtcactgctatcattcagatcatccgcaattttcccctgatcttctgccccagcccttcacgccagcatctcttctcctctcccactgcagttcagcccaacctccccagcgttctgaagggcttgcacattttatcttttccggtagatgttcagaagtccagatctctcgtctccatctctcgcgggccctccccgcaggtcccggaggcgggggcgaccggtggccccaaagacgagcgcggggctgggtttccccgcccgggaggagcaagaggaggaggaggaagaggaggaagggggagaaaggaggggaggggaggggagaggagaggaaagaggaggaggggagggaagggctttgtgtttgcctcgggccgtccctcggcagtagggagccatccccctcccccagccaccttcctgagctcgcagaggagatggggcgggggtgatcggatcggaggcagcgaccaaggcgcctgcgcgaccccaggtccggcccatccctccattccctgtaaccgccagcctccgcccctcttgacaaccacccgctacgcttaccccgccttggcgctgccgcccctgtcttctgcggtccccggccaggcgaggaccagagttttgttctcggagattcttgcctttcttgttttagcacaaacgcgcacgcacccctttcccataacgagcccctccgcccaactacagatcccgggatctgttgcaggggctggaaaggcccc

SEQ ID NO: 478616 - DNA, 1000 bp, Homo Sapiens
gtcctctgaggcagctgaagtctcccatgtctggaccccgaatcttgtgcagattgaacagtggatccggggtgctctgagcaggcagcagggagcagctctggtgacgcttcatgtggtagcctcactctccattctctgcccctctcgtgcccacaaacaccaccaagagattcacggtgagaaatatcagcaaacccagatcccagatcaccaactccatggtcttaggacttccttggactgtccttggatctaaggctgagaccttgcggacccatggtccagcgacctgctactatgaagacaacacatcccatggagcctctgcacacagcggacccatcttacaagcaccgcagctcagcctcttcttgaagacacgtcacctggggccactgggcacacaggacagaggtcagctgacaatcctgggacctcaggatccatgctctcccagaggacgcctctcacacacatggggcggcagtcatgttacactcccaggggcattctcaccccgcggacagtggaagcccctcagggggtgcagatcagagtgctgcaggagagagagggcgctggctggtgcgaagccgtccgaggtgcagcacagcccacaaggcccggcgccctggcgtcgagtggcggcggagacctgacagacagcgtgggaaaaatcaagatgtctgcagatttcgagagatggggtgcggtggcgtgcgatggcgaaggacggcgagggacggcgaaggactgaggccacacgacaaggaagtctggaggacttgggataattttcgaaaactatctggaagtttagaagtaaacttctcccacttgctttgcttttctgtttgttctgaagatgttccttggtcactgattcattattaatctgtaggaatggccaattttccatgataggagctgttactacgatgaggggactgtgcttagtttggacttctttctgcaagggtccaaaggcatctgtctt

SEQ ID NO: 478617 - DNA, 1000 bp, Homo Sapiens
ggagacagggtctttctccgtcacctaggctggaatgcagtggcacaatcacagatcactgcagcctcaacttccctgactccagtcgatcctcccacctcagcctcccgagcagctggaaccacaggtgcacaccaccatgcccagctctcactgtgttgcccaggctggccttgaactcctgggctcaagtgatctgtcaccatggcttcccagagtgttgggattacaggcatgaaccacggtgcccaaccagtcagcaccgtctaaaatccacagccagctgtaaaatctctgagagcaaggaggcagcccctcccagggaactggagtggagaacccagaagggatacaggactaggtgggcagtgcggccgccccttgggctgcacagtcctgcaggaccaacattcctaggccctctggattctgtggagtttctgtcacttccttgcagagtgggggctggggaggccgtcatgtgggatgtgggggcgcaggcccaggcacggcaggcaggcccacccccttccctcccagcagcttctgggtgccacctccccggcctttcctcaggcagatgttggagcccgagtcagggagactgtgggtggtctgcttgttctccagctccagcagaggggatggtggggtctgcatgttgttgtctgctgcagacaggcccagatgccatctgcaccccgtggggcagctctgcaggatcgtggtgcaggagctgtgggagcccaaccccctggccccccagtctggaataaggtgcaccgcgggatggagctcctcagccgcagagtgagcgctgatggcagagcatgctcgtccattcgcccgtgtgctggctccttcttccaggagctgttcggccatagctgctgactgcctctgccaggtcagctccaggcttgggtggcagtcctgacacggctggggcgcaggggccgggacgtgggcgggaatgagagggaacctgcctgggaaggct

SEQ ID NO: 478618 - DNA, 1000 bp, Homo Sapiens
catagtataatgaagtcgcaatgtcactgccatttctccacttctgcaggggaagccaagactgctttttgctcactgacctatagctttgggtcagtctttgaatgtggacacactgccaagctagctgggagttgccaggattacacaaaccagcattgcaaatgggggttgtgttgatttaagagaaaaggccacagaagccacatctttcttacttcctgcgtaatatcctctgctctgaaattttgaagaagtttctagaactactcataagaacatttctgtttctgggtacacctcctagctgaccaaaaattatgaacaataggaaatttaagagccagtatgcaaattaattaatttttattaagtatctattggattcttagcaagaagaggagctatgaatggaaaattacacagtaaaaaaacatttttatctaatatttatttcatatacacaagaaatgttaagaaaacctagagtaagaacctgcccttgtgtgccgactaatgattgttctgctttgaaaatctgctttgtgactggccatgtgaacttgagtgagccacttctcctctctgcacttcagcccttcatctttaaattgaaggattggatcacaggaattcattgttcctcaaatatccttggggacatttgactacataagtatcttcttttgttactttacataaattcttgagccagttcatcaacagtggtctcaacatgtctttgatagtgaaatggactccaacattcagaggtcacctgataggaagttccttgtagagtttttccttgataggtatgtatgttgttacttagaaaatcattttcatttagatcttttagctgacagggccttctgatgtgggaatcattcttatgcttgctgtgttcctgccagattttgtcattcacagtttttccttcaaatattttattttcagacataaatctccggaataactttctcttttttggttttgc

SEQ ID NO: 478619 - DNA, 1000 bp, Homo Sapiens; identical to SEQ ID NO: 346414

SEQ ID NO: 478620 - DNA, 1000 bp, Homo Sapiens; identical to SEQ ID NO: 346415

SEQ ID NO: 478621 - DNA, 907 bp, Homo Sapiens; identical to SEQ ID NO: 346416

SEQ ID NO: 478622 - DNA, 1000 bp, Homo Sapiens
ttatagctattcatttttctgtacctttgcaatttatcttcacaactccttaaaatagaggtgtagctgttagctattgctgcgtaacaaaccaaccccaaacctagtagcttgaaacaatatccatttatccatgatcgcccatgagtccatgggtcagctggatgttctgtctttctgggaatgtctcagcagctattggctggctcacccttgcatctgtggtcatctggaaggtgggtgttctggaaggggatcagctgggacacttcacgtctgttgcatatggcctgtcatcttccaacaggccagcttgagctctccctgatggcttgaccaggggttgaggctctactttcaaggtggtgcactcacatgcccagcaagttcatgctggctgttggctgggggcctctccacagggctgctcagatgtcctcctcacatggcttccagacagagcagcaggagaaaaacaaaatcacagtgatcctttccatcctcttgcagcaaagaacctctccaaggagcgtcagcgtctgaatttgataccaactctggaaggttattaagtttgaactcccaactgcgttgtcagtagagttccagttcagtttccccattgtgaagtactcatgtgagacagagaccacttggtatttccgaagaattaaaacattcctccagccgggtctcactcgcaagtacaatatgatctcccatcgtatgcttttaaccataacctcctcaatatcccaacccaaacgtggtcagtgtaacttgcatggctccaattccaagacagggtcatcagacagtgatctctggaaaattcctcccaggtgggctacccaaaggtccatgttcttcactgccatgcaggcaacctcagatgatcagcagcacctttgttcccattttcttccttctatgaaaggggtacttttatccatcctgggtcagtggcaggagggactctccccatccctttctcccagcc

SEQ ID NO: 478623 - DNA, 522 bp, Homo Sapiens
tttacatgcatgactccctttaatcttcacaattaccttcaaagttatcatgatgccagttttacagatgaggaaactgatggtcacagagattgtctcttagaatgccaagtcgaagcctttcacttggaagctgaggaacctcaggcccaaagcgctcaggggtcttgaactagtcgacagagctagcctcgttaccggcccacttaggatgtttccagttctgcttttggctgaaggcacactcattgtacaaagtgaggaggcaagacaggtgcacagagcatagctttgtcccatctcaggagccctgggttccatcccagctcctgatcccaagagatacgtttcccgggactccaagggagagctgaaacactggtcaagctcagagacctgaagctctttcccactgagagccttagagttgtaaaggcacctggtcacctggaaggtgacttgaaagaacccctgcccctcctcttgcatatacctctggattgttggggaatctgcattcat

SEQ ID NO: 478624 - DNA, 1000 bp, Homo Sapiens; identical to SEQ ID NO: 346418

SEQ ID NO: 478625 - DNA, 1000 bp, Homo Sapiens; identical to SEQ ID NO: 346419

SEQ ID NO: 478626 - DNA, 1000 bp, Homo Sapiens
cacattggaagtgtttaataaataatggccattattattacatatgtgatgtcaacctgattaattatacctgatacatgcaaaaaaggggaacaccactatgtatgccccaggggaagctgtgtattcctctcacttggatgataagagaagacaagctctctactaagcacactatgtccctccacctcctaacctgggcccctggcttagtgatggtggcaagagaggggttgaggagtcccctctggaggaaggaagcagcattatttcttgaccctcagagacagctgcttcctttggggacccttggaaggggctccttgtttaagcctggaagatcccagggtgatatcaggtaaggaaagacctgggacagtgtacaaacccgaagtcactctgtctgcaattgcctgggtgctccagaactgacccttggagtcatccccactggaggcaatttggagaaggtattttcgagagaaagtccccacgcagaaaacctttctgccaagtcctttgttttcctaatgttgccgcagtgtctggagctgaattttaaaaatggcattttcctggaaaggattttttggtcttttttggaaatgtctcatgtaaaacaagatcaccagtgggccattgagtctggtctccccgggatgagcttgggaaatggcaagtgggggagggcgagtctgggtgggaaaaagaacaaaaaacagagttggagggaaagcgggacgtgacaaaggggtcagcattcatgtgttaggaataggctcagagctcaggattcattccagtgggtaaggcatcgtgccggggagggaggaaggggaaggggcccttgacagcagggctgtgggaatgtcctctgaaagcctccattcaccacagaaatggacctatccctgggcctgccacctccttcactcccttgtgtgacatgggtaagaaggcaagaatgatacaacaggggccgtgtctcttccatcagact

SEQ ID NO: 478627 - DNA, 1000 bp, Homo Sapiens
tcagccgtgccaggccccggggttcccaggacgcggaggagtgctgggtgcggccgcctcgcctccccacccctggccgcccctccccacctcgcccaagggggccggaacggcgtcggcgcgcgggggcttttcggagcagtcgagtggaaaatagactttaacccgctttgtggcggccggggcgccctgagcgctctccaaaccacggctcccggcgctcaggcgggccgctgccaagacccggcctggagtccccgcagagttgcgcggcgcacggaccccgtggccttggggcgtcaggaggcccaacccagatctgcgcgcccaggcagcgctcaggccgctagaatggaccccggcagcggcgaggaagcggaactctctgcggctccctctccgcagtgcgccggcaaggtccaggtcccagcctccccaccgccgcccgcgccctcctaggcctcggagcggcgcctttctgcggcctcgaaggtggggtgggaaagtttggggagtcccggctctcacagcctgtcgtgagaactgcccccggggaattcgtccgccgtacggaaaaactggccggagcagagtcgtccgcggttccgcggtcgcgggtggaaggtgaaggtcgagggaggtcaggctgcttctgcgtgtcctgacggctggcgtgttctcttgagatgggctcgggctacttggccagcgtcctggtccaagccggtcgcggcaccgtgtctgggcactggagctgcttccagccccgcgaacagctggagggtggcagtgggaccgctccggcggcttctcccgcgcagtgccccgcctggccccttgtgaagggagtgagcgtcccctttccagagctgtcccccgtgacatccagaaaacgcgaaacctcaggaacaaggtcgcagcttcagaccgcggcccaggaggccgatggtgggtgagtgggagagtcccggagagcaggggggcagagagctggttttcg

SEQ ID NO: 478628 - DNA, 1000 bp, Homo Sapiens; identical to SEQ ID NO: 346421

SEQ ID NO: 478629 - DNA, 1000 bp, Homo Sapiens
gggttaaacagtacatagccagaagcgttgttgtattaacagcacccagcacagtgtatggcatacaatcacactgaagaagtgtcagcgtcttccttcctttcagtctcccatccctgcctttacttcattagtttaaactcaactctccctcctcctttgaagccaccgcacgtgttgtctctcccatttctttggcagccaattggccttccatatctcggactccatatccaggattttaatgagagccgactacatgctcgctgctttattttcatgttcattctgaacaacaccactgtggggtggaaatcaccactctgtttgttcaaatgaagatattgagtttcagcaatgttaaggcagttgttcaaggccacaagcatagagaggcggcagggacagatggtgccttaactcttctttgatagattttaatggtgaaatattgatttctgtctggccaagacctgctgttaggggccaaagtcatttgttgggtattgccggacacccagttggcccagcgtaatcaatcatttttggcaaggcaggtgaaaatccagagagaagcaccttggaacccaaactggagcgtgatgtgtctgagtccagccacaaatatttggctttccccggccacgtctgttctatttctgctccggagagatggctttgtttttgctttcgtgcggttctgcgaggcgctccacgatcccgccccctggcatggcagcacctaccggcggcgcgaactcggctgctgtgggctgctgcgcgctctcgcccttcccagctcgccactttattttctcgttgttggcgcagcccgttcttccggcctaaaccaaatctcattttcgttcctcgcctcctccctccttctcgtgactggattttggcagagtatctctgtggggctaccccagatccctcagccttggatccttccatgggccatgctcctggagtgtcactggccagcgagacttgcttt

SEQ ID NO: 478630 - DNA, 646 bp, Homo Sapiens
gaccaaaaacagtagcttttatttcacacgaagctgaggaaggaaggcgagaggacagcgctggctatcagagggtgctgcctggcaggtgcaccacctccagctgctgggctccagctccggggctcagaagccatcttttccgaggaggtcggggacggggctgaagggtcccccgggcaggttccaggccaggtcctctagcaggcccagcaggcctttcacctgtgtccccaggtgatccacggtcttctctaccatcggccaaagcgcccacggcacagagcagggccagcccggccagcgcgcaaagcaggggccgcatggtgccagcctggctgaaagcagcgcggcttgcgaccgcagccgcccttcccggatcgcgcccggccggcccagaaggaaatgctctcagtccgagccaaacttcctgggcgactccgggctttctggctggagagaacccgccccctccagaggctcctgcgcaccccatgggcagcgcagaacccagaaacccccgggacctgaggcactgacgtgccacccgggagcctccggaggaaagggggccgcccccccccccgagtccccgcgcctctttgatcctctctcggaaaggctgttcaaaattggcagcgtccat

SEQ ID NO: 478631 - DNA, 1000 bp, Homo Sapiens
caagcagacatacaatatatattttcccaacataaattttcatgtgttgttcatgccttggtctgctattgagctggacttctgaaataaactgtgttatgctagaaataactcataaccaaagtgtctctccagcaaaagcagggaggaaagtgtcacctttctcagtactaagatttttccttagcaaacgggtgatctcagagtaagtaccgcttgccagaatcgctgagtccgttttcagagaggaaggaaaacgctgtgagcatcagatcatgctgtgtcctgtgtgcatgggtcttttcttcagttggtgacattagaaaaccatctgggaaataacgctcaaggcaatggctcccaaataaagcatagaagacaccttgtgaagagccacagcctattccgaggaagtctctctggtccgctcccctccaggtggtccctgaaatcttcagatggctccctgccagggtgcacacaggaatggtctggaatccttctgctcccaagagtgagtaactgaatttccatagtaccttcagatggctgactgccagggtgcacctgaggatgaggcctgcagcggagcaccacgtctctgaaactgagctggcggaccgtcgatttgtgacggacagtggattctttggagccctcaggatcttgcatcttggaggcaacactcgtatttggtatcaagatctcctgatatgatgaaggcagtattgttgtgtttcttctggatctattctatggaagagtgtgtacaaaactggcctaggaaacagcacattcttataaacagagaaaaatatttaaggcaaaaagcttcataggaccgaaaatacaaattgagtcataaaactataaaacaaatttgtaaatctgtagacaaattggagctggggaagtaaaaagaataaattaagaagacattttaagtacaagtggcccacgtgaagaaactgcagtgagaagatggaaagcggcaaaggcc

SEQ ID NO: 478632 - DNA, 1000 bp, Homo Sapiens; identical to SEQ ID NO: 346422

SEQ ID NO: 478633 - DNA, 666 bp, Homo Sapiens; identical to SEQ ID NO: 346423

SEQ ID NO: 478634 - DNA, 825 bp, Homo Sapiens
gagtagtcaaaagaacaatatcaacattttggaagtttcaagtcaatttcatcatctcataagatgagaataaggcccgggaatataaatgatttgtccaaattccatcgaaatttgtatggctagcaagttatatctagctagtagtgatgtcttaactaattttccaaaaataagtaaaagaattccgggcaagggcaaggactgagggaagggggtcgggaagccctgggatgggctgggccatcttcgttatttgcggggaaggagttggtgcgtgtgcaccggccggtcaaagaatggtagtgtagacaagcctgtcagaatcgcccagttatctccacacccgtgtagacacgaacggcgcttcctcacctcttccgaccactgcgggaggagggtgccgcaagccaggcgcaccccagtggcgcgcatcctcccttcccggcggcccctggcagccacggggcccggggcccagagccagaaccaggtgcggtagagcggtccgcagactcgggcgcccggtctgggggtggtctgctgtgggggctgggtcagactgcacaccgggctagggagagggagaccggtcgttgcctcggagtgtcttaccagctggcggccctcttcagcagaccatccgaagggcacacaccgagagccagcccggctagctgctcgcgcggagctgggggctccgagtcgggaacgcagcgtcgccgtggagactgcacggcgcgtggaggaagctcgggcagcagccgagggtgggggcttcaggagcgccgaagaaggaaagaaggttggaatgtcggtgtccat

SEQ ID NO: 478635 - DNA, 1000 bp, Homo Sapiens; identical to SEQ ID NO: 346424

SEQ ID NO: 478636 - DNA, 1000 bp, Homo Sapiens
gaatgccctttgcttctaactttgtgggaggtagacaggggtgttcttttacgatagtaatagtagcacacgtcctgcagaggaaggtcagaagctcggcggaacaggaaccgcagctttcctccggcttcccagctcctggaaggaaacccgagagcaactgcctgcagccacatctgcgagcagggatgctcacagacggacagggtggcccgcagccacccgcgatgccacaacctgggcttccaacaaggcccttcttttccaaaatgtacttgccacaaaacaacacaaaaacctccttttaaacaaggcaggtttaaggtcagcctgtaaggtgtcagggccttggcagggaaggatgagtgaagacctgcaaagcccggcgttcacgctcacgggactcccgctgcttcccaaacccctattttccagtcggaaaagtccgggttaatacacaaaaggagacgccgaaccacacaaggtgaagaggttcgcccaaaaacacctgcagaagacgctcctctccctcgctctcctcggggactcaaggtcccggggaggaggaaagaccagggttgaaggcaagaggcccggggacgggactcgggtcagggagacactaccgggggggccggggccaccgcgggtccctgttggccggagggtctcggcggcggcgataggcctggcagccagctcgggcggcaggtcgcgggtcgggaagacgtcaacactcacccctgggcccacaggagggtcccggcgaggacccccgccctctggctcccggggcgctcgagtgggcgctctcagaggtggttggctgagagcacggaggcgcccagggacagcaccggcggagcggcccgcagagggccagggcagaagcgcgaaaggcgcgggctggccccttctgggagccgtagcggaagagtgttcgtggtcatgtgacgcggaaaagggcggacgcgtggcccacgcactggaacggctccac

SEQ ID NO: 478637 - DNA, 715 bp, Homo Sapiens
ttcggtacacactgtcatagagggtgcactttaataggcatcagacaactcctcagggatgatgttgaaacctgcagaagtcccaaacctggcctgagcctgcaccacatcctgaatctacaggggatgggcctgggcattttgcttttaacaaagcctgaaaactcctgaatatgaaagccgaaagggactgtgacattgaagagtccagatttcctgttttctggataagaagactgaagctgggagtgagaggaggtcttggccaaggtcacacatcagggtggttgggcctttccttgaggacaggagaagagagaggtgtgggctctccaggaaccatctctgtgggcagaacaagcatgggcattttctaaaagctctccacatcctcctcatgattccagtgggcagccaggtttgggaaccacttctatggggatggtccatctgggaattggctgtccacagggttgatctagcagtcaacattcaagaagaggctggggtggattggtagcagtttcttgcacctgctgaatagacaggctgcagacagaatgtccaggacagtccagatgggccagtggtctttagaactgaactgtgtgcggggcaggggtgcgtccgtcatgccaactcggtttgttctcactcctctggttcgaaaatagaggctggggagcccattgagggaggcacaccctttgccttg

SEQ ID NO: 478638 - DNA, 1000 bp, Homo Sapiens
ctagcagctcggcgcgggattctcgctttgctgcgctctgctctcaaagctgccactctcgcaggctgccagtctgtgcgctggtctgtccgtccgtccgaatccctccgtcccaccagcaatgcagcgtccctcttccggtcttctgtgcccacagtcctctcccactctgtgcccctggccgcttcgctcggtaagaggagggcgtgtggagggagggagcacgcgagtgttgctgtctatctttctgtgtgcctctccctgcctacttaatgctctcgctctctttgcgttctggtctccctctctcaggctgtctgactgctcccacctgtccgtagctctgccagtcccacccctagccagccagcctcggtcgatccctcggtcccgttcctccagcttggccgcctccgtcgtctgcccctccgccggtccgtgccctcccacgcggctggcactgccgccgggggcggcgcccggctcctccccgcagctccggatgcgtccggtccccgcccgggctgagggcaacgcgcgtgttgcacgtggctccacagctgctctggccggagaccccgggccccagacccgccacacccgggaggtggcggcagccggacgcctgccagtgtcgccgcctctgcgccaccgtctcgggggcgcccctggactcctggggactcttgacgaagccttgttccactccctccaccgctcactctccaggccaactctgcagagacaatcccacaataataacacctcgccccacccgaatgaatccgtagcctcagcgctcttggagattctttgctttgagcaagactgaaagtccgaacgtgcagcaccaagtgtactccctgtgggtgactgcccagaccgctgcccacctgatcgctgatttggaatcacagaggtgccacagaaacctgggcagggtaggaccaacttgccagtccgcagagttccgtgcttctgctcaaactgaatgcgctta

SEQ ID NO: 478639 - DNA, 774 bp, Homo Sapiens; identical to SEQ ID NO: 346426

SEQ ID NO: 478640 - DNA, 559 bp, Homo Sapiens
aactgggcacttaaaaattagaaaatttaattattttaataattctgatacacgcacgtatttctgttttatagaggagaacactgaaatttgaatgggtattttgcccaaggttacatagctgttaaagaggacaccaggctccaacccagttcttcctgactaaacaggccaggtctttgcctcatgctgcacaggccacctccgcgaagtgacaagatcccagaacatgcttttcacagctcagcaccaagcctgtgcggcaaacagcctgtgcagcagcagtttttggtgaggctgctgctctcttcccagccttgggtgccttttgcctttcagttctcggggaggagacaggctggtccttcattgctggccccggccaacttctccgtctcactggaggtgggctgctacctgcccaccagggcttggtcctggaagcttccctcccttgctttctctgcttgagacggcagttgggggagtgctgacagccagcttcagaacagggagcctctgccactggagggctgaagtgagaggcctgcaggctcat

SEQ ID NO: 478641 - DNA, 319 bp, Homo Sapiens
ggctttgcaagtagatttactttccattaaaaagagctggcaactgatgcccataacaacttggatgaatctcaaaagcatcacgttgagtgaaggaagccattctcaaaaggttacgtactgtattgttagcaacagaacgtatccgactcacatggcaccaaaatatgtaaccagaggcatatcctccatatggatctgcagcaacctgagttcttgtctcctcataagaaagaatatgaccttttccactctttgtaacttctgaatctaaatcatgacttgttaagctttgtaatcctggtgcagtattgtgcat

SEQ ID NO: 478642 - DNA, 410 bp, Homo Sapiens
tccaatttgactttatattctttgaaatgcaaaatctacttttccaaagaaagaatgttagcaatgggggatttatttcatggacagcgcaccaaagtctcttttactaagaatgtacatgaacactgataggaataagggtagtgattattagaattgtatcaataatgatattattgacattaataggatgttgtaggtaaaaattatatcggtggctaatcagtttttggttttgttgacaaatgtagtcctgatattgagagaagattctgagaaactgttcatgctgactctcctttgtctgcttcagaggttctgctccatcagcccttgtattcaaagctatggccatgaaagtgaactgtgtgcaggtcagcttcattccctatgccaatcagataccaatt

SEQ ID NO: 478643 - DNA, 1000 bp, Homo Sapiens
gcagaagccaagaatacatttttattaaagtttttcattaaaaacatttccttgtcaagtaaaatgcagatagttgctctaacttctggtctataccacagtgtaggcagcagaatcactgagggctgggggccctggcaaggattacatattatctatcttcgttgcttgaaaggacagcgattaagtatctatataagatacaagttaaggctccatccagaggcttgaaggccagtgagctgagtgcagtgttccgggagctctgcatacctgcccatcttcctgtggcttcaggcatcgtggccattgctagggagataggaaagccacccaattttgaagagatgatagaggggttgggaatagaacaaaggccacttgatggcaaatgtccttgtcctttgggctgagatagtcctgttccatcttcattttcatcagcagatgtatggttgccttcatgattcaggatctgtgcttgcatcctctgtgctgctgctgcagagttagcctccgtcagaacaccgagcacctctccacggttggatagatttaaatcagcattgcctgtgccttcctctgctctatcagcttgcacagcacagcggaaataaatgctcctacgatgcgctgcaccatctggtggttcagtgctcccaaggaagtacaggattccttggaatcgttggccctgtagagatcctttaggtggatcctctttcacgtagtggataatccaactgtgtattgaatcctgactccacacaatgtgggctggggacccttctggatgcattgataagacattaatgagagctgatgggcatgaggcttctcctttttggttatagaaggaaatgtagctaggtacattcttcttgccattctttctggcagcatcatcagcactgatgttctcactgatgacatgaaggtgtctgagacaattaaacaggctccccacctggcatggtgttcgcctccccagggccagcag

SEQ ID NO: 478644 - DNA, 1000 bp, Homo Sapiens; identical to SEQ ID NO: 161423

SEQ ID NO: 478645 - DNA, 1000 bp, Homo Sapiens; identical to SEQ ID NO: 346428

SEQ ID NO: 478646 - DNA, 845 bp, Homo Sapiens; identical to SEQ ID NO: 346429

SEQ ID NO: 478647 - DNA, 822 bp, Homo Sapiens
tgtacagaatattattttattattttctttttaatttaacaagcacttgacaaactctgcatgtgacatcagttctaattcttagaccccaaaacttacacaataattctgaccatgaaaatgaagcaaattgaaaatattttatgtcattcttaagaatatgcttggaaacatcttccagtaatgagccaaaagaggctaaagtatcagtattttggccttcaggttaaaacaatttagaattcttagtttcttttccttttttttttcctgatcctggaaacatctgggaagttaacagagaaagccttcagccttctctaaatgtgacagaattcttgtctcggttgattaggaagttgagccacagtaatgaatgagaacacctttgccaaaggtgatttgcacaaggtccctgtaggttagtacaagtctcacggtaaagaaatgttcatctttgtggaagctgattctaaaatatccctgaggaaagaagaatgaaggatccagacagatgaaggaggccatctggatcaggcaaaacaagcaaagagaggacttgaggctttccatttcaggcacgttgctgaagaaactggcatccggcttcagaagtacctcattttggaattctgagcagtcttcataggcaggtccatcatctgcagtttgctgtagccattttattgtataaaggttaaaggtcaggagctttaggagactaagggcatctttcttctttaggaatctagaataagaccctatgacggcttgcatttcttttggccacaggacgaagctgtgatctagccctggtgtcat

SEQ ID NO: 478648 - DNA, 1000 bp, Homo Sapiens; identical to SEQ ID NO: 161425

SEQ ID NO: 478649 - DNA, 490 bp, Homo Sapiens
gaggagaatgagtgcctccttatattttagcccccaggtgcctcccttgcctcaaggtcacccaagcccgcagctctagactagacacatgtttccatatccctgtggcctgggccaccagcaggaggccaccccactgtgctgcagcaagccctctctctgaagcccagcacaggagcagcgttctctgaaagcctcacacaaccagttaggcgcctggacagtccccgcagctgagctaccacagcctgtgcattccattgtctctgcagcctccctgcaggactttgaacaaagcccggggggctggtgaggataacagaaggtcaagaattggtggaatgtgataggatgtgctgaaggattcagattctcaggaaaagtccaagatagcagcaagaatttatagctcaaaaccaagacacagttttcgtgagtcatgaatgtgggagccacttagctgggtggttctggcttagtctctcataag

SEQ ID NO: 478650 - DNA, 680 bp, Homo Sapiens
ggtcaagcaggagctcttccttcatgtgatagttcttgagcatatcctttctcagactttctgagctggaaaatgccaggacttcagtctgtcctcacataaaagttccttcttgtctttgcctaatttaacaaatcctggagattaaatgagattttcctctttcttttggtctcacaaatagtatcttagtctcatcaactctcagcttttttcatctataaaatgtaaagctaaagctggctcacctgagggttgtgaagatggcaggggcaggcctccacagaagcccgttgcatggggcctggcacacagtaggtgctccataaagctcacttgcctctgtctcttgttggacttccaatgacaacctgtctccatcgtagagcttctggacaatcaatgttatctctgctcctcctggcagcacagggctcccgcccaggcccactgagacacggggtggttgggatcctggcctggttctccagtgagtcatgatgtcagaaggtgcatggtggagagaagggaacataggctcaggagcagtggcagcggggttgcaccagcatgaggagcccttcgggtgctattagaaggctgactctgctgcttctgcattcagggcgggtgtgtgcggcactccttccatgtccactggcgggggtggcaaaaggtgt

SEQ ID NO: 478651 - DNA, 907 bp, Homo Sapiens
cccaaacatcctatgaagtaggtactattattatctatattttactgtagcatactgaggcttagtgagttgaagtaatttgcccaagaaaatagaggcaataagtgttggagctagggatctttctttattctgagacataactctatttttaaaaagaacttctgcaattaggttgtattaatgattaattatgtcatatccaggcttgacaatatgtattgatgtcacttacataaatagattaaatgtcaggccctctctcataaatatccctttctttgtatacctgcccactacctttggccttttagaaacaagagtgatttttaggattgttctagatgaaaatatctttacttctcaatatttggttgtataagcaactagcttcaggtatttctgctttgcctgaatgtaattcccaggtaactgggcaatgcctgatttgctatatagcttacttcaaccctgatcctcttggcctttctgctctcttctactgcctaaaatttctccacagtcttctttgttctcataaatattattgcctttgaggactgcactctcctttagtcctatataaaatgggactcagccaaagttgtcttgattccacagcttgcaattgatgccagtcttctgccttttcggtgaaatactttttcccttccttgcttccagctgtccaattcaacaaattggtctcatattccaattccttaaggaaactcagtagagaactttcaaaggagtccttcataaatacctcaagattatcagataggcagcagaaacttgaactgggaccctgcttggtccacgtagaaaaacagccaccccataaccaaatgccagttactggaaacattaggctgagcattgtgtcaactattaacttggccat

SEQ ID NO: 478652 - DNA, 567 bp, Homo Sapiens; identical to SEQ ID NO: 161427

SEQ ID NO: 478653 - DNA, 1000 bp, Homo Sapiens
attttattttttaaacctctcatatggtgctgcatgcccaagaatttaatgtccagacactgaataacatctactagcatcaacaccatccaggaaaacatgacctcaccaagtgaactaaataaggcaccggggacaaatcagtgagctccaacacctctggcagcagactttacggtggaaaccccgtcctgagccggccgatgtggtggagctcggagctcgggagccggggacgccctggagcgtgggcggaagggaggccgccccgagagccggaagcctgggcagggcacggaggcctaggacgccccccagcaacagcagggcggcgccacattggtcctgcgcgaggcctggccgccggcgacggcgggacgctctgggaggccggcggtgctcgggcgtagagggagacagctgcccgggggcacggacgagcggctctgggggtcccggatccgagccccgctgccccggggtggcggtgacgcctggagccgggcggacgtggctgggccgggctgtcggggcgggcaggcgccgctgccggtgtctaggccacaccaccctgagcgcgccccagctcctctgagctcgtgaagctaagcagggtccggcctggttagtacttggatggattccgcctgggaatagcgggtaccgtaggcttttggcttcccgctccctccctctttccccgttttgtctccgtgcttcccaaccgccccctccctccaccctgtccgcccctgcgccccagccgaagcccaggacctccccctgaagatccgccactgcagcaccgccaggcagcagcatcccaccttttccgactcgccgcagccccaccaggagccgggctccaacccaggcggactggaccgaccccgagggcgcaggcgcgggttccctgaggtcccgggtgtctttcacgctccccggaagcccaggcaattcattcatccagcgccgctgcgacggtccaaaccgggggaag

SEQ ID NO: 478654 - DNA, 1000 bp, Homo Sapiens
cctaatttacaattttatttcttgggaaacagttcgctggtcttgaagctctgcagtccgggggtcgctaaggaagaggaggatgctcgtggggacgcatcactcccggaagccgtctgtgggaccagcctttggcgccgagaaccaggcgacacagacctgccgcgggatgcaacgggtggcgcggccctggcctcctgccttcacaatggccactgtcagctccagatggcggggctctgcgctgggccgcggctcggtggcgacggaggcggcctgacctggcgccgcgccccgactcgcgcgcagacttaggagtctgcttaaaaacgcactaggacttcgcaccgtccctcagcagcagctgggaggccacccaagtcggcgacattgaggcaatagtcagacagtcctcagctgttgagacccccggtgggtccggccgctgcgactcgatggttccctaggctccgacccctgtgtccagtctgcgctttcctgccacgccaggcagggaccggtggcccctggggaccaagaatagtctacaatgagcgccccgagggtgcagggctgcagggacccagtggcgagcggagctgagttgggcaggcgggaggagtcgactcgagccgctccaaggaaaccccagaaggaaacgcccagaagcgaaggacgcaggacggtcgcaggctgcggggagtgccccccgcggcaagcatcgcggaaccaggtcctcagcagcgtggggacaccacccgggaacgcggcgggcggaccaagggcgacccaggccctaaagctgcggcactgggcccgtatttcccacaaacgcagggcagaggaatggaccgcagtggcctggcctggagtgccgctacgacgccgtccccagtgtcgaaggaagtgaattacatgcgtgtgcacacacgtaaatattttataaacctcccggttgctcgggggcagaggcaccatcgccgtgccagctgcacttgta

SEQ ID NO: 478655 - DNA, 900 bp, Homo Sapiens
cccgatgtcggagctggttattagtaattactaccatcacgggcattattgttgctaattataggcgatgtctcagtgtctgtcctcaggcccggaaaaccggagcccctcctgatgctgctgaagtccctgggcctcgaggctccgtgaagagagggaagcgaggcagggggtgaagggaccgcctggccggtgtccaggatacgggtggctcaaaccaccagcagaacagcatgccgactctggcccgatggccgccttcatcccgtagccccaacccggcctaaagccgagaagacgccagagtgcgctgctgaaattcccgcggagtccggtgtgctggagagccgcagcggggtgaactcccggccccgtctctgcgtaggaggtggttcgcaaagtggccccgggagccgggactggtacccggttccccacggcaccgtccggagctctccagccacgaggcgcagaagtggcctgccagcgccttcccaggctcagggaggcgaggaggcccgtgcacttggcatcttctcccgggagccgcacggccagggccgcggcgaaacggagcccatcgggcgtccaggccacaccgtcttcccccttcgcgggggcgcgggggatgtttccctccggctgccagggggctttctgggtgaagagaaagcccctccccccgcgtctcccccacccctccctccgagaacccgcggcgccgactgcgcctgcttcccccgagctggcgacttctccgcgggatttgccctcgctcaaagtttgcacaattgaaagagcccgcagagctcggccgctccccgcttccccaagggcggcgaggccggtcattggcagacgatcggttactacccagtaggggcccacgggaacccgcat

SEQ ID NO: 478656 - DNA, 1000 bp, Homo Sapiens; identical to SEQ ID NO: 346432

SEQ ID NO: 478657 - DNA, 774 bp, Homo Sapiens
aaaacagcagaaatttattctttcatggttctgtttgcaaggaggcagcagggctgtgctttcttgaagggctctaggggagcatctatctgttccacggctttctcttcgctttgatgtcaccagcaatctttggcttatagaagaatcacttgagcctcggcccctctgtcttcacacggcatcctctttgtgtgtttgtgtctcttttcctcttcttataaagatgtcagtcatattggattagggccctcctaatgacctcatcttgattacaactgcagagaccctatttccaaaaaggccacatgcactgataccaggggttagaacttcaatgtatcttttgggaggacacaattcaatccataacatatatggtgtaacaaaacttcatttgtttttccaaatgcttacctaattgtcgtaatgtcatttattggacaatccatcctttatccatgggtttatttcaagactgattattctgctccagtaatgtattggtcagttctgctgaggtcacatacttgaagtcctgggcagaatccgatccttttcacagctttatccatcttgttgaaatatagattattggcgacatccccaaaaagagagttgtagaagagaaacgcacccagatcgctggagcagggatgtggcggacattgactcttttgtctgctgagggtaatagtcaaccttcttctgggagatgttccttcttcccaccataaccacatggctctaaagagagctgccatgatctaacag

SEQ ID NO: 478658 - DNA, 789 bp, Homo Sapiens
catcgctataaataaaaaacacataacgcacattaaatctcacaataggatttttctgtcatgtgcctacttttagattccaaaagtttttaagtatgacaagattcagagctctttttcaaaagatggaggatccacaggatgggcaggcaccatgagtggggtcaatcagtctttgcctctccattcttctcctttctggtgcataacctgctgatgtatccgtccccgtcgccgtcgcacgtctggaagaggcgccgcatcctctcctcctcgccggtgctggacgtgtcgctgctgctgctgctgctgccgctgccgccgccgccgccgccgctgctggagctccccgcagccgctgccgccgcggccgccatcatgcgcccgctccctacttgggaggaggagtacgcgcgaccgcagctggaatccgcgcggcgcgcaagctgcctgcagccccgaacttgcctgacaacggagcatgcccagtggccgccggggcgctccgggcgagggattccacctctccgggttttgcccggactgggaagatgggcgctctggaatcgcccgaggaggcacctcagggaagagggaggaggggaaggtggctggaagagtcagggagctaagggtggcaacgggaacacaagaggaggcagaatacactggaagcccccgggaagggtgtcagcattgtgcatccggcaacgacgcgggcccgggacacttggggacgcttcaggcagagggcaggtgtactcccggcagaccttctccgaccgcccg

SEQ ID NO: 478659 - DNA, 621 bp, Homo Sapiens; identical to SEQ ID NO: 346435

SEQ ID NO: 478660 - DNA, 1000 bp, Homo Sapiens
aggtctaattgggtgagtttttattgtagaaatgcgcccctgaagatgtgagacgcgtaggtgggcccctgcgcctttccaccggcctcccactgcccgtgctcacagaagaaactgggtccttagacccaggcgggacccactgaaaccccgcgttcagtcatttcccagggggatgcggccccccagtgccaaccttccaaagttcaggtgagttcacgacgctcggatcctagtggggtcctcctcggtgtcaaggagcaagagaggccgtagcagctgtgggaaacagccacagggcctgcgagtccagacgggtagctccaggctagttgcacgcttgcggttcctgccccttccgtgtgcaaagtaaggaagtcagcaggcggcgagcaagcaagacgggctggcgcgccgtctttcaggaaggtttcccgacccgaccgccgtctttcgggaaggtttcccgactggaccctctgtccagaggaagaaagatttggccaggggatcagaatcacggtacctacaggtactgggatcgagaccctacacaggctcccgacgcctcggtctccctttcctctcgggttgccactctagttcaggaagggtctttgggtcagggcaccgtgttcccaggggccagcgatccccggtgtcgtgccctccctaccaggctcaagctggctgctcttggctaggtcgggacggggcgcccggcggccgtggctcagtcccaagctacaccggccgcgtcttccagggcgcgcgggcgtcgcgcagcgagcggtcgtggggcagcgcggcgaaggccgaatggcgcagctggcaaccgatgaagaggacgacgagcgccaccgagagcagcagcaggaagaagagcagcaggtaggtgggcaggtcgggctttgtggccgcgccgtccctcataccgcgcgcagtggccagctccagcggcaaagcgccttctgccttgaccgtggctcctggggccagc

SEQ ID NO: 478661 - DNA, 1000 bp, Homo Sapiens
tcacagcgggaacaatgaacccttgccgggctgggtgggacctgagctggagggcggcgcacagaggagcagaggaggtgcggggttgggggtcccgctcaccggcaggtagtaggtcccgtccaggggccctgcctcagagacccagggtagctgggggctgccgagggcctgcgggcccggggacggtggcagagagaggctgggtataggcccataggcgggcgggtagaggccgagccccagggccagaggggtgtagacgcggtggggcggcccgggagacgagggcggcagcaacacctccacgtactgcccactctcagggtcgaagagcacccgcagccgaggctgccgcggcgcctccacaaagtagtagcggccgctctcggggtccaccaagaccttccccaggggcgcggccccgggctgcctgcgcgctccctgggaggggctttgcggggaccggtccgtgggaggcgccgaggcagcgcggggctgggctggggccgtcctgcccgccaacgccaggggctcccgcgggagtggcgcctggacggcagccgcgggctcgggggccgtaggtggtgtcttcggtttgggtgctatcccagggctcgggctggcttgcatctgaggggagccggggcggggcgatcggacccctgctggccctacgggggagcgctgggatgagctgcgggcgccgcctagagggctggtccgaccgtcgccgtcggggaccaggcgctgggcctctacatccctgttctctcctccagggccgcgcgctcgcactcgcgaggttacctcgggccggcgacccaaggccagggccccaggcaggcggatctctgtgcgcttgaagggcttcgccgtgctgttctctgccctccgccgcaggaccccgttgggctgtgaggcgtcccgggcgaccgtgtcgaaggacggttcaggaggctcgtaggggtgcggcaccaccggtagaaaatccttgatg

SEQ ID NO: 478662 - DNA, 454 bp, Homo Sapiens
tgtgtgtgctcttaattttaaagtattgaaaatccaaattaaaaagaaagaaactctatagagaacaccacatggaccaaacttggtctagaggtttctagttgtagcctctgtgtttgaccttggaccatagctgccttctctctggagataaaaccttatgcatcttatcttatagtcccgataatgcctgtgaggaaggcctggttgtcccgatgttagaggcagggatgtagcattgtggttatgagagcaggccccagaatctgagtgcctgggttcctcagctgtgtgaccttgggcaagttccttcatctctctgtgcctcagtttcctcatcaagctcccgatagtgcagccctcagctcggccttgataaagcatcagaggttaaagcagaagcaatcctttcattctactggaaaagctccccctggtctcagagcggttctgc

SEQ ID NO: 478663 - DNA, 639 bp, Homo Sapiens; identical to SEQ ID NO: 346439

SEQ ID NO: 478664 - DNA, 424 bp, Homo Sapiens; identical to SEQ ID NO: 346440

SEQ ID NO: 478665 - DNA, 845 bp, Homo Sapiens; identical to SEQ ID NO: 346441

SEQ ID NO: 478666 - DNA, 1000 bp, Homo Sapiens
ttatctctgcgaggacaccggtcggcggcggacagcagcacgcggcgtccaggacccggccttcctagagcttaggtcactgtagcctccaggggcgctccgagtccatctggagggccgcgaggcttccaggctggaaggaggaatagggagaaggaggaatagggagacctggggcagtgttacaattacagaaaagggagaggcgaggtccgctgagtccttggcctgggcaacaaggcacactgaaaactgggttccttttcgacccgcatcgtgcgcgcccggcagggggcgcccgagcgcagctaaaaggctcggcgggaggtcggcggcctcagtggcggagcgcggctgccggtgtgcggccgggagcgatcgccgcggggcaggggcgcggcgggcaccgcgcagagcgcgcagaacagacggacggcggcggggacccgacggcggcgcctcggcactccccagactccggccagcgcccccctgccagccgcaagcacccagccccggcccaccccgggctctcgatggcccccgaggccggggcgaccctgcgcgcgccgcgccggctgtcctgggcggcgctgctgctcttggccgcgctgctccccgtcgcctcctcggcggcggcctcaggtacgcgccgcgcccgggcccccggcgctcctcagctccccgcgcaccctcctgcgctcgggccccgtcgtcccgctcagtgctggctacgggtcgtgtcactagcctgtgcgtcctcgtcactcgcgggtcggggcacttggcgccctgtgtgggtggcgggagcggggacgcctcggtgcccggggaccgcagcgcgctggcgtttaactttgccgtcgcccgccttggagtcgggaggctccagccgtctaagtgtcccgggagattcaggcacagcggggaaaaaaggaaaagaaaggcgactttcagcgtgcggactggggtaatgcctttctttgcccagaatttctcg

SEQ ID NO: 478667 - DNA, 1000 bp, Homo Sapiens
tcacccatgcagcttctccctcgtgtggatcccgtggtggcggatgaggttcgccttccgggaggtcttcccgcagtcggagcactcgtacggtttcttccccgcgagtccgcgcaggatgaggtgtgacttctggaaaaaggcctttccgcattccctgcagccgcagggcttctcccccgtgtgggagcgaaggtgctcgatgaggcgcgacttgtgggaggttttctcacactcccaacacttgtaaggcttcgctccggcgtgaactgtgcccgggacacacaggcgtgtcttccggaagatcgttttaccacttctgctgtctctagcgggtttctcctttgtgtgagttccctgtttgtcagggcaaagcttctccctgaaaccactcccccgttcactgcacgcagaggacttctcccccgcgtggaccccgtgatgtaccctgaggtccgatctgcagcacaaggctttcccacacttcgtgcattcgtggggtttctcactactggctccctgagctgcaggaactccctcgtcacagcttaaagcacttccacactggtgacctccgcgtggattcgctcctgggaagctccacgtccttatctcttcctcctccatccatggctccttcccctgctccaaactggagatcacagctggtttgctgacttgacaccctcttggggagaaacggttaaaggatttgtgctgagccagctgggccttccaagcaagcagacagttcagcccgaggaccacggggaagtcttcctcacccacagagagcaggtggctgtagttctccagcatcacatcctggtacagggtcctctgctccaggtccagctgctgccactctttccgggtgaagcccacagccacgtccccgaatgacagtgaccctggatctccattcattccttcaatgatcaagtgtctttcagggacctcgcacactgctggtgttctaccaggcgcttggggtcgaggg

SEQ ID NO: 478668 - DNA, 645 bp, Homo Sapiens
ttagctatttcctggtggtaagtaaaaaacaaaacgaaacaaaaacaaacaacaaaaatcagtttcaaatgaagcaaggttgtgtattacattctctctttttgacacatttgttttgtctttttctcccaagtctttctcaagatgtgtcaatccatgagcatgtcttcctttcttgtgtacatttaaatacaggaaaaatattctaatacatcctgtgttccatccagtccagcagtatttacacagttttgggcaggtctgctctgctaggccagccgaggtcatgtgataaggctgctgcatcccaaggaaagggtttcggcttttacaaggacaagtgataaccttggcagagagcctttcattttctccttctgggtaagtggctagagctgaattatttgtgttcttggactttgttttatcctcaaaatataatgaccttagacagcctttacttctattttctttacctttgtctgctaagttcacatcaattttctgcagaatggcaactttctgcaaaattggttcttctgttcttgttgcaggcacaaagcgcagcttcctatgtcctccattgtctagaggtccttgactatcctgacacttgacctgctcgttgtttaactgggtgggcat

SEQ ID NO: 478669 - DNA, 801 bp, Homo Sapiens; identical to SEQ ID NO: 346442

SEQ ID NO: 478670 - DNA, 912 bp, Homo Sapiens; identical to SEQ ID NO: 346443

SEQ ID NO: 478671 - DNA, 1000 bp, Homo Sapiens
ttttttttaggaatatgttcttaaatatctgctttttattactctcttcattaaattgacatatcatcaccattatgattgttattaatgttattatattggtacagttctttatcatggatatatttgtggtcatttttatgtaatgttgaaaaatttttttatgttcctgaagactgttgaatttgctgaagatgattaaaagacaaccttaaaacataaataccacagcaaccccaggactcctactgtactgcctggtgtcctgtagaagaatgggcttcctgaattattcttttatttttcaggcaagtacctattcataccagcataagagactgatgaagtgcaccctcatcttgccatgggctcagaaagagttcatacatcggctttatctgatagcaactctgtgtgtaggcctgtgagtcctagaatgcactttctttcaccaactagtccacgtaacagttttctaagtcaaatcccctctccatgcttggataggtcatgaatggctttctgttacccacctaagatgaagggatattgccaaatcaggtttgtggccaagaaacttttacctggagtggcaggagagggcctacctgttcaccagagtgtctgtgaattttcttttttcttcctttttattttatttatttatttatttatttatttatttatttatttattgagataaaatgtctctccgtcgctcaggttggagtccagtgtcgccatcttggctcgctgcaacctccaactcccaggttcaagcgattctcctgcctcagcctcccgagtagctgggattataggtgcgtgtcaccacgcccggctaatttttgtagttttagtagagaggggtttcaccatgttagtcagactggtctcaaactcctgacctcatgatccgcctgccttggcctcccgaagtgctgggattacaggcataagccaccgcacctggcctctgcaacattttctaagtcagtat

SEQ ID NO: 478672 - DNA, 1000 bp, Homo Sapiens
tggattagaaactctttattttagaggctgcattcatcttgttgacagttttatctccagctctccgcacagtgtctgacacatgacaggatctcgaatgttcgttgactgacgcggcccggcctgggccctagcgctgggtgcggcggagccccgggctcctgcggggacgagcgtggtcccgggacgcgcggtgcagccaggtgcgccggcggcagtggcagccgctgagcgccgcgtcgcacgtggcaacaggtgcagcgctgtcccgggctggcgccggggggcgtggggcgcgtccgcacttagtccgggagcgcgcggagcgtcgggattgggacccgagagcgggagcggagagcgggagcgcccgagcggagtccagcgccccgaggtacggcctcgcacgtcattcaggttccccgagggccgtcccctgggacggcggctggccttggtctcccgcagcgagccgctggagtggagccttcggaaggagccgccccgggttggggcgggaggcccgagttcgggccgcccccgagacctccggggcgggttctcggcgaccccgccagtggtgcaaagggcgccagccctccccgcctctgcgtctttgctcccggagcgcttgaaggagctgcgggtaagtgcgcgctggaatctgttcccgctgcccggcggccggggtggggaggggacaggcgagcgcgccgcccagggtgacgggaccggtcctcggggaggggagggggcgttccaggggcctgggggccgaagctgagggctaaagggggcggcagcgccggcggagcggaggcgggtctcacgtgggccagcgcagagcctgcggaagggacggatgcggatctcgtcgctgtcacatgtgttgatcatttttgaaatattgacaaggattggaggaacgtactccttgatggtcccctgcagaaggacctcgttattaagtgggctttgactgggaatattccatgaagag

SEQ ID NO: 478673 - DNA, 952 bp, Homo Sapiens
tttgtactgggaagccatggtagggtgttttattgagtgacttataataaacccattttctcaagaaaattataggtctgggaatgtaggtttgttctgaaaggaaatgagaagtgtcagcaaataaatgggttccacgtgtacagctaagttcccgtgaaatcctctaaggtcagtcacatccttatataatcctaggctggagtcacaaggtcaagtctcagcccatgttgttgccatcctcattggagtccatgagtggagaaagccgtgtgttttcttcaacctcatcttggtatctctgctgcctgacgtaaggcttggcttcgagtagtggctctctaagcctatataaagaggaaggctacaaataaatgaattaatgaatagatgaatgattatatagttccatgcactggcacgaataggaagagaagctattcggttggtatggaacatattcctggtgtcacaaatgacactacaggggcagccacagggtaaaactaagccgaatgagtttgtatccaatgtgccattctttcccatgagtccctgacagccccatcttccagtcagcactacagggccttgtgggtaaagaaatgcactttgctgccccaggggagtgagtctgaggctcttcaggcagcagctggatttgaaggctttcttttctgctctgggattaggggaccaaaggaccctggaccacagactttaaggaggccctcactctcaggtgctcaccctgccctcgcatgcccctgagggccagcgcctcctttaagtcctgcctcacaggcacctgtcctttctcaccctagtccaggccttgctatgacttcataaagagcacacaggacttggagccaaatgaacctggttgcagtgagaggtttcagcccccatcagccaaatgctcttgagcaggcctcatctggaaaataat

SEQ ID NO: 478674 - DNA, 1000 bp, Homo Sapiens; identical to SEQ ID NO: 346446

SEQ ID NO: 478675 - DNA, 820 bp, Homo Sapiens
tcatccagagctgatagacctcttgcaagtgacgcctttgaacttgaaggaaacagtggccattatgagaaagtcacttagcttaggcgcccgggaaacagctccagtgaatggggaattgcacacagaagctttcttgagagggtgcttgggacacatctcagcaagacggttgctaagtcctggtgggctcatttcattctcagcttctgcaggtgttctctgttcttcactgcaaaagtagaactcaagttctttcctgaattcagccaagaggagcctcaggagacatgaccaaatgtgctgtggtatcccagatggggtcctcaaacaggaagatgacattaggtaaatactaatgaaactgtctggccctttccagaaaaggtctcctgacccctcctccaaacagtaatctcttctcaatgacaccatctctttgcaggctataaggaaggaaggagtgctcctgtttgtactcgttgatatattcaggtggttacaagttcattatctcattgaaacctgagatcttttttttctttttctcctggtggtgactttctctctgtgtcaggagcaagggtactgattcagtttttccttccttaggagcatgtctgtaaattaactcagatttacagtcagagaaatgctgcctgctggttgacaaagttaaaaccagaagcctcagctcagaaatgttcttgtcaagcaaatgcctcatctcctgctaaaaacattttgtctcccatgaacccacatgaggaacaattcggtgaggtgagtgggtcgtcttctttggcaaaggaggagaaag

SEQ ID NO: 478676 - DNA, 423 bp, Homo Sapiens
tttttaagtctgttttgctggaacttttaataaggaatctcaggttagactttccaagtctctcaagaatacaaagagaacttgtctggcttgtttcaactttgcctgcaatatctgtagactttgatgaattattcttttcttgatgtccccaatatacctgaggtctgccaggaagtgacctttcttactcatctgttgccagattctgtcacttttccagggatcccaattgtagagcaggcagggtgtcccagagatcccatctgggtcaccgaaactgtaggggcagaataataattttctccatatcctttctgtgtttccggctgggacttcctgttggtttcttagacgtctacaccggcccatagcctttgtctccgccaccatggcctgaggtggcagctgccctttcatgac

SEQ ID NO: 478677 - DNA, 1000 bp, Homo Sapiens
atagaaaacattattgttttattcatttaaaaataattttaaaaatgtaaatgatgcacacgcttacaacaactcaaacaacattgcagacgggcttgtaatataaacagagttgtcagaagtttccatctctccccagccccagtgccacaggtcagaatcaattccttttttcttccccctactgggcattacctacattaataattctgcttgtctagtggttaattaattaatgtacctgcatggctaattttaggcttatgagttttagacatttactttctgctacgacagctaagaatttcctgcccgctcttcctcggaatatagttacatccttatttccacttctgttaattgtcttttaaagtccaggactacatacccttttctagttccatcgcgaaggcgggaagtctcgattcctcactgggaaaggtgaggacatggatgcctccacccttccctgaagcactcctctcctcttctgcggaggtggatttttaaaaacagattggggttggggtgggggagggacagcacgcagaatattgatgcaaacgtcatatgaaaaaaaatacatataatatatatgtatgtatacctgcaaagtgctgttacatatacgtgtgtatattaacagcattatgaatcccagacaattggggccgcttaccgccgtggctgtgactttaaattcactcacttcttacatccactaggaaaagaggatttgtttccctaaagcctataaaaggggaaaggcttaggcgcagtggcagccccgttccccgcaccctcctgccctcgggtcccgggcgggctgcgggagttcctcctgcgcgggcgtctgaggcgctagaggtcaccggagcgcgctcccctcgccagggacctacactcttcccgctgctacattaggccgcattaacaaggatctggattcactttaatttaaaaggtaaaagatcttaggtctgatgggggagtgcggcga

SEQ ID NO: 478678 - DNA, 647 bp, Homo Sapiens
cggccgcgaactggcccccatcaccgccgacctgccccggccgccatgttgggaggaaacgacgcgtcacgcagcggccgaacggctgcagacgaggaagcggcggcggcggcggcggcggcggcgctccctgcccagagctgccgcggcgccgggaggctgggggcggagggcggcgcgggaggagcggcccgagccgcagcgctacggcggcccggcggggcctccagcgttcgcctgcagggcggcgtggggcgtggcgggcctctggtggcaccgcgcccagcacttcgggctcttggtggcggccgagctgcgggaccagagatccccccactcggcacccctgctcctgccgagtgaacaggactcctggctactctgcactggctttctaactttctgatgggggtgcagtcctttgcattccaggggtcacagcaacacccgcatcgcccgttctcagccgcagggtctccgcctgcatcactcgactctaaaatttccttccctagtgcacggaactgctgtccaggactctgctctccgactacctcagggaggattccagacccctctcctatcagcaccaccacctcttccaccaatccccacagtattaactccacttccactctgtccgacat

SEQ ID NO: 478679 - DNA, 701 bp, Homo Sapiens
cacagacaatcagagtttaatggggctgattttcatgatggtttgctcctgataggaaggaagagcaggctcaaatagtggggctgtccttagcccagcctccagggctgatgggctgggatgaagtcatgtggaccagtagaaagaaagaaaatgtgaggccaaaaaataggatctttggacttagttttctatttaagagctccataggcttgaataagtcagttgacctctctggacttcagtttcctccagtacaaaattaataacttggcctaagtgatcagttctacaatgggtgtgactgcctatgtctctctattggcatggggctcactgctgctgcagctgctgccattatagctgcccctgtgataactgtggtgggtgcggtcacaatcctggaggccagagatccgagtgttggcagtgttggtttctctgaggcttccttcctcggctggtaagatggctgtcctctccctgtgtctatccccggactgctgcagggatagagaaggcaggggtgatgataaggcttgtgatggtggtggtgggtcctgtggtgctggtgaggttcattccttggcttatggcctcttcctccgtcttcaaagcacatcactccaacctccgctttcgttcttatgtcttctctctcagctgacactcctgtctccctctttgggggctgtcattgt

SEQ ID NO: 478680 - DNA, 845 bp, Homo Sapiens
tgaaacaacaggcatttattgcctcacagctccggaggccagaagtctgaaatcaaggtgtcagcaggctgggttcttccgagggccagagggaagggtccgttccaggcctgcctccttggcttgcagagggccatcctctccttcatgtggcacatctgtctccaaatctcccgtagcaggaaaccccgaaggaagccctgagccctggaaggagctttgcgggaagcaagctgccggagaccccaccataggcagtcacagccatctgctgagctccggggtgaaagctggcaagctggggaaatctctttagtgcttagggcactcctgcagggctggactcgcctaacggcggggtaggcagagtaggactggacctcaggctgccaggctggaccaaagcttcccctcctccgcccctccttgtccccccggcccctcgccctccctggcctccaagtccccaccgtctccagtaaggctgtccagacgtctgtgtcttgagctggtcccagcgtctttgttccacgtggcagcttgctcagcagccccagggcctccgcatcccccggggggtcgcgtagcagcagccacaccacggggcgctgctggtcagcgaggcccacatttccaaacccaatgggcccacaggacagtggcaaagagggtgtggctggcattccttgcagaaaggaggggactcctcgaggggcacctggagacacatcccagaacagccgctggaccgagagccaacagggcgtccagcggggcaggatccgtgggcacacatagaccagcgggacagtggcaaaaggggagtatgggacagccgccggcat

SEQ ID NO: 478681 - DNA, 872 bp, Homo Sapiens; identical to SEQ ID NO: 346448

SEQ ID NO: 478682 - DNA, 637 bp, Homo Sapiens
taaatacaccaatttattgatttacaattgcaggcaaggttaaaatatacatgttattcagtttctcctttctggaaaatgaaacagtcagaagactggtgaacatggaatgaggacaaaaggacacaaggaagtttgaaaggaaatttcatctcaaggcatggtaaattctggagaatcatcctggcctccctacagagaatcctctttggtggcagaaagtgcaggtcccccctggagagggcaggtcagggaccaccgggtcctcgtgtgcagctcccggacagacgccgttctccccgcctgggtcttgagtagggcccagcacacagtaggcgcttaatgtctgcctgcctaacagacgaacgccggatgcccgcgttcggccccgagccggcgcttcggggctttctgtggaggcggggcgatggttacagcacagttcccccgcgctcgccttttccacatccacctccgcgaggccccccgcaagcgccgttggaaacctagtcccgagggggctgcaagagcttgggagaagaagcgccaacaccgacagaataccaggccgacccaatgcggaaatcaattgaagctggaggagaaggtgggacctagcttcctccggacttctcat

SEQ ID NO: 478683 - DNA, 1000 bp, Homo Sapiens; identical to SEQ ID NO: 161429

SEQ ID NO: 478684 - DNA, 1000 bp, Homo Sapiens; identical to SEQ ID NO: 346449

SEQ ID NO: 478685 - DNA, 1000 bp, Homo Sapiens; identical to SEQ ID NO: 346452

SEQ ID NO: 478686 - DNA, 1000 bp, Homo Sapiens
tcagagagagctttcaagcaggagtgatggagatgtcatttcagagggaatgggcagctggatgctttcgagcaggagtgatacagacgtcatttcagagggaacgggcagctggacactttcgagcagaagtgatacagatgtcatttcagagggaacgggcagctggacactttcgagcagaagtgatacagacgtcactttagagggaacgggcagctggacactttcgagcagaagtgatacagacgtcacttcagagggaatgggcagctggacactttcgagcaggagtgatacagacgtcacttcagagggaatgggcagctggacactttcgagcagaagtgatacagacgtcactttagagggaatgggcagctggacactttcgagcagaagtgatacagacgtcactttagagggaatgggcagctggacactttcgagcaggagtgatacagacgtcatttcagagggaatgggcagctggacactttcgagcaggagtgatacagacgtcacttcagagggaatgggcagctggacactttcgagcaggagtgatacagacgtcacttcagagggaatgggcagctggacactttcgagcagaagtgatacagacgtcactttagagggaatgggcagctggacactttcgagcaggagtgatacagacgtcactttagagggaatgggcagctggacactttcgagcaggagggatacagacgtcactttagagggaatgggcagctggacgctttcgagcaggagtgatacagacgtcactttagagggaatgggcagctggacactttcgagcagaagtgatacagacgtcactttagagggaatgggcagctggacactttcgagcaggagtgatacagacgtcactttagagggaatgggcagctggacgctttcgagcaggagtgatacagacgtcacttcagagggaatgggcagctggatgctttcgagcaggagggat

SEQ ID NO: 478687 - DNA, 1000 bp, Homo Sapiens
tcaggacttgtgctgggccgacacgcccttccagtagtccaggatgtcgtgcagatcctcgtctttggcgaactgaaccttcttgcgcagggcatggcccgcggccatgaactcctcttcctccttgtgccgccggcggctcagtctgaagcgctcccagatgctctgggaggcccggcaggtgtactcggggctggaggagtagctcaggctgtggtactgcggggacagctgcgagtaggcgaggtcgcggggccgcggccgggtgagtggctccaggatggacgccttgcgccccaggccctcgtgcggaggcggcggcggtggcccggggggcgcaggtggctcggccgggtgggagccggggtacgagtgccggtgctcgccgtactggcgacccttctcggcctcggccgcagcacggcggccgcgggtgtcacagtgaggatggcgtcggccgcgggggagcccttctcgatgtacttcgctcagaagagcggccttgtgcaccccgacggcctcggctcggaaggcgcgggggctgcgcacggagccgctggacgaggtgctggcacgagggggcccggcggcctccacgctgtggtgccgctgcaggctgtggccgaaggcgtccttgtacccgggcgccaggaagccgtgcttggcggccagcggctcggacagcagcaccagcggcggctccgcgacggacacgggccccgacttgacgccctggaaggaggtggactcggacttgagcgcgtcgatgcagttgttgatgatctggttgaccttgtccacctccttggcgatggtggagatctcggccaccgaactctggctgtcggggcccggccggcccagctcacagtccctgcgttccggagggtccccggttcgaacctccatgtagctgcccttgctggccttgggggtgtccgcgctctccaccagcttgtactgctccacctcgccggccgcaggcaggtaagggatgcgc

SEQ ID NO: 478688 - DNA, 1000 bp, Homo Sapiens
tcacagctcctctcgagggtgagcggtcaccggacaccaacgggagaggaagtggggggctgcctcaagtgcagtaagagcacagcgtgtggccacaggacggagacacagccccacagggcagaagagaatccaggacacctggcaggggcagccagcgctctgccacatggaggcctctgcagtgtcactcaagcagaggctggtgcccacgcttctgtcatccctgctttccatccgtaagtgtttcgttttctcacggaaaggtccgacgccttccagaggcgggccaccagagagaggaaagccaccctgggctctccggaactgggcgacagtctccaagctggtgaccctgggtaagtgcagttctgaatctttaacaaagtcctctgattttcttgaatgtctcttctttttcttcttcttttttttgtgtctgtggaggtcagcgtcagagcacgctgctgagaggtctgagtcctgctgatgcctggagtcgcggtctcggtgtttgtctttggatttctttttcttctttgattttttgtgcttctttgctttaggctcttctagaggatccttctgttcgctcctccgggctttcttttcaacatgactgtcactgttctccacactgtcgtgtctccgtttccgggactttccattttcgtgttcgtgaaaccgatcagagaggttacagttgtctccggctacaagtgcagttctgtcgtgggagaagcggtcggggtgcggggcgagggcgtggggcgcgcctgcgcgggggctgctggggcggtgccgctccctctcccgggccggctcgcagcccctacggccccggttgtggtccttgtgcggccgctcgtgcagcccggcccgctcgtgctcgcggccgccgtggaagggcttccagtcccgggcagcgtacagggcgtacctgtcatggtagtaccggcacctgtcccagcgcggcctgtcggggtagaacttctcccgg

SEQ ID NO: 478689 - DNA, 1000 bp, Homo Sapiens; identical to SEQ ID NO: 346311

SEQ ID NO: 478690 - DNA, 1000 bp, Homo Sapiens; identical to SEQ ID NO: 161430

SEQ ID NO: 478691 - DNA, 1000 bp, Homo Sapiens
tgaagggacaccgatttattgagtagcagagctgagggaaggcgtaggatggctccagcttccggtcagtggctacatggtcagttccatgatggcgttgacgatgtcactgtggttgtctctcagagcccgcacggccttggccctggacacattggcctgcgccatcaccagctcaatgtcacgcagttccagccccgcctcgtccacctcttcctcctcctcctcttcctcttccttgcactccagcctcacccggggcctgggtgctgactcagggaccaaggctgagggctctgagggcaccttaaacttctcagctgcggctttgtgcacttgctgggacaggtcctcaatcttggcctcgccaaagaccacataagtgtctgaggctgggctcttgaagacatcaggcttggcgatgacaaagaggatgttcttggacttctggatggtgatcctggtgactccctgaatctgccgcaagcccagctttgacattgcctttcgggccttcttctcactgcgactctgcttggctttggcgatggtctcctcactgccgcctgctggggcctgggctggacactgcacggtctgaggagccaagatgtcctgctcgtccagctcggctgatgactccccgtggctatccgaatgctggcccgagcccagggcccgaggcgagtcttcctccaggctgtcctcatcctcttgctgctcgggggctgagagcccttgagggccagctgggctctggggcccagagggaggaggcacttggcaaggcggcaagatctgcaaggccaggtctttggcatccatggaggccaccttggggctgaggagtggggagtgaggcgagaggctgactcgcggcccagtccccagaggctgtgtggttcctgagacagcagcagcggcaggctggactcctgcctggggcggtgggaggcccagagagcctgggggctcctcgtcttccacagagtcttcctgg

SEQ ID NO: 478692 - DNA, 1000 bp, Homo Sapiens
tctaattgtatattatttttattcaatgcatacagccatttgcattttttacacattgcatacattctcctgtagcatatcagtttgatcaatgaatataaatatatatgctcgattaagtatctcatatagagaactaatttgaaacttaaattttaggtaagcaaatgcatgataagtttattctgggaaagaagctaaaatatctgtgactttatttggctttttgaaaacattctcacataaaattattattttattaatcaattaatgtacaaaacataaaactatatttttaagctaattacttaaatataaacaatttaacatttataaaacaaggtaattcagtttgactattaaaaagtttttgttaattctactaaattaaatattaaaacagcatatttttacttaaaggtttatacaaaataacaaatgtttaatattttgaatatcagtttgtgaaaaaatagcaaaaattttaaaacagcaaatgttataatgttttatattaaatgtttataaattcatggcataataaattaaaatatgtttcttaacataaactgtatcaccatattctggagttaaatttttctgtaactagaaatgatttctatgaagactacaatactaaatattggaaaaggcttaacacctgttctgtaagttttctctagttaagaatccagtagcaatgcctgctaagagtggttcacacaataggaggagcaagtgatcagttctgagacactgggacatcaccaggcgagcagggcagagggtaccagaggccttagttgtgtttgttagccaagtgtttcacatcccagagaaatgcaagaaacaaaaaccaacacctgccccttctatgcggcaatgtcaaatctgctgcaaggtaaattattcaatgagagtctatattaataaaatacaaaaaaagcctcagaaatatagctataatacagtcatgtcatatttagccatttaaaaatta

SEQ ID NO: 478693 - DNA, 1000 bp, Homo Sapiens; identical to SEQ ID NO: 346455

SEQ ID NO: 478694 - DNA, 1000 bp, Homo Sapiens; identical to SEQ ID NO: 346457

SEQ ID NO: 478695 - DNA, 1000 bp, Homo Sapiens; identical to SEQ ID NO: 346458

SEQ ID NO: 478696 - DNA, 1000 bp, Homo Sapiens
ttatgccagcgtctgctgagggggtggatgctgcagatagagcccgcggctgcttatgccagcgtctgctgagggggtggagagggagcccggcccctgggtgtgctcggcagctgctgagatgatggcaagggggagcgcggcacctgtcgtcgtcacctttgtgacgtcccaagcactggggggccctgccgcattccggacctgcccctgcccccgccccgagttgctcacctggatcctctgccccctgtgcaggtcctgggggccgtaggacctgcagtcacacatctgggcccagcacaacccgtgcgtggggcaggagacgcgggcacctcctcctgtgtggcggagccccgtgcgcacctggcggtcccacgcggctgcagggctgttgggcatctcagagggcgagggcgccaaggggctgggctctagacgctgtccgagaacgttgaggaccaggcagcggtcaaggttggcccgagaggaggtggtgggtggtggggacgaacctctctgtagggaaggggcccaggagctgtcttgagactcggcagccccctcccagctggtggcgagcagggacagggaggccaggccggtcacctggagcagacggacacggcccaaggacgcggctggcatctctgccgaggcctggggtgcccctgactggctccttgccaggggaggaggcctggggggacccccgggggctgctgaggtgaggggggcccaggacccggctgagcagagtgagtggtcagggtccagcgcgggcacagaagtgtgggtgttcacatcaggggctgcagttgaggagggaggaggagcaaagcatggtgccacccagggcaggacagggtccaggtgcccagcagcctccatggcacaggatggcctgggagccgcgtgggagcctcgtgggagctgggatgtggcggctgtgacccgcatggagtcagggccaggctcctgcacccctggggagtgggcg

SEQ ID NO: 478697 - DNA, 1000 bp, Homo Sapiens; identical to SEQ ID NO: 346459

SEQ ID NO: 478698 - DNA, 1000 bp, Homo Sapiens; identical to SEQ ID NO: 346460

SEQ ID NO: 478699 - DNA, 1000 bp, Homo Sapiens
tggttttgtgaactgcttttatttcatttggttttatattggaatcaattcaccatgacatttaatagccttcaaaacaggatttttgtaatggctgcgtgttagtccatcatattaacatttatttatacattcctctattttggacgtaacagatactatttcggaagatttgttttttataatctctctaagatgaatatttttctcctagaatgtaaacactataaaggcagagagtttgtcttactgatcacaataccctcaaccccccagaagtgcctgacacatagttggagctcaacagggatggatggatggatggatggatggatggatggatggatggatggatggatggaaatgtatatttgtatttacctctgataatttctcaaaagtcttcttagtttgagcactaacattgattctctagttatgcttgctacacagaatacagggcatctatttatctgaaaatattcattatcccatattgtactagagccatatccattctttatctgacacatctgaaattagttgttatttatctgaaattcaaatttaatttgatgtaccacattttaatttgagaaatcagacaaacctagttcttaacataccaccttcacaagacagcctggctagaatactccactggtctctgagcaaaagcctaatccccttaaagagtctaagcccattaacctatagcagccaaactgagtgctgtaaacaacctctatttttgagctcctgatcttctccattagtcaagacaaattagaaaaacaataagaaagagaacaacccatcatgacaatggaagaaccaggccatgatctttccaagcacaaactgcagcattttagcatcttcccagcactgcttccctgtctatccctacctgtcctcccctgcctctgacattagtcatcatgatgccttcctgcttctccaagggactcaggatctgatccttgcctccccatccaac

SEQ ID NO: 478700 - DNA, 1000 bp, Homo Sapiens; identical to SEQ ID NO: 246643

SEQ ID NO: 478701 - DNA, 930 bp, Homo Sapiens
tcagtagcaatggcattttattgagctttgcacttactaccaagcactcgcttgttccaggacagccccatgaggcaggtcctattatcattccactttacagatgaagaaactgaggcacagggaaaagtgtccaagggctgacacctggtaagtagttgaggcagaaatgaaaaaaaaaaaaaagccaggctggctccggagaccatcctctcgccccctactcagctgacctccctacgtctctgctatcctctgacctgccggctggacacgccaatgtcgctcgtttgcgtgccccgaagccccgctttgggtcctgggcttccagcgcccgcttcccgccgaggggctccgggcacctgcagccctgggcgcgcgtccccgaggcgggcgggagcgcgcacggcgggagtgcgggagcggagcgcacgtgccgccgggaaggggccgcgccaatatggcggcggctgcggccgctgcggtgacggttggcggcggccggtgaggcgggcggggccggaggcgcggaggcggggtcccgggcgagccgccctgggaggcgggggccgtttccatagcggcggcaggaggtgtcgcgccggggaacttcctggttcccgggctcggcttcgccgggatcctcttggaagggaaacaatggggcggagggcactgcggtagccgccgccgccgccgcgccgcgccgcgccggatctgctcggccgcccgggaccgccagctctgtccgctgcccacagcctagcagtcgggaccgtactgaggtaacttccattcctcagctcccgccgtgaggggccggcggcggcgggctccgcgggcgtcctccccgggccgggactcggagttggccccggggagccggacgccgccattcccggcccctggaggaggggacgcggctgcggt

SEQ ID NO: 478702 - DNA, 1000 bp, Homo Sapiens; identical to SEQ ID NO: 161431

SEQ ID NO: 478703 - DNA, 1000 bp, Homo Sapiens
tcagaagaggatggccttagcacgctgaagatgaattaaatcatctgcactcagagacccattcttggcagcactgtagaaaactttgtcttgttccatccttgaaaaagcctccagcttccaagctctttctctgtcaagaagataaactggtgaatacaggccgttgttgtgtgccaaggtgcgaagatcgaagtagaatctgctataaacactgttagtaatgctgttattataattaattagcttcaagaattgcctttccaactcattcatttcttcaactgtaatgttcttaaagagcttgcagtagtcctcattccacacagccatatcactccaaaccttggaggcaagaagaatggctcccaagacaatcctcttccagttagttggacaaatgtcgatatcagcataacttacaagtctttctatgtaaatgattgcaaactcagctgttagcctcatggctttaaacagagtacgaacaaatctgaagatcaatttgtgttcaggatcatacttaaaatattcctccaaaacctcttttcggataattttgattggtgagatgtcttttagttttttacaatatgaacagcaggatccatctgtttgagattttctcaggaatattgtgcttgcctttggatggtcagaagggttgggctccaaaggtatatcttcaggcatctcccgttcacagatgtggtgcatgtggaggccctcaccagctacaaaagtcacctcaccaggctctacagcagcagccacaggcactcctgctatcaggtccccagctgctgcctcatagatctcagactcacagtgacacaccaatccctggtgctggtgcaacccagggctggcccttgggtcaggccagccatgtgttgttggactattccttggagatacactcttagtgactgtcaaagttcctgagtcattaggtgcctgcagactatgcccactgatatttgcattaggtgcaggctgc

SEQ ID NO: 478704 - DNA, 1000 bp, Homo Sapiens; identical to SEQ ID NO: 346463

SEQ ID NO: 478705 - DNA, 1000 bp, Homo Sapiens; identical to SEQ ID NO: 161432

SEQ ID NO: 478706 - DNA, 1000 bp, Homo Sapiens
ttttccaagacaactacatttattcacacttacacacgaggcccccaacgcactgcttcccacccccactccccagccccttccccccagaccctcccttcctgccctccccattcagccaccctctccctcccctccctcccctaccctccaaagctaaggcccagcaagatcagcactgggggagaagaagcttttgaccgctttggggcatcggatgccagagccccatccttggggattggccccagagagcctgctcagaagcccctactggctacaatgctgcttcttctccttcctggagaccaaggggtcaccctttctcttttgagactgtgaggggccacccagcccccaagtcagggattgctccccagagaccctgagcccaggccctgggtagggtgtcttttcagcaggggacaggcttccaaagagaggtcgcttcttggccttgttggcaggagaaggtgctaggttgaggcctcttctctcagcagatggggactgatgagttccctggggtccccacttttctgggctgagaaggcccgaggcagggacagggctctggggtagccaccagggcagaagcttgtgctgggaacccaagaggaaggccaggctggggagttcctcctcctcacttgacccctgagccagcccatgtgactccctgacaggagaccctccagggagatccaaggcatccttggtacccacgccagggcaggtgggtctgtggtcctggggaggagaggttggccaggcagccctcagcccaggggaatcctgacatcccaaaagcacaacagagtcttcggacctggccatgccagtgtgtgctctgcctcgtccctgagagtcccgggcagtcatctggggtgggcaggtttccatgccaaccccttgttgggggtcagggacgtctctctctgctccttggccagctgcaaacttagaagaacttgagtccaaccgggctgtgccacgacta

SEQ ID NO: 478707 - DNA, 1000 bp, Homo Sapiens; identical to SEQ ID NO: 346465

SEQ ID NO: 478708 - DNA, 1000 bp, Homo Sapiens
gccgaaacagaacattttatgagaagagcaacacagaatcagggccacacctgctccagcccacctccgcttgtctctccttggtctcccagccttactcccccctctgaggtattcacccgacgcttgttgagatattgcctccctaccccaaaagagataatgttcctccctccccctgcttccctccactcttccaactgacagaactcaaaaagtcgattctcccaacccagatgggaacttggaggctcagagaccccaaatccttggttgtgcctaaaaggggatgctcagcacctagaggattcctgtgaattccacaggacctgtcacagactgccagggtaggagttggaaggtctgaccaggccttacttggggcagcttcccttcagcatctcttgaacacacttctcaaccctgacccctgatctccacacacacacacacacacacacacacacacacacactcacacacacactgcctgcaagtcgtgcccttagctctgtgcccactccttgcgcactccttgcgacccagagcctgggttcttagcctctcaagatctaggaaacaagatctggtcggggtaagcagagagggggtgtccagggtgcaagccaagcccagagatctgaacacggtgaaaagaatcagatgccagacagaagcccctgcgcaagatgggtctgcctggggggttgaggaggagatgggagggggtaatggcaggtgaaagaacaaaagaggagggtcaggggaaggggtcaaggatggaggcccaggaccccagggaagggggccggtcctgggggcagaaacctttgcacaggtcccagagtgtttcctgtgccaggagagcgaagacctgggcccagcggccccgttcctcagcctcactagctgcgtggagccggtagacgcaggacaggcctgtgaggagcagatgttcaaagtcccaagtgctaagaggaggccccttccgcaggtcctg

SEQ ID NO: 478709 - DNA, 1000 bp, Homo Sapiens; identical to SEQ ID NO: 346467

SEQ ID NO: 478710 - DNA, 1000 bp, Homo Sapiens; identical to SEQ ID NO: 161434

SEQ ID NO: 478711 - DNA, 1000 bp, Homo Sapiens
tccccacagctggtgacacacaggtgtggtttctgcagaaaaatccaaccacgtgcctgtgccagtcacattgtcaaagatgcagggctctttccacacatcagacgaactcaaacctgctgtgcttagaagatctggctacctggtggctcgcctgcccccttccttcacagccattccacctggaagtgtcgaagctgtcataggagcccacggtgtagtgcctgaaaagcttcttgctgcggtcagcgcgggtttctgcctggctgtccctgggcttacactggacctcctccacgcactccgccggaaaccatccgatgtggccgcgggcgctgccttcccagaagcccccttcaccgatgctcagaactttgaccctgtcaccgcggtgaagggggatctcgccgtccacttggggttggtatggcttgacagcgacgaagagcctcccgggcacggcactgtagagcttccgcttgggccccgggtactcgaaggccgagagtgagtccttgttggcaccaagagcaaaaggcgacccgacatgccagagaggctgcggcctcttgccgtcctcgcctgcgccgcccagcctgttgagcgatggggaccggctgcggggcccgggcacgtagctcccaatggtcttcgcggccccctcgggcttgctgggcatctgctgcagcagctggggtgacaggctgcggtgcgaggtggccgtggagcagacggcccagtcgggagcgctggcattgaggttgttgtcactgttggagcgcagcaggacccggggggcggccagcgtgttggggggccgccgccggcggttggagtacgccggggcctctcggaagggcacttccttcttggtgaaggcatttaacaaagacttcattttccctctgactttggcagcggtccgctcattatataaccttcctggatgggaggaaggacaggcgtgcagcccggcccctcggtgctagagcagctggga

SEQ ID NO: 478712 - DNA, 1000 bp, Homo Sapiens; identical to SEQ ID NO: 346469

SEQ ID NO: 478713 - DNA, 1000 bp, Homo Sapiens; identical to SEQ ID NO: 346470

SEQ ID NO: 478714 - DNA, 1000 bp, Homo Sapiens; identical to SEQ ID NO: 346471

SEQ ID NO: 478715 - DNA, 1000 bp, Homo Sapiens; identical to SEQ ID NO: 346472

SEQ ID NO: 478716 - DNA, 1000 bp, Homo Sapiens
gagacggagtctcactttgtcgccaggctggagtgcagtggtgcaatctcggctcactacaacctccacaacctgggttcaagcgattctcctgcctcagccttcctagtagctgggactacaggagtgcaccaccatgcccagctaatttttttatttttagtagagacggggtttcaccatgttggccaggatagtcttgatctcttgacctcgtgatctgcccacctcggcctcccaaagtgctgggattgcaggcgtgagccaccgcgcctggccctctgcctcttagaaaccacacatcaaaaaagggcctatataagacagagcaaggccttggagttaaagtggccccaatgtcaagaagttatccaccataggtgagtaaatattcagatgccatttaggctcacaacatcaacactgctttaagggctatcacaacctggaaaagccagctggggacagggtaagggaagaagtcatgctcaaatcagtgaccactgctcagagacctggccttacctagtcccacctctgtctctaggtagaacagaatggacccgcccaaggcggaaagacggggaatcactggagggcaacagcccatgtcctccaagcccttagtctccaggaagggtctcatctgctgtgcccagggcttctccccagggtgtctgggttactcaccttctggttcagcaacgcctgtaccacatggttggcaacctcgtccagacagcgctcataagtctcccgctggttttcgttggcctgggcaagtgccgagttctctgcctccagctcccgcagtcggtgcagaagctcctggcaggtgcctggctccatgctgccatcatcaccctctcctggccttgggtttccaggacccccagctggctggtccatggcctctgacatctggccctgggaacaaggaagagaagccccggcaggctactccagggaatgaggaggaagtgagaaggaggaggacaaa

SEQ ID NO: 478717 - DNA, 1000 bp, Homo Sapiens; identical to SEQ ID NO: 346473

SEQ ID NO: 478718 - DNA, 1000 bp, Homo Sapiens
gatgataacacacaatattttaattctgctgctatgcattatagtacaggtcaaaatagatttctagagccaaatatttattgcagaaaatagttttgtcctaattccaacgacagaagttctaatgatatacagactcatctaattgctataaaatgctaaaacttacacacattgaaaaaaacaggtaggtttcttaagagaacaggattgctggcatgttgaatagttttgtgtttttttgttcttttatttttattacttttgaaattaattgtttctttctcccaggtattcacctggtatctaagctagtgagtgtaataagaataaatacaagcttgaggcaaaaaacgaactctgggaaactataaatgctggcatgcctttacttcttatgaaagccaaccacctgaatgattaactaaaccacctcaaagcaagaagagaaatatttattggaatttcagatgtaaaatgttatcacagaaacagcaaatgcaatccccgtttagttcaatgtaccatatcttaattccaaaaggtttccttcatggaaagaaaaaaataagcacttcagatatgttacagaaattaaatctccagtaaccagtgacttcataatgccaaagtttctgaagagtgaaattattttcttctattagtgtatgttttaataaataaatgatttttcttttcatttggcaaggcaggtgaaagaagcataaaatgcaacttaggaaaatagagccaaatcaaatttacataaatgaacaaaaaagcctccactgttgaccaatatttgtgaaatagtttagtataatgtcattctgttcttgtttcatgactctctcggaagaagaaaattatctcactttatttccaggaagaaaatattcatttttatttcaggacattggattattacaaaatgtaggcaagcaaacaaatattttctggtattattgagttggctttggggtcatgaaaacgactgacg

SEQ ID NO: 478719 - DNA, 1000 bp, Homo Sapiens; identical to SEQ ID NO: 346474

SEQ ID NO: 478720 - DNA, 1000 bp, Homo Sapiens; identical to SEQ ID NO: 346475

SEQ ID NO: 478721 - DNA, 1000 bp, Homo Sapiens; identical to SEQ ID NO: 346476

SEQ ID NO: 478722 - DNA, 1000 bp, Homo Sapiens
catggacctgactgtggcctgggggttggggacccctgctatagaggattcagatttaaattcagaagttagaatgaaaaagaattatattctttatctaaatgatttcacagttaactgagagaaagtcagtataagttgaaaagtttataagtgttaataagaatgaaaaatatgtacaatatgcaattactattaaatataatttgcccatagttgcacactgatttcattatcatggcagttaagtatcagagcttctggtttctcactcttcattcatgtattcagcaaccatgtgctaaggtactaggacaagcactggattaacaagaaaaagatgatacggtccacccctcaacaactgtatgctataatccgaaaaaacaagcaggcaattcccatacagagtcatacatacaatgacaggcataagacaccacttactggaagacatagaagggatactagcccaggtttgtgttaatattgtaggctttttggtagaggcaattcataggttgatatctgaaggggaaggaaaacacatgtaggatagagggaagaagtaaatgcgaagagctggaggtgaggacgatcactgtggagctctgtgtagtctagtttggctggatgcttcatctagctcttgaacacctggcagcatcaaacttgaacgctgcaggattttctcaagccgctcaatttggtcatcctgttttttaatcgtttttctcatcatggcattttctacttcaagcttttgtgcgtcaccttccatctccttagtacatcttatagtagctgtaagttgatcctgtatttcttgaaattgacttctcatctggtctaatttcttccttgaatcctgcatctcattttctaaatagatgcagtgacgcgatgaagcatccagcaaagcttttgttgctgattgtttgtttaagacatcatctcgttttcattgaagctgtctcacagctacttctctttctgcttt

SEQ ID NO: 478723 - DNA, 1000 bp, Homo Sapiens; identical to SEQ ID NO: 346477

SEQ ID NO: 478724 - DNA, 1000 bp, Homo Sapiens
gagacggagtctcgctctgtcgcccaggctggagtgcagtggcgcgatctcggctcactgcaagctccgcctcccgggttcacgccattctcctgcctcagcctcccgagtagctgggactacaggcgcccgctaccacgcccggcttatttttgtatttttagtagagacggggtttcaccatgttggccaggctggtcttgaattcccgacctcaggtgatccacccgccttggcctcccacagtgctgggattacaggcgtgagccactgcgcccagcctgcactgagattctaaatgaagaagagggcttcggtggctcccctccttcacacaaggcaagagtctcctttaccctccagtctgcctcaagccagtgcttagcctgctgtggacttttgacattcagagaatgaaggaacttctgagatcatcaagcccaatcaccctcaggtgccagatagccctctatggataacagagggcattatagctcccgtgaacatcattgacaagcagctcattaccaactgatgcagctgatgacactttggatggctctttctctagaaggtcatcacccacccttttcactttactcccaggggttggtaaggagaaagacacttcttaccaacaagttacagcaagtcccaagcaagcactgtgatcccatttggcctccccgccctgccccatctgatcttctagcaagtcctctgtgcacccagctcccctgcatcattccctagtgctagaaacgtgagccattacaccacggctgctgagagccccttggtgtgcacctacctctctctgctccctctgaaggcagagttcttcggtctcttccatcagtttgtctgccaaaacaagcacacacacacacatgcacacacaatcaggaaagtgctctgaggtcctgagggagctggtgcctgaggtggtcgctgtcacccccagcatctcccaaggaaggggcctgcagccctgccagcc

SEQ ID NO: 478725 - DNA, 1000 bp, Homo Sapiens; identical to SEQ ID NO: 346479

SEQ ID NO: 478726 - DNA, 1000 bp, Homo Sapiens
gcactttgcaacaacttaataatttattacattacagtatcatcacaccagcagtcaataatgccactttaggcaaaagtctttcagtatttccgttttacattccgcttacaagaattcataaattggtaaaattcattctaagaaaacttggcaaataaagctttggactggaattggcatttctttctctacttttccttcccaccatttatttcctttacagtattcatattttaaaatgttttaacttatttcagaacattaagatagcagttacattgtttaatagttattttaaaatgactctttcagataaagttttagagaaactatagtatggatagggctgatttacattttcaaattttctaaaaatcagctttggttttagagctgatttttgttcatttctggaaaacctatcagatttaatccaatactttaaaaatgattattatatattgcactctttaaatcggtgatttgattcttcctacagaaattcaaatttattgaattgaactcacattttagaattctgtttctgatgaactctaaccttccaatgttgccttctaagcaaattgaaagctgccttataccgaatgaggaagaataccaatacttggctgaatgaggtatcgcaaaagactgcatgcactttgaagaaagacttaagttatagtcatgcgatttccattctttttagctttttcttaaatatacgacaaatatctacacaaagagtggtatttctgttaatacagtcaatttattttccagattgacattcagcttaaatatgccagtatgtgatttaatccataggcacctgatgaacacattattgtcagattggttacagatgctcgtagttgtctttaaactgaactcaaagaatgcaaaaacatcaagttcagaaaataaaaggcaaggacaggactttaagtgcattttaaagccacgggctagaaatcgtaccactgttaactagccg

SEQ ID NO: 478727 - DNA, 1000 bp, Homo Sapiens
ttccctatatggatttcttttatttctttgtcttgtgtaattgatctggctaggcaattacacataatgttttcagcatttgtaattttacatcaaatccatccattgtaacacattgattgctacttttcaacttgtaaacctggacatttattactactcttcctccagtacaggagtccatggcgcggtgtgggccctgctgtgccacagtccagggcacggctgggcggagattctctcctgcaagagtccgcggctctgcggagcaagagttctccagtgccttagtccagggtgaggcaggggtgaggctccttcagtagctcagtccagggtacagccctgcgaggttcctcctgtgcaggagtacacgatgctgcggggtcctactgtgccttagtccatgacgccggggagctgggtcctctggtgccatagtccagggtgcggtggaacaggagtcctgcggagcagtagtccagggcgcgctggggcgtggatcctcaggtgccacagtccagagcgcgacagggcgggattcctgccttgctatatccaaggtgcagcggggcgagggttctcttgttcaggagtccaggacgtggcagagccggagtcctccgtgtaggagtcctccggtgctggagtccagagcacagtgaggctgggtcctcccgtgccatagtgtagggcatggcgggacagggatcctgccctgcgatagtccagtgcttgagtccgcagtaaggcaatggtcctccaatgctggagttcacggcgttgtggggtcggggtccttcggtgacttagtccagggcgtaccagggcgggggtccacagttgccatagtgaggatcttggaggagggtggttcctgccttgctgtagtccggggagcagggggcaggggtcctctcttgtcagagtctctggcgcggggtgggggtggaggtgagggttttcctatgcgatagcccacaggtcggtgaagccgggt

SEQ ID NO: 478728 - DNA, 1000 bp, Homo Sapiens
ggagacacataaaactttactaggcatgccataagacaagacaacacaagacgaaaggagaaaacaaacaaaaaaaacaatagaaacatacatagatattagagtcctcaggtagaaaaatttttttttttttttgaaatgggagtttcactctgtcacccagactggagtgcagtggtgtgatctcggctcactgcaacctcaacctcccacgtagctgggattggtgatccaccggcctaggcctcccaaagtggtgtgattacaggtgcaggccaccgtgcccggccagtattttgccacaatttaaaatacattttctttttttcaagtttgttctcagactatattcacaaggtcacatggcggcttacacttctgtaggccttgttgaccgttctttttagatattgatgatcttgatctttttcttgtctcctcggtagaagaatgggatgcaggaggtgctgcctaagcctgggcgctcctgggcgttcttcattccagggggcagctgcatgatctgctcctcctgcttccgcatctgctcctcctgctcccccatctgctcctcctgctcccccatctgctcctcctgcttccgcatttgctcctcctgcttccgcatctgctcctcctgcttccgcatctgctcctcctgcttccgcatctgctcctcctgctttcgcacctgctcctcctgcttctgcatctgctcctcctgctcccccatttgctcctcctgcttccacatctgctctcctgctcccacagctccttctcctggtcccgcagcctctgctcctgtcaccacatcttctccttgtgcttccgtagcttctcctgatcctgtagctcctccttctgcctccacatcttctcctgcaaagtgttggtttgaacctgtggcagcgggattttgtccgtctccagtttcctttttagctccttgatgtggagctggatctcagacttttcagtttctaccagttgaagttct

SEQ ID NO: 478729 - DNA, 1000 bp, Homo Sapiens; identical to SEQ ID NO: 346481

SEQ ID NO: 478730 - DNA, 1000 bp, Homo Sapiens; identical to SEQ ID NO: 346482

SEQ ID NO: 478731 - DNA, 1000 bp, Homo Sapiens; identical to SEQ ID NO: 346483

SEQ ID NO: 478732 - DNA, 732 bp, Homo Sapiens
ctaatggcccttggcacaattgctggtgttggggtagaagatgtcttggagtttgctcacgtggttgagagggagggaggtgccatcgacttggaggaactttgtagcaggatccctgcagaccaggcccatgacaaacaccgtctccagcgggcagagcaaaggaagggcgcagcgccaggcagtggtgcagctgcctgtcaggaagaggcctacttctggtgaaactccacgagggctcagattcaggccaacagcctgtccaggacagggtgccgggtgtatcactggtccaggagcactatgctggcagaatccctttggtgcctgatggccctgcctatggactggttgacagccttcatgcacaggttctccaccagagcctttcttgggggcccctggcctgggctctgagcaggaggctttataggccaccgcaagcagcagggctccagatgacatcacagggaagagcaagagggtgtggaggggcatcgaagcctctccaggagacaggagacgccggcccagtagagccctaggggtgacgccactcccactcactgtcgactctcctctcacctctgcaacactggggacactcacaagagtgtgatccaagtcggccgtcgtcttctgcagctctggagacctgatgctggggaagggcatgcctggcatcaccacacactggcctaggttgtcagagaagttgatgctctcactcat

SEQ ID NO: 478733 - DNA, 1000 bp, Homo Sapiens; identical to SEQ ID NO: 246645

SEQ ID NO: 478734 - DNA, 1000 bp, Homo Sapiens; identical to SEQ ID NO: 346485

SEQ ID NO: 478735 - DNA, 1000 bp, Homo Sapiens; identical to SEQ ID NO: 346486

SEQ ID NO: 478736 - DNA, 895 bp, Homo Sapiens
gaggaatcttatttattttatttatttacccaaatttgaactagtctgttgggttgggggaaggaggtggctgctacccccaagccttcccagtgctgacaaccccgggggcaggcgagggcgcccagtccctcaccatcggctgcacatcgcgccctcgggccctgccatgtccctggtgctactgacctctcaaggcttcctccaatctggggtcgggggaccctgggaggtgctttacagaccgctaataaaagacgatctgcgtgaacgccaccaaggcccttgccaccaagttctttggggctgggaagggaggaggtggggggcttgggccatgggaaacagaggggacaggatccccagctgctcgctgggcagtcagggaggaggaaagcagggaacttttgctcatcaacaggagaggaggtgggtgtgggtgctcaggttgagtccagagcccttgtccggctctttaggcccctttctggaagtttatgtgggtgcagaactggaaaaggagaaagaagaacgccaccaccagcaagcccaccaggatgtgatggaagagcccggggctggaacctgagttaatgaacacgatgggtttctctccaataaactgggccacagccagcagcctggcttggtctgagtccggataatcgaagaagtcaggtctgtctaagaagcgcggagactctgtccccagggctgacgccgtggcacgcttgggtctgggtgctaggacccaagcaaactctgtgacaacagccaagctgacccctgcctttatctctcgaggcggaagctgacttgggacccagtttctatggcccctagtgcagccagccacacccacaccagcacccatggccacagcctcatgactcct

SEQ ID NO: 478737 - DNA, 1000 bp, Homo Sapiens
ctgaattaaaagagaaacatataactttttatttatttttctacaatttaaaatttgcaaaggcatatgaatgattacatcctaatatttgtctgattatatagaaatgcatgactgtcaccagacatctgaaagacatcaaatgtctaacaagaaacataaaatttgtttataatcttagccctctgtgaaatgcagggttcaccattttgagtatattgttcaagctactttcctatagcaggttcttgctctcattccaagacctgcaatttctgctgaatggggtcagggtgcacccagctcaagcctcatctgacccactgacaggctcagttatctcctgcccaggcaagggatgggcttctctatccagggctggatccccagggccaggcaatgtggctgaaacaagccagttcttagcagggaagacataacctacctgggtggctataaaatagaaggtctgcacctgagcacatagaggccgccagaaccgggcaagctgagtgagctgctcccaggtcagtggagaatggacctgctgcaccgatacccagtataggtcttgataaatggccttgacacagcttgtaaagtcaccaagcttttctgaaatgacagccattgaactcctagggtctgagacctgtgctgcttggtgcacccagtgtgagtcatgaaaggccctctgtggtgggcatcacaggtctccttgagtttattgctgtgcaaagtggaggactttagtttctttttcaacatcaagctgtgctcctctcctggacagatccccgcaaaagaagcatgtgagtgagatactcgccagcacagttcccaccgaccctcatttccaaaacctcccatgcaccttcaggtgaacatttgaatcttcccctccatcctgaccatattagtacttaaatgaagtgaaatttaacaccttctgagtccccaaatattctctgagtgccaggatctcaaaaattttttcagt

SEQ ID NO: 478738 - DNA, 1000 bp, Homo Sapiens; identical to SEQ ID NO: 346487

SEQ ID NO: 478739 - DNA, 1000 bp, Homo Sapiens; identical to SEQ ID NO: 346488

SEQ ID NO: 478740 - DNA, 1000 bp, Homo Sapiens; identical to SEQ ID NO: 346489

SEQ ID NO: 478741 - DNA, 1000 bp, Homo Sapiens
agtggcagaaacaacacacatttattagtttacagttctggaggtcagaagtccagcacaggcctcactgggctaaaattagggtgttgacagggctggttccttctggtggccccaacgcagcgtctattccttgtcttttccagagactaccacgttccttggtttgtagccccttaatcttcaaagtcagcagttgcattttgagtccttctcatgacaccatgactggttctctcttttgtctcattcaggatcatctccctactttaaggtcggctgattagcaaccttcactccacctgccaccttaatccctctttgccatggcacctagtggaatcccaggttccagggattaggatgcagatgtcttggatggcatcacctgctagcacaggtcccttttccctcctcctgtccatgcccagcccctctcccaacccagaggaaccaggcaccagcttggcttcggggcctggagagaagtccttgagtgatggcaatggtgacacccatgatagcaatgagagcagcagtcacaatgacggaccagatggctctccaagcacagacgcttctgtgagtgtttctttctttcaccacccagtgatcctgtgacttgctgggttcacacagcccgagtgagtggggatgtaatggtgcattatcaggctcagaatcccaagctttccctccacaccgcagtccacaggaccacgagtttcctcgtggcagggaccatgctcatctttgtgagtagacaggctgcttcagccaagagcaatgatctggactcagagctcagggccaactcctgctggatgtaaacctttctgtgctcctactgtgtgccaggctctgggtgaagtgctgaggactcgaagatgacttaggttcaaggctttgccctttcatcaaaggaatccaggcaccgaagggtatgccctgtgtgacaccctttaaaatgctcacaaccaggtgcacaggtctccatttg

SEQ ID NO: 478742 - DNA, 1000 bp, Homo Sapiens
ctgggtgctaactgcccgctgggcgatctccatcaggcatggcccctctctggcctcagtttgcccatttcacagacacagagaactcccctggggagctctcactctcccggatcaggaaggctcccagatggttccgcttcatcagaatctcttcggccagctgccgggaaatcctgcccgagtaccacggatggggcttgacgcggatgtagttcttgggaataaatccctcgacaccccggagctcggccttgtaccagttctggtcatcctccatgttcaggatcttgagtgtgtctcccttgttgaaggccagctcgtcgctctctgtagcctgaaagctgtacagggccacggactccatgccgctgctcggggctccagcagctgggctcagagctgggccgacagcttcctgcttcctctgcagtcgaggacggtcttcctttgttttgagtgcgcgtttgttcttttgaagttgagactgaaactgctcctgtaatcccagctactcaggaggctgaggtgggaggatcgtttcggtcctggatttcaaggtgatagtgagctatgatcacaccattgtactcctgcctctgaggacagagcgagactttgtctgtggtcccagctacttgggaggctgaggcaggagaatcgcttgaacccaggaggcggaggttgcagtgaaccgagatcgtgccactgcactccagcctgggctacgtagcaagactccatctcacagaaagccaatcagtgagacaacgattcttgccaaggaagaaggctttaatcaggtgctgcagctgaggggatgggagggcttcatcccaggaatgcagggggtggttcaacataagaaaatccgttaacgtaatgtaccgctttccacctaaaacgttaaaatttgtcaagtgataatattcgacaagctgttattgccaaactattttcctatttgtttcctaatggcatcggaactagcgaaagtttc

SEQ ID NO: 478743 - DNA, 1000 bp, Homo Sapiens; identical to SEQ ID NO: 161436

SEQ ID NO: 478744 - DNA, 1000 bp, Homo Sapiens; identical to SEQ ID NO: 346491

SEQ ID NO: 478745 - DNA, 1000 bp, Homo Sapiens; identical to SEQ ID NO: 346492

SEQ ID NO: 478746 - DNA, 1000 bp, Homo Sapiens; identical to SEQ ID NO: 346493

SEQ ID NO: 478747 - DNA, 1000 bp, Homo Sapiens; identical to SEQ ID NO: 346494

SEQ ID NO: 478748 - DNA, 1000 bp, Homo Sapiens; identical to SEQ ID NO: 346495

SEQ ID NO: 478749 - DNA, 1000 bp, Homo Sapiens; identical to SEQ ID NO: 346496

SEQ ID NO: 478750 - DNA, 1000 bp, Homo Sapiens
tcagggctcccgtgagaccacgccacgcaggtgcagctcactctcggcggccacgatgggctgcccgttctgcaggtggtggtcgatcaggtggctgatgctctcaaacagcacgtccttcgtccgtaccacgccctcggggtccacgagcagcaggtgcttgggctgcccggcgtgcatgccggtgaggacatactgcccggggttggtgacgctgtctcgcacaaggaagtccccgtcagctcgaagcatcctctctgccgcccggcggctcatccggccgtggtaccagggctcctgacgcagctgttcctccgtgggggccacaggggcccggcgggtaggggggctgggccactggtcctccaagggaagaggggctgctgtcacgcctgccgccactgagcactcatgcaacttcagggcatcctcaaagggtcgcatgtcaaacagatcctttttggggctgtcctccggctcgggggcgtccagaccctgggtgttgacatacaggtgctcctcgtggtccggggggccccgggcgtccgcctgcacgtagccgtcccccggtggagctgtaccggtggaccccacgtcccatggcaggctgcaggcatctcttagagaaggagatgggccctggtcgagggccgtgagggcgcagggctgtgtcagggccagcctggagtccactagcccgcccagcggcggctccttccccgggatgctgttgtagtaattgtgctccaaagagtcctcctcgtccccccaggccgactcctccggccctgccagcctttctgggggcagcgccaccttgggcgggctgtgcaggtactgcttgaagcgcagctcgaaagcttggcccacggtgctgatgatgctctgtgccaggccctcacagcactccaggatgtggcaggctctctggttgatggggtccttggcgacgtaggccacgtaatccgtcatgtccgtgtctccgcctgacgcgaaggag

SEQ ID NO: 478751 - DNA, 1000 bp, Homo Sapiens; identical to SEQ ID NO: 346498

SEQ ID NO: 478752 - DNA, 1000 bp, Homo Sapiens
tgaatgttaaaacaaattttaatgttctgggtgacatataccacgtaggtgggcctgcaatggttgtgtctgcatcgaacatgtagagactatttttcttgtcatgattctctaaacaatacaatcaaacaactatttacatagcttttacaatgcatgaggtattaaaagtcatctagagatgatttacacagtatactggaagatatgcataggttacatgcaaatatgccatataacaaaggacttggcatctgtggatttagagggtgctggaaccaatcccctgcaatatattgggggataactgtatttaaaaaaattgaaactacttaaggctttatcccatgtttacattcatagggtctatctccaaagtgagttctttcaagtttctgaaattaaagtactgaatgttttcccacattccatacatttagagagtatctttccagtgagtccttttatgtctatgcaaggaacggagagaactcaatgctttcccacattccttacattcatacagcttctctccagtgtgagttttttcatgtcctcgaaggaaacgggaacgagtgaaggctttaccacattgtagacattcatagggtttctctccagtgtgaattctttcatgtcgtagaaggcaagtgagccaagagaatgcttttccacattccttacattcatatggcttctctccagagtgaatcctttcatggacttttaagttactgaaatgactgaaggcttttctacatgttttacactcataaggtttttctactgtgtgggtccttttatgttgagaaaggtatttgaaacaactgaatgctttcccacattccttacactcatatggcttctctccagtgtgagttgtctcatgattttgaaaggaagagagatcactaaaggctttcccacactgacatttatagggtttcactccagtgtgagttgcttcatgtcttcgaagggaaccggcaagactgaaggc

SEQ ID NO: 478753 - DNA, 1000 bp, Homo Sapiens
ttattaattagccaatttaatctaaattttgccagaaactctttaaattccaaatatagggtccacttgctatgcaaatttagatcgttgttcttattataatttaggcaaagatgtacaaaaaaaagatagcagctatttggatgaaataaaaataaaagatgatttgggggacagggtcaagagggccaaataaacatttccagtctgcagctcccagcgagacccatgcagaagacaggtgatttctgcatttccaactgaggtacccagttcatccaactgggactggttaggcagtgggtacaacccatggagggcgagcagaagcagggtggggcatcgcttcacccacgaagtgcaaggagctgggggacctccctcccccagccaagggaagccgtgaggaactgtgctacccggccaggttactatcctttccccatgatttttgcaatctgcagatcaggggattccctggtgtgcctacaccagcacagccctgggtttcaagcacaaaactgggtggctatttgggcagacaccaagctagctgcaggagttttgctttgttgttgttgtttgtttgttttgtaccacagtggcatctggaaccccagcaagacagaaccctttactcccctagaaaggggctgaagccagggagccacgtggtctcgctcagcaggtcccaatcccatgaagctcagcaagctaagaaccactggcttgaaattctcactgacagcacagcagtctgaagttgagttgggatgatcgagcttggtggggggaggggcatcccccattactgaggctttagtaggcagttttctagtgctaaggaggctgggaggatttgtgggctgccaaaatatggccagactgcttctctagattcctcctcgctgggcagggcatctcggatggaaaggagacagccccagtcaggggcttacagacaaaatccccatctccctgggacagagcacctggggga

SEQ ID NO: 478754 - DNA, 1000 bp, Homo Sapiens
actttaaaaatatttattcaggactcagaaatgtatggattttattcatatttctacataacttttattttgaccataaaaattacactgtaatcaataacaatttaaatgtacatctttaaataactaaaagcatacaattggattgtttgttatacaaaggataaatgctaagccgggcacggtggctcacacctgtaatcccagcactttgggaggccaaggcaggcagatcatgagttcaggagtttgagaccagcctgaccaacaaggtgaaaccctgtctctactaaaaacacaaaaattagctgggcatggtggtgcatgcctgtaaacccagctactcaggaggctgaggcagaagaatcatttgaacccaggaggtggaggttgcagtgagccaagcttgcaccactaccctctagcctgggcagcacagcaagactctgtctcaacaacaaaaaaaagataaatactagaggtgatggatacctcatttaccctggtgtgattattatatagtgtattcttgtatcaaaatatgccatatattgcatgaatatatactcatattatgtaccccaaataattaagaaaaataaatttaaataaaataaaaatttggctgggcatggtgactcacacctgtaatcccagcactttgggaggccgagacgtgtggatcatttgaggtcaggagtttgagaccagcttgacctgcatagtgaaaccctgtctctactaaaatacaaaaattagctgggtgtggtggcgggtgcctgtaatcccagctacttgggagatcgaggcagaagaattgcttgaacccaggaggcaaggttgcagtgagctgagattgtgccactgcactccagactgggtgacagagcaagactccctctcaaaaaaaattaaataaaatagaaacaaaaatttaatttaaagaaataatattgtttaacttatttgcagtcaaagccactggcaaaagtactagaga

SEQ ID NO: 478755 - DNA, 1000 bp, Homo Sapiens; identical to SEQ ID NO: 346499

SEQ ID NO: 478756 - DNA, 1000 bp, Homo Sapiens; identical to SEQ ID NO: 246646

SEQ ID NO: 478757 - DNA, 1000 bp, Homo Sapiens; identical to SEQ ID NO: 346501

SEQ ID NO: 478758 - DNA, 1000 bp, Homo Sapiens
tttctcaaaataattttattcttactacataagatccactccatcacagctctttgtgttctgctttcttgtttattggatacctcttcaggccctggacggctcatggaggagacagggactctccccaggtcgaaggcccaaggcctggatgatggggtggggcccaggatgggtgccaggggtctggaggacatgagtggatgaaggccctgggcttcagcttcctcttggtggaatgtgggtgatgaggtccgaccatgcagcgctgctgtgaggaccggatgagaggatccctgggaggtggccggtgacttggtaccgtcacctcagtgactgttcttcatcctcatggatgttcagagaagactggttcattccctctggtggccgtctgtccaccagacaggaccgatacatcctctgaaaatttcatcactttaggcaatagcactttcattcttttccagttcatctgatgccatttaaatcgacctggtgattctgggaagcccgggattcctgtccctttgaggagacgccaggtgccatctgtgtgcatgcgtggcatttgggcgggaacccagagccccgactctgggcttgttgaactcaggtccaaggagggattcactacgttggtgtaaggtgcggtctgtgtttcagattcttgtgccagatgaggtgatgctttgatgtcaatacctcgcgttgggggaaggtggaggatctggaccagtggtgtaggaggccaggatggggcgggacccagacacatgaggattccgggtttcagaaggacggagctgagcaaggccactcggcgcacgcgcggtgccttgagcgcctacatccagatgtgcatcttccgtggggccgtcccggggcggggtctgagctgggagacctgcctctctcctgctctcctagagtcacttaaaactttttagttttccgtttaaatgaccaaatgagatcatttcatggggtggtgggggga

SEQ ID NO: 478759 - DNA, 1000 bp, Homo Sapiens
ctactgctctgtctcccaatgcctttggccgacacaatcacaggagggtttggataagacgcctgcatcccggaggagctcgttttccgggggctggagctgtggagcagcagggcccgccacgaggagggaggtgggggggagacggcgccttaagacaaggttggggtctgcaggattccaggaccaggcaaagtacgcggcctccctgggactggggccctggcgctgcgctccagtggccgccacggtgtaactttcactccacataatccgcttccgggtttgcgcgcatgtgcgcgcgcagtacagaagccaggtctgggcggggcccgcgaggtgggcggggctaaaggctttgccacactcattgcacttataaggattttctccagtatgaagtctatgatggcatacaaaggatgacatatgactgaaggtcttgccacactcattgcacttgtaaggtttctctccactatgaagtctataatggtatacaaaggatgacatatgactgaaggtcttgccacactcattacacctgtaaggtttctctccagtatgaactctctgatgttgtgcaaggtttgactgttgattaaaaaccttgccacattcattacacttgtaaggtttctctccagtatgaattgccttatgaattagaagggatgaatttcgagcaaaggtcttgccacactcatgacagttgtaaggtttttctccggtatgaagtctacgatggcccacaagggatgacttctgactgaaggtcttgccacactcattacacttgtaaggtttctctccagtatgaagcctataatgacatgcaaggtgtgctttttgattaaaaaccttaccacattcattacatgtgtaaggtttctctccagtatgaactctctgatgttgtgcaaggtatgaatcacgctggaaaaccttgccacattcattacatgtgtaaggtttctcttcagtatgaactctgttatgg

SEQ ID NO: 478760 - DNA, 1000 bp, Homo Sapiens
tcataaggtggtgtgaccagtgtgaactctcttatgaacacagaatgcagagctgtgggtagatgacttcccacaatcactgcattcatatggcctttctccagtgtgaactctaaggaggtgagacttcttgttaaataatttcccacatttctcacatttataaggcttttctccagtgtgaactctcttgtgtttagtgagactggagctttcagcaaaagattttccacattcactgcactcataaggcttttctccagtgtgaactcttttgtgttttgtgaaactggagctttcagcgaaagattttccacattcactgcactcataaggcttttctccagtgtgaattcgcttatgaacacagaatgtagagctgtgggtaaatgattttccacaatcattgcattcataaggcctttctccagtgtgaactctctgatgtgcaatgagttggtacttgtttctaaaaaatttctgacaagcttcacaagcatatggcttttctccattgtgaattctctggtgtacaaggaggtgagacttcttcttaaataattttccacattccctacatacataaggtctttctccagtatggccatgctggtgtagaatgaggttacccttgtgactaaaacatttcccacattccccacacttaaaaggtctttctgtagtgtgaactcgctgatgattcctaaggtgtcctttttcattaaaagatttcccacagtctccacacttgtaaggtctttctccagtgtgcatgcgctgatggtgaacaaggctgcgcttatgactaaaagatttcccacattctccacactcataaggcctctctccagtatgaacgcgctgatggctcctaaggtgcccgattgaactaaaagatttcccacattctccacacccataagatctttctctagggtgaactcgctgatgtagaatgagggtgcctttatgactaaaagatttcccacactctccacac

SEQ ID NO: 478761 - DNA, 1000 bp, Homo Sapiens; identical to SEQ ID NO: 346503

SEQ ID NO: 478762 - DNA, 1000 bp, Homo Sapiens; identical to SEQ ID NO: 346504

SEQ ID NO: 478763 - DNA, 1000 bp, Homo Sapiens; identical to SEQ ID NO: 346505

SEQ ID NO: 478764 - DNA, 1000 bp, Homo Sapiens; identical to SEQ ID NO: 346506

SEQ ID NO: 478765 - DNA, 1000 bp, Homo Sapiens; identical to SEQ ID NO: 346507

SEQ ID NO: 478766 - DNA, 1000 bp, Homo Sapiens; identical to SEQ ID NO: 161437

SEQ ID NO: 478767 - DNA, 1000 bp, Homo Sapiens; identical to SEQ ID NO: 346510

SEQ ID NO: 478768 - DNA, 1000 bp, Homo Sapiens; identical to SEQ ID NO: 346511

SEQ ID NO: 478769 - DNA, 1000 bp, Homo Sapiens; identical to SEQ ID NO: 161438

SEQ ID NO: 478770 - DNA, 1000 bp, Homo Sapiens; identical to SEQ ID NO: 346513

SEQ ID NO: 478771 - DNA, 1000 bp, Homo Sapiens
gagttttatgggccttttattctcttgttttctttaaaaattggaccaggaactccagccctttcagctttcttcctctccctggagtcccactggtgcacattactgctaatggggctttgcgcctgccaacccaaaaggaagaacaggtccgcggtgcatctgtggcctaatgaggagctattcccctctaaatgacagcagctttgatagtctatacagctggtgtctggaccaaggttagagctgtaatcccagcactttgggaggccaaggcaggcagctcactttgaggtaaggagtttgagaccagcctggccaacacggcaaatcctgtctctactgggaggcggaggttgcggtgagctgagaatgtgtcactgcactccagcctgggtgacagagctagactctgtagtcccaactactcgggaggctgaagcaggagaatggcatgaacctgggagtcggagcttgcagtgaacctagatcgtgccactgcactccagcctgtagccccagctactcaggatgctgaggcaggagaattgcttgaacctgggaggcgaagattgcaatgagtcgagatcatgccattgcactccaacctggtgacggagagagactctgtctcaggtgatccaccgccctcaggctcccaaagtgctggtattacaggcatgagccactgcccccgaccgtgtctctttcttgtagcccacatgcagctggtgttgtacagagtactaaaaggcacaatctgcaaggaattcaaaggcatcaaagctgcctttcagatccaaaattgctcttttttcgagagacctgggatttagctccatcaaagcatattttgatccatcaacccaatgtcctggcccaacccttccagttccatcttcttgaagaaagggactgccaacaggcaccatgatgcagcatgtggaggtaggcccaggacacagtagagcacccaggcagacaccaacctagatccttc

SEQ ID NO: 478772 - DNA, 1000 bp, Homo Sapiens; identical to SEQ ID NO: 161439

SEQ ID NO: 478773 - DNA, 1000 bp, Homo Sapiens; identical to SEQ ID NO: 346515

SEQ ID NO: 478774 - DNA, 1000 bp, Homo Sapiens; identical to SEQ ID NO: 346516

SEQ ID NO: 478775 - DNA, 1000 bp, Homo Sapiens
ccaccatgctaattatttcttatttttgttctgctcctttgggaagcaaaagcaggacaggtgagaaggaaaggtgaggatgttataactcctctccagaattgacatgtggggctggacaggagcccagatgattcctaaatcccaggattcttagcaggaccaactgagtgaaagggtttgggttccgtagaccactctgaaggccatggctatgtctttgtctaagaaaaataatctttcctcaactcttcttggccacacagtgccctgaagagatgcaaagaaagtggagttgcagtgggagagaaaggagacaccaaaagtcatgaggagagaaatcataatgaccaggtagctgtggctgccctcagggaaggggactggaaaaattcatcccctcatgtgggggaaaagaccacttagtatcttggaacaatgttgccttttgctgagccttgggcattgagggaaaactgactttctgctttttatgccagataaggaaaaaataaaaataaaaatgtgaaactgagggaagtacaaaggggttttgagggagttggggtagaaaactgtatcttcttgggacttgaatcaaatgttttaagtctgccaagccagatcatgttagaccttcacctcttagatcctgtggttttgatcaatgtgctctgtgagctaccctgccctaacccaacttctctaactctaccacagatggtaaaagaaaatgagttttgaaggaatacagcaaatattcacaagtatctcccagacttaatgcacctggatgaagatgagattctcagctctacttccccctccccattcccttatgtatcaccattgtcaaggtcaggtgctgaccagggacaatttcccttgaactgttctttatttagttctccatcacttgcctaatcagagaaaagaagcggacatggccacagcctttccagtacagaggagagaacatcccagacactttcatatcttc

SEQ ID NO: 478776 - DNA, 1000 bp, Homo Sapiens
gatgataacacacaatattttaattctgctgctatgcattatagtacaggtcaaaatagatttttagagccaaatatttattgcagaaaatagttttgtcctaattccagcgacagaagttctagtgatatacagactcatctaattgctataaaatgctaaaacttacacacattgaaaaaaacaggtaggtttcttaagagaacaggattgctggcatgttgaatagttttgtgtttttttgttcttttatttttattacttttgaaattaattgtttctttctcccaggtattcacctggtatctaagctagtgagtgtaataagaataaatacaagcttgaggcaaaaaacgaactctgggaaactataaatgctggcatgcctttacttcttatgaaagccaaccacctgaatgattaactaaaccacctcaaagcaagaagagaaatatttattggaatttcagatgtaaaatgttatcacagaaacagcaaatgcaatccccgtttagttcaatgtaccatatcttaattccaaaaggtttccttcatggaaagaaaaaaataagcacttcagatatgttacagaaattaaatctccagtaaccagtgacttcataatgccaaagtttgtgaagagtgaaattattttcttctattagtgtatgttttaataaataaatgatttttcttttcatttggcaaggcaggtgaaagaagcataaaatgcaacttaggaaaatagagccaaatcaaatttacataaatgaacaaaaaagcctccactgttgaccaatatttgtgaaatagtttagtataatgtcattctgttcttgtttcatgactctctcggaagaagaaaattatctcactttatttccaggaagaaaatattcatttttatttcaggacattggattattacaaaatgtaggcaagcaaacaaatattttctggtattattgagttggctttggggtcatgaaaacgactgatg

SEQ ID NO: 478777 - DNA, 1000 bp, Homo Sapiens; identical to SEQ ID NO: 161441

SEQ ID NO: 478778 - DNA, 1000 bp, Homo Sapiens; identical to SEQ ID NO: 346517

SEQ ID NO: 478779 - DNA, 1000 bp, Homo Sapiens; identical to SEQ ID NO: 346518

SEQ ID NO: 478780 - DNA, 1000 bp, Homo Sapiens; identical to SEQ ID NO: 346520

SEQ ID NO: 478781 - DNA, 1000 bp, Homo Sapiens; identical to SEQ ID NO: 346521

SEQ ID NO: 478782 - DNA, 1000 bp, Homo Sapiens; identical to SEQ ID NO: 161442

SEQ ID NO: 478783 - DNA, 1000 bp, Homo Sapiens; identical to SEQ ID NO: 346524

SEQ ID NO: 478784 - DNA, 1000 bp, Homo Sapiens
ttacttgctaggagtgtggagtctggagacgaccagccatgagggaaagtcgggttttcggcaggcccggcgtagctcctccagagcactgttcgtttcagcatcagcttgctccctgtactcgtcttccgtaagatatttcaccaccagctcttttgatgtaaaccactgctccattttcccctgctcagcatcactcaccatagtatctgcctgggtcctaagcaactggtttgataactgataccacctcatataactgcatgctctcagtgggtagtgcagactccaggaggacatgaggaggattatggctgcataggcaaactgaggcacggccacaccagcatagaccagaaccagggagaggagtcgcagcatccacatcagaagacttctgctcctgtcgtctgcaaggggcccatgcttgtaacaaacaacaaagctgaaaaatccaactatcaagacatagcctaatacatatatcctgttttcataccacagccacttcagatcttccatcaactggcatacaatataaactgaggcaaaccaacaaccaaccattagagcccaaaaggtgctatacttcggaatgaatcttttcaccaacagcaagacaaagactaatgtcattagaacacctagcacagttcccgaggagtaatagaaagtagggctttgactcagggtccttgcataaaagaaaagaaaaactcctgccacaaacacaaggaagagtttgaaatccatgatgtttcgattcacatgtatcatatagttaaatatcttcttgacaggctccacagagaagcacacagtctccctgtatggattgatgattatggttatttcgttagattcctttggtatccaaaagttatgaatcacacatttgataaaagatagaatgttttctggatattggcaattatgtctttctgcgatatatacaattctgaacaggcctggactggtaattttcacctgcatagttgac

SEQ ID NO: 478785 - DNA, 1000 bp, Homo Sapiens
tttcaaatcttcaaaatagtctttattctacatttttagcataaaaattccacaagttaactgcactacagtgtagagagagacatacaatgctgaacttccagaacagtcaacggtacaaacatcacatgtacagaactcacaatttagatgaactgaaattttaagacaaaataaaatccaatttcagaaaacaaaaatcaaaacattaaggatccctgaaatattcttaaccctaatgagatttcactggattcaagtcgttttgtagtgaggcattcacaatatgaccctattaacccactccaggaattttgggggaccaaatgagtggctgcatcagacactctgacaaaaaatggtaaccaatttttgatctgaaaactcctcttaatttggctttaaaccatcaatcaggcttttgaaatgcatcttcctccttgcccctctcatattttaaactaactgttgttcacagtacagtctgcaggatatctttgttcaaacatagctcagtttttctggcaccaaaacaaatttgggttaggttcatgtatgcagagacaacctatgaggaggacccaaaaggcaccctccatttttgcctgaggaaatacgaaagcagaagtaacgggatctgtgcttggggcacagagggggtttcagaggatccttatgaaagactagttaaaagatgaccagtggggagaagtacaaggaaagaaggaaattggctttcggtcctgcaccattgattcaatggagactggcgggaggaaatggaagactagggttggagatgggatgggtggggcaagggatgtaaaggaaaaggcacacactaatgcgttccatttataacaagtaatataaatcaaagacttaaaggagattaaagaccaatcagaataatttggcaactttaattcttaggaagatcaagtttccctccaaacctaatttgatgttttattactaacagcaaagaccagtatggcac

SEQ ID NO: 478786 - DNA, 1000 bp, Homo Sapiens; identical to SEQ ID NO: 346526

SEQ ID NO: 478787 - DNA, 1000 bp, Homo Sapiens; identical to SEQ ID NO: 346527

SEQ ID NO: 478788 - DNA, 1000 bp, Homo Sapiens; identical to SEQ ID NO: 346528

SEQ ID NO: 478789 - DNA, 1000 bp, Homo Sapiens
acctggtcagacatttattagggtagtgcagcctgttctccatgccccaggcctttcagattgataggatttcaatgtggaactctggctgctttgaagggattgcatattggacctgtaaaaagccatcagtctggaaggcaaggctgctctctgggacctggaacaagcagagagcattgcacatttggcggtaacattgccggcactgccacatgcggatgcaggactggagcttgaccgtcgcctgctcctggatgacgtagaccctcaacagggcctgccgccgctgacggatccgtctctgcaccaacgtcctccaccagcactgaatcatccaggccctgagggcagcaaccagcagggtcctgcgcaccaggaccccacgccaccaggcctggatctgcccagctgccttcaccctttttctgtgatgcagttgtgcaagaagcaacttctgccgcctctgtctttctactgcatcttcatctggaccacctttacagcatttactgcccatggtttggagcagtggttcaggtgatcatctccctctggttgctgtttcctgatcttggcaggggcaggaaaggtggagaaagagatggccgtgatgtcacaaaggcaactatgaccaggggccacagtgccttttccaggctcaaagttgatggataaagagaaaatacctggctctcctgttgacttccttgggcaactctcaacaaaataaagcgcaggacaagaaggatccacagctgaattctatcagatgaacaaagaagagctggtcccattcctactgaaactattccaaaaaattgaggaggaaaggcccctccccagctcattctatgaggccagcatcatcctgataccaaaaccactcctattcaacatggtattggaagtcatcttgtagcttcagaacatcaaggaaaaagaagatcctcttgacttcttttcatgaagtgaagatttacctgttcccatccttctg

SEQ ID NO: 478790 - DNA, 1000 bp, Homo Sapiens; identical to SEQ ID NO: 346530

SEQ ID NO: 478791 - DNA, 1000 bp, Homo Sapiens; identical to SEQ ID NO: 346531

SEQ ID NO: 478792 - DNA, 1000 bp, Homo Sapiens
gaaaatttgactctggatgagaatctcagtctgtcgcccaggctggagtgtggtggcgtgatctcagctcactgcaacctctgccgcccagggttcaagcaattctcctgcttcagcctcccgagtaggtgggattacaggcacctgccactgcccctggctagtttttgtagttttagtagagacagggtttcaacatcttggccaggctggtcttgaactcctgaccttgtgcttcacctgcctcggcctcccaaagtgctgggattacagccatgagccaccacatcaagccaataaatcctcttaatggaataaatagcaacctatgggggaatccaacttaatctgaggaactgaaaaaaaaaatacatttaaagaatgatgagaagttaattagatgagacagagaaagccggggaaaatgtttccaaaagaaaaatagcaaatacagcagcactcagagtgggcataggccattacagaaactgaaagatggttagtgttgttgagagacatttctccataagaggtattatggatgacttgaatcaactcttttactggactatctttccaaaatatttatatagcaaacaaccttagaagatacatagtttctctctgtggggcaaagtgcagatctgtttccctgcgcagaacaataaagataacatcttctccagggcaaagtttggacaagtttgctagcagcctactttttagaacagctcctaagctgaaacacagattcactgtgtgcacagcatccacccgagtcttcctccgcatcatcctcatggcacttgagggtcaagagaaccatgtgaacattaatctccctcttgtaccatgcatagtaatattctttgtctctgacccaggggttttgtgtcttctggcaacatctttgaaactgtggcagctacattgttagatttcaagtagcataaaaccttttcccctctggagtttgtgacaagtaggaacacagcaaaga

SEQ ID NO: 478793 - DNA, 1000 bp, Homo Sapiens; identical to SEQ ID NO: 346532

SEQ ID NO: 478794 - DNA, 976 bp, Homo Sapiens
gagaaacataagatcccgggagaacgcgagggagacgagtgaccccaacccagtcgcggggtgccgggcagttaggccagggtgccagataaggtctgaggcagttggcggcggcaccccggccgttgcttgccacccgcagcccccagccctgcaccagccgccgatccccgagcgctcagataagagggtagcggccctcgccgccgtcgggctccgcggcgaccccgcctcgagggcggccaagcaccgacactggcagcacgacctccccggggctgagctgctgcagccgcatggactcctcgtaggtgggcagatacttgacctcctcgtagctgggcagctgcaggaagaccggcgacactacacgcatctcgtgctctgaggcgcaggaggggtccgagcgcccgccgcctccccggccccggccgccgccgccactgtccagcagtgagtcctgagagccggctgccgcctcgtcgcgcagcagagcgggcgagtcgtcgtcgtcgtcgggcggccccgcgccccccagcggtccggcgccccccggaggcccgggccgctgtcccgggcgcgcctggccgcgcgggtacctgcgtggactggggcagatgatgcgctgcaggaaatagccgatggcgaagagcaccagcaggatgagcagcccggagagcttgcggacgaaccagcccacgttgtccaggaaggcgtgcagcggcagcttgcagcagcgcaccgccgtggcgttggtcgcgtcgcagcagcgctcccgctcgccgcacgccaggcttgggcgggaggaggagcccgcggcgcgcggaggctgcgggaggcggctgctactggcggcccaagcagcttcccgagcttctgaccttaacctctcgcgcccaaccgcccgggccgggtgcaaggcttccggagcctccctaaatgtcagaggcagcccgcgcggggctgccatgggcat

SEQ ID NO: 478795 - DNA, 1000 bp, Homo Sapiens; identical to SEQ ID NO: 346533

SEQ ID NO: 478796 - DNA, 1000 bp, Homo Sapiens
ttaagagccaagatattgatgggctctttccctccttttctttctccttgtagcagatgtatgattcatggattgtcctttcgtggtctccattttcatcttattactttttctttgcttctgctttctgacagctttgttagctctcttagatgtagcaatgttaggacaagtactgcgtttatgatccagttcaccacaaataaagcagccatgtttggggccctcacaagaatgatctggaacagcacagtgattgcagatgctacagtggatccaggaaggctttacacactttttacagagaaagcaatggttccatttcctgccatccttggatgtgcaagaattacagagctcacagtgttgattctctagagaaacataccgttgacacggagagcaaaatctgtacccttcttcagtaggaaggattattttgttgggcggaatgttggtgaaaatacgcacgggagactgttttcgacctgtctttccgtgtttataaagtgcatgattatcataatctacctggtaatccagcatctggaagcttggaaaaaactgacaaattcgggattcaaaaaaataggggaaaatccagaaaatgggtagttctttgtgactgtcatcttggctttgaccttctttccacatagcaattaacttcttgaatgtaatagccagaggttcaaccaagccaccaaacggaggatccgtcaccataatgattccttcgcctttatcttcctgtaaaaatgctctgcatacttcaagggcagtctttccatcaaagaaatgatggttaaacatattataatggcaaaagctatcttccatataaaactgtgaataccgaaaatcaatatccaataaaaggcttttaatgttagacttcttgtcacctgatgctgtcaacttgatcagctcatgcaaccttggtgttccaacacacagtactcttctgaatccgagggcagaaagtaagtctaccaagaac

SEQ ID NO: 478797 - DNA, 1000 bp, Homo Sapiens
tttcactttcatattttatttctcatcccagtcacccatgggaggctatggccttttcttttccttatcttcatcttcttccattgaaacttatctgtcctatgtctcattccttcagtttcctctcagctgaactgtgttgagaggtatccaatgtctccaaaggtgaccacatatgtgatggttggcatcggctgggaagggaagtcttaccacttagcagcagggaccagtgtggccaacccacagggtagccacagggctttcttgaaagcttcttggagaaaccctggagattgtctgggaaacacaccttctgacttcactctgttgagaaataactccggctatctggaagctgaaattttactaggggagataagaaatttccacatggctggggaggcctcagaatcatggcgggaggtgaaaggcacttcttacatggcagcagcaagaggaagatgaggaaaaagcaaaagtggaaacccctgataaacccatcagatcttgtgacacttattcactatcatgagaatagcacgggaaagactggcccccatgattcaattacctccccctggatcctcccataacctgtgggaattctgggagatacaattcaagttgagatttgggtgggaacatagccaaaccatatcattccgcccctggcccctccaaatctcatgtgctcacatttcaaaaccaatcatgccttcccaacagtcccccaaagtcttaactcatttcagcattaacccaaagtgcacagtacaaagtctcatttgaaacaaggcaaatcccttcctcctatgagcctgtaaaatcaaaagcaagctagttacttcctagatacaatgggagtacaggtattgtgtacatacagtcatgccaaatgggagaaattggccaaaccaaaggggtagcaggccccatataagtctgaaacccagcagggcagtcaaattttaaagatcctaaatgatctcctttgact

SEQ ID NO: 478798 - DNA, 1000 bp, Homo Sapiens; identical to SEQ ID NO: 346534

SEQ ID NO: 478799 - DNA, 1000 bp, Homo Sapiens; identical to SEQ ID NO: 346535

SEQ ID NO: 478800 - DNA, 1000 bp, Homo Sapiens; identical to SEQ ID NO: 346537

SEQ ID NO: 478801 - DNA, 1000 bp, Homo Sapiens; identical to SEQ ID NO: 346538

SEQ ID NO: 478802 - DNA, 1000 bp, Homo Sapiens
agtttgactttgatttattacagtcacttacagatgccttgtctttgttgaaatcaagtctgaataatgaataatttataaatatttctataacccaaactttatatattttctattatgttactataaatatggtataatgcacccaaaggcattcgaaataaactactgccatttgtttgaaataaataaaagacacctacactgaaaaactgttttcaaaaaaataaagaaatacttaggagtcactcagccttgaaattgccggaattcagtgtcatttatttttagagaatcctttttccatattcaaaacaataaaaccagtgatggagcgatcagtattgaaattaattaggccacctgcccattcactgctaaactgtgggaaatttaatcatggtagatgagagatgatttcttccaagggatccattcattaaaaatgtagctgatgatactttaatacttgggtaagtttcaaattatctccaaagtaagtatttccaacttaggttacaagcgactgcttccaaaaagaagactgtttaaagtcaagtcattgctgtgatgacggggcactgggtggggcacacactgggtacctgtgttatgcctgtgctccagcagctcattgcctcccgcatgaactcctctaggtttggaaattccactttaaatatgaggaaatgtctgctcatgtagatgatatgacttgccctagaacacaaatctagaaaatgcagcaaccagaattttacccaagtttgttgaacaccgaaatctagcctcttcccatgactggccccctctctctgagcagtaatagtgagcattgctggccaccagggccacccatccttactagggctcctggtccctactgcacaaaattctgttatttgggattcagacctctggaaaaacaaaaatggagtttctagagttcaattgtgccaaaagacaattgtcatcacatctcctcttggagaagggaaca

SEQ ID NO: 478803 - DNA, 1000 bp, Homo Sapiens; identical to SEQ ID NO: 346539

SEQ ID NO: 478804 - DNA, 1000 bp, Homo Sapiens
ttaagaaagtggtgtacttcttcggacatgatcagcgaccaagacagccagccagatcctagcaggtgagtcttcacaggtggctgtcaatcccacccagtctcctgccttgataggacagctgagtttaagccttgcagttgcggctatatggcatgggaaaccagcagcaggtctgaccacatcagtagcaccaacacctcccctggtgtgatcggcaggactagggtctagtgctagtctccagaaaacactgcaggaaatcaactccattctatcattagacttgaatttttccttgtgagaatatatagtccattccaaaagcatatttactggtttggtcaaaagcccagaggtttcacttcctgaccaaaaaatttcaagaagcattgcctttcctgttattttcagattctgagaatctgaccagtcatacaacttttgactcagatgttgtacttcactttcaattaaattaaagaaaaatttgagtagcgtcaggtggagcaccttggagccaatattttctgaaatttgatgacaaaagctttcattgaaaaggcaagacctgataaggacttctactaaagaccatgctcctttcatacaagttggacactgaaacaactctaaataatatctcgacatggctggagacttccaaggaggatgcaggtgaagaagagctgacaatatatgaaagtatcgaccagaaaatgtatctatgttatcctgtagaacgttctctagaagggcatgaagaacgcatacaggagggatataatgtgcctgcaaagtggaaagttcctcaattgcttctttaaaaaaatgtccttctatgaggctttcaattaaatttaatacacctctgggaaattcagcatttttaacctctacgttgtacactggttgtttatctattctaatgcagttgtatctgacagcctgagctctatatatgtgcttccttaaggtattttttatttcaacaacatcc

SEQ ID NO: 478805 - DNA, 1000 bp, Homo Sapiens; identical to SEQ ID NO: 161443

SEQ ID NO: 478806 - DNA, 456 bp, Homo Sapiens
tttttattttttgatttaataaagttttatttttccaaatgtacagctggttggacctattcatgcatcttcaccagcagctggagcatctccacccttggtatttctggtgtaaattacttgagctctgtgctttgaaaccagtttgataagtcctttactaaggagctcctgaagggctgccctggccagggagcctcgaatcttcagtctctcagagaccacagctggggttataagtttatagttgggaacttccttacagagtttgtcataggtagctttgtcaaacaagactaagttattgagcttgtcccgaactttgcctttggaccacttcttctttttggccttgcccccggatttgttcactgggtctttgtttttcttggctgactttccagcgtccttcttctcgtcgtccttgggcggcattgcgaagctcggagaatttct

SEQ ID NO: 478807 - DNA, 1000 bp, Homo Sapiens; identical to SEQ ID NO: 346541

SEQ ID NO: 478808 - DNA, 1000 bp, Homo Sapiens
gaatatcagctcttttgttgtttatttgtaacaaatgtgatatttggttcttgtcagtttgattccttcatttttgtctctcattttgttcgacatttaagtacagcatagggatgttatttaatttacattctcacactctaaaagaaatactattctgaattaagtagaaaaagaataagcaagtgtagttactctggtacccattaatcacattttccatatttttcaaattttatacgataatgaaattccctctgttcaacacaaaagaaacactcattctggaaagtgtggccatttgaggcacaaacaggtgctgtcacattggggcagtctgcattgtaatcagggtccagtgggatatacattttacatcggggcttaggccacctagtgaagtcacgtttattgaaaattcctgagaaagccacatgtgtcaaagtagagcataccaggaaaaatataatcttgtggggaaaggcagccatttgatctcatataagactcttctttgataaggcctggatgaggtggctgaatatgggcctgctcttgtcactttggatgtcacaactagccttgagaagagctgctgttccaggagtctgtcacaactagccttgagaagagctgctgttccaggagtctgtagccaaggacgtacagcagtggaggctgactcatcgcatagcacattccagatcatttggtgattttgtgtgtgcgtgtgggtgtgtgtgtgtgtgtgccaaattcaaggtggtcccagcctttctagtcttctctaacctttcttctcagaagtcgcacctgttctgtctttctaggatataattttttttctattagcctgggtaacaccccaaccaataaagtttgcaatatccaagcctcctaatttctctacttattagcttatattaagcttcagcatgagcaagcctaaaaactcgccattatctggaaaagttctatttcacaggctttaatctctcct

SEQ ID NO: 478809 - DNA, 1000 bp, Homo Sapiens; identical to SEQ ID NO: 346542

SEQ ID NO: 478810 - DNA, 1000 bp, Homo Sapiens; identical to SEQ ID NO: 346544

SEQ ID NO: 478811 - DNA, 1000 bp, Homo Sapiens; identical to SEQ ID NO: 346545

SEQ ID NO: 478812 - DNA, 1000 bp, Homo Sapiens
acattgctttattccttcacaacacagagaaaaaaattataaaaccatagacatacagcataaaaaacatataagccattaaaatacttaatacaaatccatgcaatttgttttaaaggagcagcagaggatggaccccgccacaaggcaggagtaaacaggaaggatttcatttggcacgaacttattaatgtaaactgaaggcacttataaatgaattaaagacatctccataatgtttgaagccacacaaaggagagtgccaaatatctatgctggtcaagtctccccctcgctctttttttaaaagctagcatagctacttaatttactcaactaaccttcagcctgtgcagcccacacaatcatccttaagcccaaggcagaaatcccagtggaatgaggtcagtcagtcaaagaatatgagacatactacaaatgtcacaaatggggagaatgaatgctttcttatgaaattcacaaaaaatggcttagtagactatgtcatctgcttggttgtaggacatgtctgactccacgaccccaaaactttcatcactttcgtttctatcaatcaaggttgcatcacatttactcttcttcctcttcaatggttttcctccctgcaggtcagatggttcaaatccagcagacctcaccctttgaagtcctttggcaaatgcaacctcggccccatctaattcagctgaatctgagtgattggctgaaggcaaaagtcggtcactccgtagcctttttcttatttcttcttctttagtcttcctgcgctcctcggcagcctccatcttctcctcgatgtccttcattgtgaaatccttcacttgctttttgatcttgagttttttcagtctggaaggtggctttctcaatggcttctcagtcgtagtcaactggaataaaacatctttttacatgaagaaacaatcatattcactggcagaagagaagggcaaaagagttagaataaacagtttaaaat

SEQ ID NO: 478813 - DNA, 1000 bp, Homo Sapiens; identical to SEQ ID NO: 161444

SEQ ID NO: 478814 - DNA, 1000 bp, Homo Sapiens; identical to SEQ ID NO: 346547

SEQ ID NO: 478815 - DNA, 1000 bp, Homo Sapiens
cttaccaattttcaagtggatttcgggtatcaaatgatcatctttgtttttttgtgcagcaggatattaatcagtgttagagggagggagattctgggacaggctgcggcgcagatgagtcttcagggccgctgagtgacgcgagccagccacagaggacaaatcctgcccaactccacttaggtggggtccgaagagttgtcaggttcatggagacaggaaggagaaggcaggtgccaggggctgtgggaggggagggagtgtttaccgacgacagagtttccgtttgggaagacgaagaagctctgtgggtggaaggtggtgatgatgaacacacttaatgcctccaaactgtacaattaaaaatggtgacaaaggccccagtgttacgtgaagcacatttcacagtgaaaatcacgcctcatggggccagcccgctccactcggagaggaggaagctgctcttccccagagtgcgcgttttcaggacagcattttcagatgtgctgtgttgcatgaggactgtggagagtgtgagaaggggaggccagccaggcagggcccacagacagcaggggtcaaaccatggacatctttagggcatttgtccctcctggtccttgggaacagccccaattgtccccctggagtgtgtctgtggcattgggcccccctggagcgccagggttggggtgggcagtggggtgggcagagtgccgtaagctgggtctctcagtggctcctctccttccagccaatgtgcaatgcagtccagctcagtctctgcaagcccagccatggaggactccacacaggtacagacccatgactgtcactccaggtctgccgtgagccactccagttcaccggccagcaccccatctttagacagcgggtgcgtaagtcagccaggtcctgtgtcgcttaagccttccttccttgatatgtcccaaaacggcctctcgagctgcggggcaaggcctccagtcctgcgtcttgt

SEQ ID NO: 478816 - DNA, 1000 bp, Homo Sapiens
acagctcagcatttgtcttatttgaacatggtttgaacagctggccacaattgagtggccaaaactcagtaattgacacccgagtagatcacactctgtttacacttccatttaggctacagttcagtgtacagagaaacctttaggccaaacttaaaatatgtaaagaggcagtattaggctaaaccccatttagcaaaagtagatcatgcactctttcaattcaattcaagactcatttttggattatttgttattggcgaggcattctcaaggaatttttagcaggtcttttgacttttcagtgtccttgtttgagaaatacaagttttggtctctaattctagatacgctgacgtccctctagcattaaagtttggaatctatacattcctggagggcaaggacggtgatttttctttcagacccctcaacacttacaccgatggtgggtacagagtgtggcatacagaattgatgctggtgcacacagaatgaattcctgttcctttttccctctctccctggccctcgctccactccagccagactggtttttctttgtacccctagaattttccaggttgttctgccttgaggacttggtacttgccccttcccatcattcgattctctgcccgaccccagtctctccatcccataaccctgctttgttttttcgttcttgtaattactctctgaaattgtcttactagtcatttatttatttgtttattctctccacctctcccccagtccccaaatataagcttctatcttggatctttttgtatcactgctgctaaaacagtacttagcacaatctaggccctgaaatagataactgtaaaataaatgaataaactctaccatcccttatacagtaggttttacagtcatccctcagtatcctcaggagattggttccaggatcacctgcgtatacctgaatctgcacatattcaggtccttaaacaggctccacagaacctgcatatag

SEQ ID NO: 478817 - DNA, 1000 bp, Homo Sapiens; identical to SEQ ID NO: 246647

SEQ ID NO: 478818 - DNA, 1000 bp, Homo Sapiens; identical to SEQ ID NO: 346549

SEQ ID NO: 478819 - DNA, 1000 bp, Homo Sapiens; identical to SEQ ID NO: 161445

SEQ ID NO: 478820 - DNA, 1000 bp, Homo Sapiens
ttcatgataagttaatatttattgaatagtaaaatgaatatacgttaagggtagatctggcttcaagtataactgcaatcagggctggtgtgatatgtccagtagtcaaggacaaatgtcagttgtaatatgacctcctccacttgaaacacacagcaatactttaaacgtcccacagtgctgatggggagggaccactatcccatccactactgcaactctggagacacagccctcacatctctcctatataacatgaggcctaatctgcagagaaagagcatccaaacctgagccaaagggcactggggaaaagctcatggaactgagggtgaaggaacaaggccaacacccgcatttctgcacagatgcatctcccataaagaaaagaaaccattaatttacagggcactgttcaaggcccacttcaactgggagttaagagcatggagaaggagcacgtttcccctaccatggacaaggagggacaggaatgtgctcttgtcctggcattgcatgtacaggatgggcaggaaactcttcaacggtcagtaaccccacaccccagttcacagtgctaagtctgaggcttcctcagaacattagagatctcctcactccctcaccactgccaccaggctaagaagcatggagtcaaaacagtggaatatagctgggccaagtgcaagaaaccacgtgtgggaagaggcacaaagggaaggcacagcaaactcgggagatattagcaaagtatcatgagagggatttgaatttcctggtcctcagaaggttgttactgccataacgacttttaaccccagcctaccctctcatcaacatgaccacaaacccctatactaaggcagttatctgagagaaaactgctcgtcaataacctaaaacctatcccctttcaatgtcagtgggctgatgaaaaaataaaaataataaaaaaaagatttaccccaatgcactatcctatacaacatatgctattgct

SEQ ID NO: 478821 - DNA, 1000 bp, Homo Sapiens
tcatcctcatcatcacatttattgacggcccctaagaggcggggctggggacagaacgtacaaagacaaggacctgccctcaaaaagcttccattctaaggagacagggacagaaaaatacagaatggtctttcctgggtatggcccactctcacctgcacaggtcagaagcccctggcctaccttgccccagggtctggagcatgtgtggacacgtagtagccccagggccatggtgtccctggccccacagccgaggcctgatcacctggctcctaggctgtgggccccagaatttgggggaaaggtaggctcaggacatgatgtaaaacactcctggcggccttggcgttgtgcgagcccagtggagtggtggggtgcgacaggtccccttggcaaggcccctaggggacccaggcatcttcccaggcccctgtagttgagtcaagttctttaacggggctggtccatcaccctagaggccccggggcacggaaacaaaaaaggcagggtgtcttcagcgccagaggcataaagccctgcccacccacccccagccccctctcgggcctcttccaggggaccctcctccccagctcagcctccagggccagggcctgcctgaggccagggggaggggcctgcccctccccccacccaggcagtgggggaggaggaggagccacgcatcaagtttgtctaggccccccaactggggggccgcaccgtggatcctaccggtgggggggctctggctgcgagggccgagggctcagcaggggggccgggccgagggggcacccgggggagcccttcagtgggggcactgggcgggagtccaaggggggcaggctccggggcactgctggtggcccccgggcggccccagtgggcaggacagctgcagccgggaaggatttggggggatcagcagccgaggtgggggccggctgggcagaacgctcccgacgccgcagcagctcctgcagcttctctgcct

SEQ ID NO: 478822 - DNA, 1000 bp, Homo Sapiens; identical to SEQ ID NO: 346552

SEQ ID NO: 478823 - DNA, 573 bp, Homo Sapiens
ctgggctcaagcgatcctcccccttcggcctctcaaagtgctgggattattggcttgagccaccacgcccggccaagaaccttgtctcttgtgatgcaccccagaacaaaacatcatcctctgccgtcgccacctgtctgggtgccggtctcctccctgcccggccgcggcgcgtcctccccgtcctcgcagtcctagggctgtgctcttcccccctccagcaacagccgcagcctcttctccccgggagggacgtcgtcctcctccctcctgggccggccatccctgcctcggggcttgccagtggcttcggagctgccggaagggctggccatggctccgggggctctgccctgtgtcttccatgatttggaggtggtgggaaaaccgaggctgctcaaaactcgtggagaattccgccaggagggtctgtggcttcattcttgaagtcaatgagaccaagaacccaccaattccggacacacttatacacttggcactaggaagtttatcgtagttctcatagaccagggtttgcatgtcgctgtctagagcccggatctgctgcaccat

SEQ ID NO: 478824 - DNA, 1000 bp, Homo Sapiens; identical to SEQ ID NO: 346553

SEQ ID NO: 478825 - DNA, 1000 bp, Homo Sapiens; identical to SEQ ID NO: 161446

SEQ ID NO: 478826 - DNA, 1000 bp, Homo Sapiens; identical to SEQ ID NO: 161448

SEQ ID NO: 478827 - DNA, 1000 bp, Homo Sapiens; identical to SEQ ID NO: 346555

SEQ ID NO: 478828 - DNA, 1000 bp, Homo Sapiens
tccacctagcattttattttacacagatatccagagtgatcagacatatactgcctcaacttaccaccaaagatacagcgatacatatatctgcaatcaagttatactatttgttcaaatatgtgtgtttttctctctatcagtcaattaaaggtttatattttctaagaagtaacttttggttttattgataactttattgaattttctattctttatttcattttttgttctaatgtacactatttcctttcatttattttggatgtggttagctctactttttctaattttataaggtgaaaacttatagtgttgatttgaaatatttatttcctttaagatagccagatacaaatacatttccctctaagcactgctttagctgcatcccccaaattttagtgtgttgtgattcggtattcatttttcccaaggtgttttctgacttccattgtgacttcctctttgaccaattatcttataaatttccacataattgtgaatttccaaaattttctcctattatcactttctaactttctttcattgtagtctgagaaagcattttgtattatatcattaaaaaaaacccttgaggtatgttttataacctatcatacagtatatcctggagaaagttccacatacacttgagaataatgtgtattctcggttgttgtgtggagtgttctttatgtgtatagtaggtttcattatgttatactgttgttgtgttattcatgtattctattttgttattgatctgcctagttattctattcgctattgaatgtggagtattgaattatatctaattgtctatttctctcttcaattatgtgtcttttcttcacatattttgggtctctggtgttaagtacatttatagcttacaaattatatatctggcatgtgcatgtgtggataccaccaccaccttgctgctgctaatgtacacatgctgatcccactgccatcacccagatcgagtgctttt

SEQ ID NO: 478829 - DNA, 644 bp, Homo Sapiens
taagtaatagaaatttaattatatatatatagaaagaaaagttatacaggcacactgagaataaattggaatctagaactgaatgctgattagcatggcctataaaatcaaaaccaagttaattacttctaagatacaatgagggtacaggcattggatgaggatgttcccattccatataggagaattggacaaaacaaaggggctaaaagccccatgcaagtccagaatccagcagggtattcattgaattttacagctccaaaataatctcctttgactctatgtctcacattcaggtcacactggtggaagaagtagactctcatggtcttgggcagctctgcccctgtgcctttgcagggtacagccccattccaagctgctttcataggctggcattgagtgtctgcagcttttccagatgtacagtgcaagctgttggttgatctaccattctgggatctggagaatagtggctctcttctcacagctccactaggcagtgcctcagtggggactgtgtgtgaaggctctgacctcacatttctcttctgcactgccctaacagaggttctccatgagggctccacccctgcagcaaacatctgcctgtatatccaggcttttccttacatcctctg

SEQ ID NO: 478830 - DNA, 1000 bp, Homo Sapiens
tgaaatattttttgtttattttttaatcttgataacttgtaatagtttacagccacagtggcagcttttatatgtgtacatgcatttaaatacagtttcataaatagccatgtggcaaaatatctgcctctaggcaaaaaaaaaaatatttgccactaaatgaacatctttaagtaatattgaaaatagatgtgaggtaattttttatctaaagtgactgtagcctatattaagacatactcactgtaacaattcaagttttaaaatccttgttttataactcaaaaatgtgtcttttccaaaaaacacatctttacatttattgctattgtacattcatttggcaggaaacagggatgtttgatgtcttgcaatgataaaacaatcatattcaatagaaaattatctcacattctgcatgacttttgaacattctataagataattacataagtgaaaaaccaatttgtagatatctgagtgagtacaaccatttaataaatgtgaataaagcatttcagaacattttaatgtacactgcattttctgatagtaagattttaggttaaaataagattatactttaaaaagcttaccattataaaaaaaattatatcactgttggcaatgcctttttcatatttgagatgctagtccaacatattgcatatccatttgtttttgttttattttattgttattacattcatggtaatactaaaatacacacacacacaattaggattttttttcaataaaaagcccaaagaaaaatgctgacaacgttcagttgaaattttgaaattgggttttataattctgcccacatagcaaaagctgaaatggtctatgaagatgtagtttttgaaagaatgaagcaagtagtaaaaccaacaaaaccaagtgaaaattatacaaggaaacacaataataagttaacaaaaaaaatacactttttcttcatgttgacaagacatgatttattcctttctaatatttt

SEQ ID NO: 478831 - DNA, 1000 bp, Homo Sapiens
aaagaaagcatcttttatgggtttattggtcctttaagttaattgaagtaaagaaactttaaatttacaagctaatatttatcaagcaatacaaattcttttgtttacctcaaaatgtaatactaattccatagtaaacaacaatttttttatacacagatatatgaaaaaagtggacaaaaacctcgtgccagcatcaaaaagtcaacaaaaaaacgattctttttccattttacaatctctggtttccataacaaacaaaaaaaagggtgacattctttttaaagtttggtagcttcatgaaacaaagacttccatctgtaaataaatcactttcttatcaacacactctctcaagcactttttttatcacagcttttgttttggcataatggcagcatggagagaaggtaacatttacacggtggactacatcaatacctcagaaggtttttattttaaaattttaaacgtaaagaatgacttttaaaaataagatgacagtccataatgtggacatgtccaaagccgaagtttttaatctcttctttaacagttaaaatacaagttagaaagtttgctggcagtttatttcacaggaatatatcagatggacatcatctctcaatgcactcccaactcacagcaatgaagggaacaggcacacagaaatacaacagacagggaatccaccagacttcatccaaacttcaggggtgtctaggccaaaagcgcctttaagagatgctggtttgttattggataaaggccgagatgacagagccactgcttcatcacactgactcacattttggtttgcaatccactttcctctctcctcatttccacatggaggaaaaaaagtgattttcctttcctcctcccagtaacatttctgactgaagtgttggtctaagactgcgaacaatcaatcctgtccaacaggggtgttgctgggtgtcacctactaggaccagcctacagagagcccagaaccacc

SEQ ID NO: 478832 - DNA, 1000 bp, Homo Sapiens; identical to SEQ ID NO: 346556

SEQ ID NO: 478833 - DNA, 1000 bp, Homo Sapiens; identical to SEQ ID NO: 161449

SEQ ID NO: 478834 - DNA, 1000 bp, Homo Sapiens; identical to SEQ ID NO: 346558

SEQ ID NO: 478835 - DNA, 1000 bp, Homo Sapiens; identical to SEQ ID NO: 346559

SEQ ID NO: 478836 - DNA, 1000 bp, Homo Sapiens
agcagagaacatgctttattgaggagtagatacagaagagcacattctaccacatgtggggaagggtttagcttctgtaaaaggcctttaccccttaagaaaacccctagtgaagttgcttttggataaattttaacagtgacactgaaactggaggggagctgccactgaacatgcttaaaattagctccctcaacccacagtgaatataagtagtgtacagagatgacaagagaaaggcacaaatgaccggagtcagggattgtggtgagggctccacatgaagacagcatgttggaggagaccaagttgggaagggtgacatgtcatacatcaaaagttgcccgaagatagcaggttataatgggctagagagaaattagagggaacatctcttccttcacttgaacaacaccaaaaatagaagaccagagaatagaaggatggtgacaaatcccaaaaaggaaatggaggaggagttcatggaaaagcagaagcactttaatcctagagggagggtgaggcactgtcgaaaagagaagcaaaccttggcaggggtggccattctgccttgctgagtcatgggctgagatacggaagtcactttcagtcattttcaacttctcccagggcattcagacaaaatcagtgcaaggtatatggaagtacagatgtactgtatcagactagtggaggtgaaaagttttctgcagtataattaaccagttaacatgcagcatgaaagggagaagtggacattattttggcatctgcaaacgtaaaaagtgggagtaaagagagaatgaaatatttactagtgggtactttacagtgaggcaaaaagtagtatccgctccctttcaccaagacactgcccactgcccacaggtgaactcaaatcaaacccagaaccaccacctcttcattcttctctccatctcattcagatcaattatatgctattaccatgactagtccctgggaaactcttcaaaagtat

SEQ ID NO: 478837 - DNA, 1000 bp, Homo Sapiens
gaaagtaaaaagctgtttaatagtattgaaaagtgcttctgttgcaatcttaaatgaggtccacagcaagcatacattactttttttgtttttttaagtgtctgttatggaaggagagtatagaaatgtgttactctctgtaaggcaatttctgtaatatacaaattatgcctaactacctctattggctatgcttagaaaaggattgtggcagaccaattctccctgacaatcacacagacaggcctgcatgacagtcacacaggcaggcctgcatagcacctcagttacacagacaaatttctacagagtggccttaacattgagcaaatagtttaaccgagggaaatcgatgcccagacatcaaagctagaaataaaacatatggtcaaggccgggggcggtggctcacgcctataatcccagcgctttgggaggccaaggagggcagatcacctgaggccaggagttcgaaaccagcctgaccaatatggagaaactctaactctactagaaatacaaaattagccgggcgtggtggcgcatgcctgtaatcccagctactcgggaggctgaggcaggagaatcgcttgagtccgggaggcggatgttgcagtgagcggagatcgcgccattgcactccagcctgggcaacaacagcgaaactccgtctcaaaaaacaaaagaaaagaaagaaacatatggtcagtaggaaccttgcatgggcttctctggaacaagccaaaagaatggagacagtcttacattcctagtgccaggacccatcttgggtcaatgaaatctgagacgagtcaaggtaacagaggcagctgcattggagagtccaaggcagctctccggaccaagcataatgtagaatcagtaggcaccctgagccttgttttcctgcaactagatgatcccatcctcatcaagcatctcctgttttcaagaactcagtattggccagccaggattgctccagtgcactccagccctc

SEQ ID NO: 478838 - DNA, 1000 bp, Homo Sapiens; identical to SEQ ID NO: 346560

SEQ ID NO: 478839 - DNA, 1000 bp, Homo Sapiens
ttagcaatactttgcaaagctgcatccttgggttcctgtggcaggcccgtgtagacccctcaacctaaaactgctgcatttgagtcctgagttgcttgaagcccctacctgcatatcttgccccagaggcagcaggggtgagttggcagctatttggggaggcacgtgctgcagttgagagcacaacggctttccattattctgaggcagttgactctgcagctgtgactgagccgagggccactgcttctctagatcccaaggacccgagtccattggcagctgttcctgcaacatcatcccctctgagtaattctgaggctgttggtgctgctgtgggtgatactgccaatcattctgctgctgttcttgcagcagtgagagacagaatgagcaaagacaatggtctttcttcaccccgtaagcaccttgagcgtaatccaaaaggaagggacttgcatgctggctttccctggtttcagtcctttctccatgaaaatatggcacagaagatgggggaggatgaaggcattctgcagagttgtagctgagaaaacgataggcagtagaatgctcacttcctgtgtcacctccatactccaaagcatagcctggatgcttttcagtacctgcgaccagataggagcactgggaacccacctgttgactgggaatcccttgtttctccagagaagagcacatggagcccacctgttgactgggagtctcttggttctccaaagagaagcaattgtagcccatctgttgacaggcaatcctctgtttctccagaagggagcaaccaggtcttctcatcagagccctcttggcacaggaaaaactctgctctgtggcatagttggaagctgcagcctgggtttcctggaggcttaaaaatggacaggcttggactgggaaatcgtgttttttccaagtaagaaatattctttgtctttcttccggtggaagtctggctctattgttctggaaccagttgttt

SEQ ID NO: 478840 - DNA, 1000 bp, Homo Sapiens
ttaaagttgctgcatttgggtcctgggttgctctgaagccctttcctgcatatcttgccccagaggcagaaggggtgagtcggcagctatttggagagacatgtgctgcagttgagagcacaacggctttccattattctgaggcagttgactctgcagctgtgactgagccgaggaccactgcttccctagatcccaaggacccgagtccattgggagctgttcctgcaacatcatcccctctaagtaattctgaggctgttggtgctgctgcaggtgatactgccaatcattctgctgctgttgtcccagcagtgagagacagaatgagcaaagacaatggtctttcttcaccccatatgcaccttgagcgtaatccaaaaggaaaggacttgcatgctggctttccttggtttcagtcctttctccatgaaaatatggcacagaagatgggggaggatgaaggcattctgcagagttgtagctgagaaaatgataggcagtagaatgcccacttccagaatgcccacttcctgtgtcacctccataccccatagcacagcctggatgcttttcagtgcctgtgaccagataggaactctgggaggccacctgttgactgggaatccctagtttctccagataggagcactgggaacccacctgttgactgggaatccctggtttctccagataagagcactgggggcccacctgttgactgggagtctcttggttctccaaagagaaacaattatagcccatttcttgactgggaatccactgtttctccagatgggagcaaccagctcttctcatcagagccctctgggcaccagagaggctctgcttggtggcatagttgtgagctgcagcctgggtctcctggcagcttaaaaatgaatgggcttggactggaaaatcatgctttttctgaagaacaaatattctgcgtctttctgcaggtggaagtctggctcttttattctggaaccaattc

SEQ ID NO: 478841 - DNA, 1000 bp, Homo Sapiens; identical to SEQ ID NO: 346561

SEQ ID NO: 478842 - DNA, 1000 bp, Homo Sapiens; identical to SEQ ID NO: 161450

SEQ ID NO: 478843 - DNA, 1000 bp, Homo Sapiens
taatgccacaataaacatacgtgtgcatgtgtctttatagcagcatgatttatagtcctttgggtatatacccagtaatgggatagctgtgtcaaatggtatttctagttctagatccctgaggaatcgccacactgacttccacgatggttgaactagtttacagtcccaccaacagtgtaaaagtgttcctatttctccacatcctctccagcacctgataatgcatttttgtattgcaaaatgcaacaccctctttaatactgatccatatgaaaattgttgaattatgtgaatgtggagtgttaatgtaagatctttgggagcataaaatacagcagagaggccagaaagggaactatgagctgaatccagatgccagttagtgagtttctggcaaggtggcagtagctgcaagaagaaaatccacttctcccgcccgccatctttaaaatgcatccttccgacacttcattgcacgtgccacactactggactctggatctaagaattctcccaaatgtcttgttctttctatgaacataaaaagccaaaataggtgaatgagcctagacttttcacaggaaagctagaaatagtggcatttgtccaatctatgtgtgaccacaggggcgctgtagacaaacggaaaggagcggtaacttccgggtcattgccatggcacttgccaggtcagttcatctttagccaagcagcagagacgagatgaacctgtggctgcggttgcttggttgactctgcagatgatgatgcagtgcctcctttatgaaagatttctgaggacttccccacttcttccgttttggtttgggtagtagagcgagacatctcagtgctttcagtttctacccctttccgcatcccactaaaccactttttatattccattcgaacctggcgattaaggagacagtgtaccacaaagagcaacactccctgaagggtgttgatgatggtgaatgagtatgcaatgattgat

SEQ ID NO: 478844 - DNA, 768 bp, Homo Sapiens
tcaggtacaggcgacgtacaggcgtttccaaagcgcctgaggcctggaaactcgggtggctggctgggggatcatggccaggggcaaagaacttctgagcccgtgtgacttgggtctcattcgggctataggggtgcaaacaggctccaatccgcgaggaggatgcactaaagtgacccgcttaggctgcaaaaccaggtgcaccatggtacgcacgactcgctgagctccattttctaggcggggaactcttgaggcctgacgcccacgaggggagcggcagcgacttgacgcacctcctgggcagccaaaacaaaccattgcagaggattcttgtcccacccaacgagcagccccagccatgaactccatcgcctgcgcgatgtctactgacgacgcctgcgcgatgtctactgacgacgcctgcgcgatgtctactgacgacgcctgcgcgatgtctactgacgacgcctgcgcgatgtctactgacgacgcctgcgcgatgtctactgacgacgcctgcgcgatgtctactgacgacgcctgcgcgatgtctactgacgacgcctgcgcgatgtctactgacgacgcctgcgcgatgtctactgacgacgcctgcgcgatgtctactgacgacgcctgcgcgatgtctactgacgacgcctgcgcgatgtctactgacgacgcctgcgcgatgtctactgacgacgcctgcgcactgcaaggtgggcgccgctctccattttctgagcagtctcctactgccat

SEQ ID NO: 478845 - DNA, 1000 bp, Homo Sapiens
ctaccctatgtgagatctctgatgttggctgagccttgacttccagccaaaggattttccacactcattacattcatagggattttccccagtgtgaattctttcatgtttagtgaggtctgacttctggtggaagcttttactacatacattacatccataggttttctgccctctgtgaatactctgatgcgacctaaggcttgacttccagccaaagggttttccacattgattacattcatagggtttttcccccgtgtgatttctctgatggctagtgaggattcctttctcataggttttcccacattcgttacattcatagggtttcttgcattatttacattcaaatggcttcttacctgtgtgagttctttgatggatagtgagggttgatgctgccaaaatgtttttagcaaaataggattttccctctgtgtggattctctgataaacgcttagatttgatttctgacagaaggatttctcacatatggcacatggatagggtttctcttctgtatgtgttctctgatgttttgtaacacatgattggctaatgaaggctttctcatattcactatatttataaggtttctttcctgagtgtattttcttatgttcagtgactttatgcttcttactgaatattttcccacatacatgacgttcaaaagttttcctccctacctgagttagctcttgagcaatagtagctgactcattacaggctttcccacatttattagatttacaagaggtctttcccatagaagcactcttatgtgttaatatagcctccacgttgaaggcattcctccgtccactatattcaaaacaattaaactcctcagatctctttcctgaatagtttccattatttctaatcagttctggtacatggtttgaagtcaaactacatgtttttcctgattccactcccttctcaattgatggtttacttttggtaattacaacttgccacaaatgtctactg

SEQ ID NO: 478846 - DNA, 1000 bp, Homo Sapiens
ctaagaagcagtgaccaggatgtggattttggcgacctgtgtggtggccttgagctgctttctgtgtttgtgaggactgactcccatttccttatctgctccacactgtcttcctttgatgggggttctcctggcactgggcctggaggctggtgtccgcttggcctttctggcagcccagcccgggcagtcttcaaagacagcagctgcagccttcaccctctggccacgggcattgggaggggtggcgcaggtggcccccacccgcaggttcagcccagtaagccacctgtgcagcggaagcagctggcagtcacagtggaagggattgctgctgaggtcgatgagctccagctggctgagactgggcagggcaggcagggcccgaagctggttcttctgcaggtgcaggctctggagcccgggccccaggcctgaaaaggccccaggacaaatctgctccaggccactgctgttcaggaagaggtgctgcagcgacctgcccacaggctggaaggctccgtcacgcaaggccctgagtgggttgcccgagagctgcagctccaggagggcaggcagcccctccaaggccccagtgggcacctctcgcagctgattcctgtccaggtgcagcttctccagctcccgagctgggcccagcgccccaagggacacttcggtgatgcggtttccactcaggtagacccagcgcaaggcccgtgttctccccaggtccccaggtgccaggcggtccacagcgttgtcctgcaggtgcagggagaagaggctgggcagggcgcgcagggcagcccctggcacctgcaggaaacggttgcgttctaggtacaggtagccgaggcggggagccccttcaagggcagcagcgctgaggcctgcgagctggttgtcggagaggtacaggtagatcaggcggcccagcccggccagggcgcccgcttccagctccgcgatgccgcagtgctgcaggtgcagcgacacc

SEQ ID NO: 478847 - DNA, 1000 bp, Homo Sapiens
tcagctgtagtagactgtttctgccggtgcctgctctacccccgccctgctgtgattgcctgtgctgggctttggaaggagctccacctggagccccgtgagccttttcatgaagtgcaggaggacgccacaggctgtggtttcctcatgatgttctgctacccaggggccgccatacctgtcattcttcgctgtatctgaggggctgtaattagagtcatagccaaagagcacttgccctgcacagctccaagactggttggcggggcctggcaggtgcatctctgaaaggctctgcagccctgggtctttctgactacggacctgcagccctgggtctttctgactacggacctgcagccctgggtctttctgactacggacctgcagccctgggtctttctgactacggacctgcagccctgggtctttctgactacggacctgcagccctgggtctttctgactacggacctgcagccctgggtctttctgactacggacctgcagccctgggtctttctgactacgaacctgctgccctttccactctccactagtccattctaaggtcagagcacacgtgttccgctggggacagagcttgagaaccatggctgatttcccatgggatggctgcatgctttcccatcttgatggcaatcggcgtcggggggagaactgttccagtggccggctctgcagggtcctggcagctccacgggggcttctgcctgctccgagccacgttttcaggggttttgtccaaagcgcctcctttctgagctccagtccctcgcttctctgcacagtgcgcacatcatggcttgccttgctcgtgggagcagaatatgtgtcccagtccttgccttggcccagaggcaaatgggtggaagtggccgtgctctgagcttgcttcagcctgctgtctcctgcatctctgttctccggagcctctgccttgcccctgatggctgacacaggcggcctcatgttcctg

SEQ ID NO: 478848 - DNA, 1000 bp, Homo Sapiens
ctcttttgaggcaattcctgaggggctggctcagactcgagtgtcacagaaccaagaaaacaggagctgccttgatccttaggtggtctctcctggctggggaaaggctgtggtgctgggctgggcaggccacccactctttattcctgcagggatgcatataagtgcaccttcatttcctgccggtgctgtggggaagcagcctgaataaagcatgaagtacttaagccaagtacaccaacctcccaggtaggtactggggccagactggatggcagggggtggtagaaacaccaagtggccacccccactgggcctctacacatacctggggcccctggagcagggctgcttgctctcagatattcctttcttgcatcttactgggtatgagatgtgaagggatcccgtttgggtgggtaaagatggatgaagtgcttctagggatagccaggccctctgtccctgttcccatcctcagccctagctgtatggtcaccaaaaaaatccatgcatagagcctcccagcaagcaaaagctccctactcagcagcagagctcatccccgaggagagaacaaaagaagagcgtcaaggggctggtggggcaggggctgcaaagctgccagtgcttgggcatgcatgaaggctagggggcacaagtctgtcagccccagggtgcgtgtgcaatggaatactctgacctctcattcttgctgcaaaggattgggcctgctcacacacatccttcacacacagccagaacagggtggaggactgaggggctttcctggaaatagccaaacccatgggaagtggacgtccccccaggcagaagggtatcttgttcacccctctgcctctagtgcaggtggtgctcagtactgttgcactaatgaatgaatgagtgagtgaaactacaactagcatctgtcctttcagcaccacctttctcccaccctagctcactacccatacaccccaacctcctttctagggct

SEQ ID NO: 478849 - DNA, 1000 bp, Homo Sapiens
tcttttttttttttttttttttttttttttgttttggttcccaagttttattcaagaactcatacaaaatattccagacaaacgaaatttaatcctcgtcttcctcctcttcttcgtcctggttaatttggaaggaacgtaatttgtaactctctttgctgttagcaactatgcacaaccaatcacgaagattattcttcttcaaatattttttggtgagatatttcaaataccttttggaaaaatgcaccttggatgtcacggtgatcttgctcttgctccttttgacggtcaccaccccttcgccaaggttcccagcttttccgttcactttgatcctttcttgcaaaaactgctcaaaattggcagcatccacgattccatcttcagcctttagtaccggctgggccgggtgctccgggcggccggccgccgtgggggtggggtgggtcgggggcgcctgcctcgccagcccttttctgcctccccgggtgggatgcgtggccgcctgcccgtctgtttccccctctcctgttcgcctccctcgcggcggcccgccccagcccagggactggtgatctaggtagccaggggcagagcgcagccgtggggaggaaaagaagcgatttgaagactgcgtcactaatgcctggggatccacccgtcggccccctgctcctctcacttcctttccctccgactgcgccccctccctcctccggctggcaccaccgaccccctggagttggtgctgctgcgaagtgcccttagaggatgctccagcctccccgcctgcgcccggtctcggctgcatcctttctgtctctcccacccacttccaccgagatggaaaagtgaacatccagggcgggaaacgagtgtttctccgtgccggtattccagaggccttagcccagggagactcctttcctcggggttcacagttcctctgggccctttcttcacacctcgtcacagttgcactcctcctccccacccc

SEQ ID NO: 478850 - DNA, 1000 bp, Homo Sapiens; identical to SEQ ID NO: 346566

SEQ ID NO: 478851 - DNA, 996 bp, Homo Sapiens; identical to SEQ ID NO: 346567

SEQ ID NO: 478852 - DNA, 765 bp, Homo Sapiens
tcaaggcttcctctgattgaggggtggacaggcactcctcacaggcgggtcgggtcccatggacactggctgaaggtcgtggcgcgtgactggtttcttcgctctggggtgcttgtgtgtggttctttggtactttctgtgccttaggaagttctggtcagatctgaggcgaaacagcggcccaggcgactccatcaacggctccctcatccggcagctcgccgggtcctgccttcctggcctagaggagtcgggcaggacgggtccgttcaccctttctgctgagtctaagagggttgggtctctctctctccgagcacctacacatttgaaacactctgagctggtcccagccacgttagacatgtgggctgagaagtggaggaagatgatctgagaagtccttttgccattttcgtttagtgggtatggtagctgatggtcctctgaactgctcaaagatttgatggtgttattcagttgactgatttttatggacctcgggtccaggactactgctagttcttggcatgggctctccagatccttcagggtagcagatgatgtagggccctccccgtggatacctgttgctgaatcctcaggtgagtggcaaccaccagaagtggctgtttcagggctactgccactcgttttcctgttcctcttcactcctgctggaacaccaaggctgtttctctgccaatattcttttaacttttccttggctatggccaatttgctttgtcgagtttcttctgccat

SEQ ID NO: 478853 - DNA, 1000 bp, Homo Sapiens
ctaataattgtcatggaagtcctgtgcggaatgagagtccggcagtgcctcatcccgggtcatgctcagatcctcagcaagggaactctgggtggcttcactgatgttgaggtgccctgagaccttgtgcaggatgtcaacctccttcagtgtggcttcttgcagctcctgcacctcctcgggggtgaagctgcttccactggtgacgtcgatgaccttcacagcatgctcctggctcgtgggcttgtggatgcagcacctgaccatactgctaatgccccaggctcgactctgaggagactgaccagctccaggtactatatcgcccctgtgacgtcgctgaaagcgcgcgtctgtggcgtcgcggaaggccagcgtgtatgacgttgccgaaggcgcgcctatcggaccgaccgccacgcgcagccaattggaactcgaggtggggctgctgggtcttcctggagcgcgcatgcgccggcgagctgccacaaggtttacactttcccccatcttcctctgtgcacctatcagggcctgtccatggggctgtgtctgcatgggagcagccccaaacacagtccttgtcagcaccccgatctggacctgaattgggcccttgtgctcactacctgtgcagccgaaggccacggtgcccacagcagccaggttgatggcgtaggcctggtcccgagagaagagctgcagccacacgtcacagatgctgataaaaaggagagggcccaaggctaagaggtagcttgcggtgatcctggtgtgcagggtcagtctctccaccaggacgttgttcaggagcacggctgccagcgccaccaagatgtaggtgaggctcatgtcaaacacaatggaagtccctgggtacttgtgatgcaggtagtccacgtccgtgatgaagctgttgtatggcagcaggaagcccacgccagacagcagcatcgcaaagtagatggcgtgatagcggtcattgggcactggctcc

SEQ ID NO: 478854 - DNA, 1000 bp, Homo Sapiens
tcagtgagaaggagcaggcactgggccttgaaagccctgtctcttcaggctctcgcccaccagagggtccctggaatccctctctgggggcagggcagggggagagaaaccaagtgaggaggcagttccttgactgtcaatgatgggctctttgactccctcagtgagcagctcaggcctcttgatgacaaactggatgctgttgctggcctccagaatcttccagagcttggcgatcccgaagcagttgggcctgcggagggagatgccttcagacaaccccaccacaaacagctcctccgggtgcatcagaaacttggagtacggcatcttgactggttccaagatgccaatggccttggcgtatcttgtgttgaagagcagctccacctgcttccacaggggccggatcacgtcaccttgactgtcctccacgggcctctcctcaggccgtgggtcctcactcaggcctttgtctgtcagcatctccatcccacaatcagaatcctccgatggcaggtgcccagccattgagtctgtcatttcctcagaggttggtgacgggtctggcccgcagtcttcacacatgctgcccttgtctgacccagcctcaggtgaggcgagtgtgcggcaacggctgcagccggagctagccggcttgcagtggccattaaggagcttctgcccgaccttctgtttgtgcccgccaggcgacaaccgcttggtgtgcagcgcctgctcgctcagcgtcaggcccttgctgcgccctacgctgcaggctgggaagtcgcgccggtagtagtagcacaggcagtgggaaagctcctccttgtagcttactggtgttggccgccgggtcggagcctgcgaacactgaccggccggctgtggccacgcgtctgcgcatgcgcgcttctggacgacccggcagccgctcctcgagttccgattggttccacatgaggggcgtggctctctgtcgtcactggggagcgccttc

SEQ ID NO: 478855 - DNA, 1000 bp, Homo Sapiens
tcaaatgacttcctgaacgtagcccactgggcgcgtcatccgcgggactgactctgcctcccacgggcttcctgaggccggaccgccgcggggacgcctcttctcacgcccaccaggggcgcgcgagcctcgggagacgccagcaggggttgcggagctgcggtgctggaagccagctgtcactccaacccagctggagattcctgtcgggaatgcttgggataggacagctgtgagggagcccctggaagatggaaaggatcgtttgctgtttggagaatagagctgcattctgggtgacatgcggaagcctgttttaccaaacaaactgttaaatctccttgatattggagaactcatagaaaacacaggtgtggatgaacccagggatgttgaactcctgacactcagactccaggatactcctctgtccccacccagggcagatgcctgccctaaaagttttcccctcatgtccagcaaatgctgcatggagccctggatttctacgtggaaaacctgcagggagtgcctctcctcagccatccgctgatccagtgcccagaagttgtcttcctctggcagatacaggaggaggatggcagttaggcagctcatgtccctgtagtagcccacctctttcagctccagggctgaggccggtggctctacaggaggtgccatgaagtcaggcagcttctcactgggctggtcctgtgcagtcccagggcagcggcaggaaggctctggaggttcctctagctccagcgctgtccctggaaggggctctgcccctggtgctggcactggctcaacagctggcactggaaatagctgtgtttctgcacctgaagcaggagcatgtgcctgtgtctcaatgagctccagaggctccagctggacaaggacaatgtgcagatgtggccctggtgggatcactggtgaggcctggcctggtagctccatctggggcctgatgtctacctggtgactcctgtcc

SEQ ID NO: 478856 - DNA, 1000 bp, Homo Sapiens
ctaatcagcaaaatacatgagattgttttttatggtccccatgtgaaaacgtttaaagctgtcaaggtacgtcagaagtttgcaggaaatgagctcataggatgtctcaaacagtgtacattcttttccatcattaatttccttccatgctaggggcatttcaggatctgcaatttctgaggatgtaaaaatgaacttatagcaacatctgttgtatctaatgtgccttttcccagaaaaccttgagctgtggatgggtataaggccaatgaacttagcacaaattcctacaaacacatcagctggcaccatcatgggtacttctttgaaaaccacatacatcattcgagccacatcttgggacattataaaggcctcaccactgcagtaatctgggtagtatttttctgggtactcactaagagggacaaagtctctgttctgaggatctctattgggtgtaacctgatgaagaactcttcctacatagatatcttctaggtgttctttcagattgagaagatagtctaccaagcttggtagattgacaaacgtctcttcatccaccttgagaatgaacagggcattagggcagaaagccacagcccactgtatcattgcaatgatcttcagggtttggttctcagaactgtccaagaagattccttcaattatatcattattcttacaggattctttgttgatctctttctgggtagttaccgaaacaggcattcccagagcaaacagtgtgagaatgggatgcccttggacactggtcacattgccccaagttttcctaatgaggtcccgtcttgttccatttcctgggctactgaagataagagacagcaaaaaaatgttcttccctttacatatttctgactggctcaggacataatatttggagagattacttcttaggggttcgatgttcaattttcttgccttattcttaatttcaagaactttcacatctatataaggcaaagaatgcaga

SEQ ID NO: 478857 - DNA, 911 bp, Homo Sapiens
gccactgggcaaaaaagctttttattttcccccacattccagctcttcactttttctaaaaccttttccaactcagagccaaggcccaagaagttgattcacacctgagaaacaagtcgggaactaggccagtgccctcagagccgggttctagaccagtgggactcccggcgcgggtggaagcacatagcagtgacacagcagagaaggccacagaagagaagcaggaaggagcccaagaccagcagcctggagccacacagagccagctcctccgaggtgagcagcttggtcagcacaaggccttcatggctccagacactaacacattcctcacccattctagggctcagggtggcatttccagccccctcctctgagcaggatatgggtggctggctggagggtaggattcctggaacagcactaaaatataggcaggttcctgcagtcctttctgtggtcaccctggctgtgataaggaccagttgtcctgcagaagatcctttcaatcccatctgacttcccaggactgtggcctggaatgtccgggtcttgttcctgtctggaccgtctccgaagttcaaggtggtcagcaagcccacgacgtgagaccctcgccacttccctgtgactgtcccattcctgggacacagggtcagctggccaaaagatctcaaaaaagagacccagtcctgggggatgtcagggctgcgcaggccagtcctgtgggtgaggaggaagctgccaaggcccaggccagagaggccaaggagcagcaggatcaaagtggcacagaccagaggtgggtggtgggccagacacaggtgcaggttgtgccctgcctggcagttgcccatggggagcagagggggctgagcctccggggagagcctgccctcggggccggg

SEQ ID NO: 478858 - DNA, 1000 bp, Homo Sapiens; identical to SEQ ID NO: 346571

SEQ ID NO: 478859 - DNA, 1000 bp, Homo Sapiens; identical to SEQ ID NO: 346572

SEQ ID NO: 478860 - DNA, 1000 bp, Homo Sapiens
aataccaaacaggctttatttaattaaagagacagactggtgaaagacattttaatcaaaaatttcatatgcatacagtacatctgtatttaatactcggaaaggggaaaaatccctgatttattgtatttattttttaaatgtttgaataaagcaatagttctatttcctgtgatgaaaccctttatgttcctccttcatcttaaagctgtcaccgcgcggaacataaagaacaggccaagaccagtgcaggcatcgacgactttctccattcagagcctccgcgcatcccaaataaataaacacatcaaaacgtgcaaatacttccttaagttttcttggttccgatcgccctgtttaggcctcttgcgggtgttatttttcacaaaatgtcagtgaggaagtgaaactcaatcctaaaatttaaggggctcatcatggttttgaatgcgtgattttatgctgttgaaaatgggcagcctgttaaaatcagtatttcattcatagacatcttgatgaaaaggttttctgtaattgcactgaaatccaatcgttgttttagagcatgatttacataacattttcttcatcaagataccgtgtaaagccacagggctcattgcatataagtctggagggctggttggctgagcgtagtactgggaccagcagctcagaacatgttagaaacgcagatcttgagctctattccacacctgcacactcagaaactccagggaagagacccagcactctggttttaacaaaccttccggatgattctaaagcacaccagcacagcggcttaacacacacaaaaagccctaacaggtgttttcttgaaatgcttctccaaccataaccgatgggtgggaacaagacgtgtgttcaagaaacagaagatgagaaccaccgatttcaccgatttcaccgaaaggactgagctgtttctgaggacaggggggcagaccaggggctgcagggatgaaagcataaccca

SEQ ID NO: 478861 - DNA, 1000 bp, Homo Sapiens; identical to SEQ ID NO: 346573

SEQ ID NO: 478862 - DNA, 1000 bp, Homo Sapiens; identical to SEQ ID NO: 346574

SEQ ID NO: 478863 - DNA, 1000 bp, Homo Sapiens
gcaatactcaaaaggattttaatttcttctggtaatttctcaggagaaaacggaaaaaggacttctctggggtgacttcatcatagactgtgcttctcttttgaccacccacctcaattgccattttttcctgacattcactgtggaaatttggtgcacgacactgttaggggagatctgttggcaacagaatcgtgtacgctgcttgttctcatctggcctttcacaccttggcctggtattctttggcttattttgtcatgtctggggtttcatctgttctgggttcttgcctgaagctctggcagatgacagtgttcagctgagaaagtcctatccaactgcaacttccatgatgcaagaatttctcttgaataccagggtgaatggaaacccaagattcacgagacattgtagctattcattttgtcaccttgcttcagtatggcctaagtgtcctaaattaaaaattcatatagctagatccagtagacacttcaatgcatgtattacttggtctgttggcagtatttgataccattgagcacctctgtcttgaaacacttttctccttggctgtagatgatttgggagttactggcaaaacattttgaccttttcaaagtagaggggaacaggtgctctggaactggcacgtagctgcgagagggtggggatggcattccccttttctttccctgcaaataatcttggcctctcagtagactgttggaaatcaaaaggtagggggatatatgttctctttttcttttccttgatttatgaaggcaggaatagaaggtagcatgaaacatcatttgtaactggtgatggtcagattaacattccccgaatttgttgattatttcgtgttgtgttgaattccaatggctcctcggtcttctgcacgctgagctgctgggattggccgagaggccacagaacaccttggactctatgatcccagagagaggggagagtggagtccaggtggcaccca

SEQ ID NO: 478864 - DNA, 1000 bp, Homo Sapiens; identical to SEQ ID NO: 346575

SEQ ID NO: 478865 - DNA, 902 bp, Homo Sapiens
ttttaaaaaaaagacatttattcagcgtcatgatcagactattacatttagcaatcaacagcatgggtgcaaaaaaaaaacctatattaaaacccttagctggaatgctttacacttcccacagaacagaaactaaaataacctgttatacagttagtcacaaatacagtcctcgagttttttgcccatacacatgagtatttgtctaaaacatgtcttctttgtagcagctaggccctgccaccactgtgcttggctgagttcacaaatctgtcgtaacctgtagattccctgtcatttctctggctctcctctcctgctaagctttgtttcctaattaaaatctgccactgccatagctactgctgctgctggaaccgccaatagccaccttggtttcatggttttgcaaagtataggcctccattgccacaggggccagagcttctgcctccaaaatttcctcccttcatgggtccaaaatttgaagactcattgttgtaattgccaaaatcattgtagcttccaccacctccaaaattgcttccatcattaccaaatccattacagccatccccactgccaccatatccaccaccaccacgactgccaccaaagccaccaagaccactgaagtttcctccaataccaaagttgtcattcccactgaaaccacctccacgaccaccaccaaagtttccagaaccacttcgacctctttggctggatgaagcactagccatctcttgctttgacagggctttcctaacttcacagttgtggtcattcacagtatggtatttctgaatgacaatcttatcgacggagtcatggtcatcaaaagttacaaaggcaaagccccttttctagccactgactcggtcagtcatgatttcagtcac

SEQ ID NO: 478866 - DNA, 1000 bp, Homo Sapiens; identical to SEQ ID NO: 346576

SEQ ID NO: 478867 - DNA, 1000 bp, Homo Sapiens; identical to SEQ ID NO: 346577

SEQ ID NO: 478868 - DNA, 1000 bp, Homo Sapiens; identical to SEQ ID NO: 346578

SEQ ID NO: 478869 - DNA, 1000 bp, Homo Sapiens; identical to SEQ ID NO: 346579

SEQ ID NO: 478870 - DNA, 1000 bp, Homo Sapiens; identical to SEQ ID NO: 346580

SEQ ID NO: 478871 - DNA, 1000 bp, Homo Sapiens; identical to SEQ ID NO: 346581

SEQ ID NO: 478872 - DNA, 1000 bp, Homo Sapiens
gaagcagtattgattctttattgggagtacatttttttaggtctcttaaactttaatttcacacagtaaattttgaatctcataaggaagcatatttgaacctagtcaatttaatcttagtgttcccttgaaaactttttttccctacaaaattttaagtgaaaaatacaatagtaaattaagattacactggggaaaaaaatgcaggtatcactttactccattgttatctgacctagagcttaattaagttttagaaatatgtaataccttccatcattccatcatccttaaattctgttaccaaataatggctaatgttacaaaaagttatactccagagacccaaagcttgacatttacctaatgtatgagaaaatattaccaattaacaataaagaatgatcatatttttaacctcttttacatagcctaataactcagcaaggcctcaacgtctgtgctaatttaaactgccaaatattgactgcagcaaacaagaattatattcagaatttatgagggtactgttaggagtatactgcttacaggtttagatatagtctgttagaattaaaaccaagtttagtgttcatatttacctcatgggctttatcaagcccatattacctcagcttatatatagttaccatttttaggtttttaattgtttgacacttggatgataaatgcagtcattttattctcaagtgcttaaaattaatgtaattaaaagcttagctgactacagaataggtgagggtttcttaaaaatgagatttaagggctgggcacggtggctcatgcctgtaatcccagcactttgggaggccgaggtgggcggatcacttgaggttgggagttcatgaccagcttgaccaacatgaagaaaccctgtctctattaaaaatacaaaagtagccaggcatggtggcgcatgcgtgtaatcccagctacttgggaggctgaggcaggagaattgcttgaacctgggaggcag

SEQ ID NO: 478873 - DNA, 1000 bp, Homo Sapiens; identical to SEQ ID NO: 161451

SEQ ID NO: 478874 - DNA, 1000 bp, Homo Sapiens
ttgtggtgttattatatttattcatttatcaaaaacacatttagtagcaaaatgccaaaaccaaaaaaacaagactgtctttgtctacaacaaacaccacaacaaataattgccacctgggctaatgagtagaatgatggagacaggaggaaacatcgtggaagtgaggaacagagagcaagtgactcactgtgggtagcaatgggggtcaggaagagcttcccggagaaggcgatgcctaagctaaaactgccttggaagaagcagagttcaggaactggaggccagaaacgctgaagttcactctattcagctgggagaggaagatcagagtcacctggaggaggtatctggctttagagcccacagcttcagagctggactgctcatcaattagaaggtgccagtgatgcctcctgcggagtccctggcgcctgcttgtactgtagaaaccatttggttcttcagcacgaatctctgtgttcctggggctgcaagagcaagccagcctcagtcaccacagctgatccctctcaggtgcaagctgattgctgcctgactggaagtatgctgcgaagggtacggggtggtgggggtggaggcatgtcaagcctggagggggtgaggaggagctagacctcccacaaagcctcttgagcagttcttcagatagatgcggggacacagtgcccactaggttctatgtgggagagcactgaggtgtcagggcacatcagggatgtggtgtccaatactagacaccacagtccgatggtgagtagactcagcaccatcttacctgaggaataagagtttaactaggagcaacaaggaggataccgacagaggccccaggaggagcagcctcttgaatttcttgaatctcagggaagacagattaggctttcctgttctgcaccagaagggtagagctaagtcttcagatggaaactacggaaagggagatgtgggctgtcaacataaataattgtttgatcat

SEQ ID NO: 478875 - DNA, 1000 bp, Homo Sapiens; identical to SEQ ID NO: 161452

SEQ ID NO: 478876 - DNA, 1000 bp, Homo Sapiens; identical to SEQ ID NO: 346584

SEQ ID NO: 478877 - DNA, 1000 bp, Homo Sapiens; identical to SEQ ID NO: 346586

SEQ ID NO: 478878 - DNA, 1000 bp, Homo Sapiens
catccaaaaacatatttattttgttttcatttttgaaagatattttctctagatacagaaccctagattggcagtaattttctttcagcaatttcaatatgtcactctattgtctttggtttctattgcttctgttgaaaagtcagccatttgccttattattaatcttttgaaaatagatgtctttttcctctggctgttttgtcatttttcccttttttttgttttcaccaattttgctatgatgggctgggattattctgatagggtctgggccatacttttcaacattgtgctagatgtcctggggaaaaagtcttcagacttctggagtggattcatgagtgtgaatggggtgtagcccgccaacatcattttttcccaaggcacagaggctgtttctgtggctgggcacagctgagaggaccgtctcattgtactgggggattgatggctgatggagggaaggaacatcaggcagagtttgtcctgcttccctcgggctccctatatcatgttgatggggttgcaaccctggcctgcaggagtaggtctggcctgatggaggctgggacatctggaagccagtggcctctcagccagcccctggctctcacgcacactctccgggaagagccccaggtctcttcttcacccttcttcactccccctcaccctcctggtgggggttctctgaccccagccacacagatgggcagggaggcatctccaaaggccagacgcttagctgagaaatcatttctcagttcctgtgtggtcccttgctcttagcctttttctcctttgttcttagtcctgtttttgccctgatttttcagatgggcgccctggactgaggcaaactttaatattgcccctgggatcagacacacgctggccccctctctggctatgctggcctccctgtttggggcagcaggtaaggaagagctggctcagtccaggccagatgagaaggaaataaaagttttccttgtcc

SEQ ID NO: 478879 - DNA, 1000 bp, Homo Sapiens; identical to SEQ ID NO: 346587

SEQ ID NO: 478880 - DNA, 1000 bp, Homo Sapiens; identical to SEQ ID NO: 346588

SEQ ID NO: 478881 - DNA, 1000 bp, Homo Sapiens; identical to SEQ ID NO: 161453

SEQ ID NO: 478882 - DNA, 1000 bp, Homo Sapiens; identical to SEQ ID NO: 346590

SEQ ID NO: 478883 - DNA, 1000 bp, Homo Sapiens
gatgcaacattgcttttattgggggttaggaacatatgacaaagtcacataaaatgtcaacaaagtcacactttgtgcttggctgctctttaaaaaaaaaaaaaaaccctgtttatttatgaactcactcaatgagaactatgtgagatgtggccaacaattatcatgcttaaaacaggacggccagagccatgaggagattgaagtctgacaatgctagctagctaagtggaaatttaccattgtcaaatatcagatacttccacacatttagatgtttgtccataagtagacccagcttagctgactcctttgagaaagaattgtgtctcaaacctctgttattcagctggccatattattaatcattactaaatgccagccacatgcaaaggggatggaaaagaagaatgagatttgctcagttttagctttctgtggctgaagtatttttgagtcagttacatggatacatgaggattatagtaggaaatgactgaatatttttaaaaacataagtactatggaaacagtcatgtataaacattcgtgcagaagcacttacaaacatacactgtgcataaagttggttaagaagatgcttgttagaaatgatttatgtaggtgaactaagaatttgaaataacttaataccattgaagacatcatacacatacaactttggacattatgcattcttctggggatgaaccattgacaacttctggacttcattgctagctattttttacattgaggtgggaaaccaaagaagtgcagaacagaagcaatctactaggcacaaagctccctggttactgcccagatagactgtttccactcatcaaattgaagtgcatacttaatttaggaagggcagaccagtgcaaaagctactgatagtgaactggagggcccggtttccatcccttactctgccacactccaaagttcgatcttctgtaagtcactctaaatttatggcctttagatttattgc

SEQ ID NO: 478884 - DNA, 1000 bp, Homo Sapiens; identical to SEQ ID NO: 346591

SEQ ID NO: 478885 - DNA, 988 bp, Homo Sapiens
ttctagttatggtttttccattaatagttgaggctcccaagcttctctgggcttcaattttatcatctgaaactcaagaaaaccagactcggcaataaatgtaaaacccaagtccctcggccacatttgcaccatttcttttcagttcctgagcctgatggttgtcatcagtggtgggtctctgaagcagagtttcagtccttgtggctccagagactagcactctaaaggtggagttgacaggataaacttcccacctgatctcagaaagcaactgactttcttttcttctcctggaaccatctccctgactctttcttttagctacccttctctctttcctgtgcgtctttcttctttctgctgacttccttctccttcccagtctctgtctctttcttcggcaccaagtaccatctctgtttctgaggaagcagcagaggagcctatgtgatccagagaacttgttcttggcttctgctactagagaatttgtgaatttccgttgaacacgtggaagacctaggaagctagcgtccggcgcttggctttgtttcccggagtgggtggcactgtttggccgccacaggcacagcatcgcccctaggcatcgccctccgcacccggggatgcggcgtccccagccttgcctttcttgatggctaaagcaacagcgccaccttccggcctcaaggccaccgggcgtggccggacttgggagaccttgggcgccctggtggaaggacgcatgtgccaagcatccaatgcgtggcgcagacactagttctgaaggagctccagagatggggactcgggcactgagagatgcctgggcgagcaaggggagtttaatgtggactggagcacggcttggagcctcgggcatcagaccctgtgtccactgagaactgtggatgtggaatatgcccaggactgcattctcagccgtgcctgccagccgcacactggtgcccgcctgctgcaccat

SEQ ID NO: 478886 - DNA, 1000 bp, Homo Sapiens; identical to SEQ ID NO: 161454

SEQ ID NO: 478887 - DNA, 1000 bp, Homo Sapiens; identical to SEQ ID NO: 346592

SEQ ID NO: 478888 - DNA, 1000 bp, Homo Sapiens; identical to SEQ ID NO: 346593

SEQ ID NO: 478889 - DNA, 1000 bp, Homo Sapiens; identical to SEQ ID NO: 346595

SEQ ID NO: 478890 - DNA, 1000 bp, Homo Sapiens; identical to SEQ ID NO: 161457

SEQ ID NO: 478891 - DNA, 1000 bp, Homo Sapiens
acatgagaaggaggagaaagcaggaagaggaagggactatttgcagaagacggggagaaagaaaggaaagacactagtatgtgttgttcctcctcgaattttcctgaagtgaaaaaaaaacagtgaagtagagtgtttgatgaaatgaataaccaagcaaaacattttctacctacaccagtaccactaggagttgaaataaattcacacaatgtctgctgatatgtcaaaacaccttaccttcaaaaacatgacagttaccttttattttatagtatgcttgtgtttcttcctatttcttgcttttgaccttcaatgataaatgtaaactggattacagtgattcttttgtaagtaaaaggtgactttttaaaagaaacaaccaatggaaatagaaattttatttacttcaaattaactgtactttactcaaatagaaaagaataattttcacattatgaagctacacaattccaaaatacacatgctgaggctctttttaagtccgaattgtctagtaattacaaaaaagtgaagagtttacagatatacaaggaaataaaggcgaattattgcaaagaaaacaagtttaatttcactttgaatgacaacgatttttctggaaagcagatacttcactcctttaagtttccacccaagccacaataatttcaaacggtcttgcggatgacccagctggtcactcttgtttatgtggggactggaggtaatgagagccaaaaaaagtgctataaacctaatttggctagagcaagttcacacgacacgaccgtgctttaaaaacttgctctccattatgtacttccttccatcaggttggggaaaaaaaaatggtggggatggtgagtaaacacaccagtggtttcatcagaggggaactcactactcaggaggtgacggtgacgtggtgccggtccctgaagtacgcgcacaagctccggaggttgcgggagcattcatcgcccctggaccccgcagt

SEQ ID NO: 478892 - DNA, 1000 bp, Homo Sapiens; identical to SEQ ID NO: 246649

SEQ ID NO: 478893 - DNA, 1000 bp, Homo Sapiens; identical to SEQ ID NO: 346602

SEQ ID NO: 478894 - DNA, 1000 bp, Homo Sapiens
ttttcaggaggtaatcttcacagtccctttaataaaagagtggtacatgcagagaaagtgcctttcctgctttggctgtcttcccttcctggatctggatgctatcttgtgaggatgtgattctcagagctgcggcagccatcttgtcaccacgagaggaatccttgcctgtaattgacaagctagagccccaggagagctgatggtgcagttccagtctgagtccaaaggcctgagaaccaggaaagctgacagtgtaggttccactcaaaatgacaaggcacagctttttccaagggcaatggcagattccatcaaacttcaaaacttgcataaacttctaccctctcaactctatttctaggacccatctttccaacagacatacacgtgcacaaatacatatggagaagggtgtgcattgctccatctgtaagggcgcaatagaattaacttgccctgttcatgtcttgcaggtcaggaatccaggggcagcttagctgggtggttatggttcagtgtctcccatgccagaaatcatatggctggaaagctcctgctggcgatggcagatcctctccgtgtgggcctctccacgggaggctggagcctctgcacaacatggcagttggcttcacctgcagggagtgatccaaagtcagtggtttcctcactatagtcccttctgtggacgccagaaatatgttacaggaaagcagtcccagcacagaccccaagagacaattcttggatctcgcgtaagaaagaattcagggtgagtccagcactcctctttccccttcttaacagtatgcagcagaggagaatttataaacaacttccatccattctgagtcttttcctgagctcaggaatgtgcccacgggtccttctggtgttgacatcctgctgtgccattgctgtggtctgctggggcggctcccacccccagcccagaaggcaggatggctcacattcacccacatggggatacaggccc

SEQ ID NO: 478895 - DNA, 1000 bp, Homo Sapiens
acggtaaccatcgattattttcactcacaagtcagtgggtcagctgggcagttctgatcacctgagctgaggttggtggggtttgcatatatttctgtggtgaggctaggtggctctgctaatcttggtggggctttctcacacatctgggacaactgagctgattctgctcttattcacatagtctgtcattccgcccacaggtttattcacaggacagcaggagaactccaagagacaggccaaaatcattcagggtctcttgttcccaggctcagaaaaggtataatgttccttctgccacattctgttggtcaaagcaatcacaagactagcccaaatccaaggattgggaaatagacttcaacccttgatgagaggggctaacaagccatggcaaagagtgtggataccattgatgaggtccatcagtgcagtaaatctcccacaacaacgtaaaagttacaaagcaccatggactgaacagcaactgtatgcatataacaggatgctaaaatggaatatttgggtattggtttcagttgaggctccatgggccaaaaacaaaatgaaatgttcaaatacctgacatttccaaccttgcaaagggtctaaatggaaatagttttctgactcttggtccaacggccatctctgaaaaggctgaagttggaaactggggagaggatttttctggagaaagtagtccagtatgaagttagtctcagtccccttggaagaggagagaggcaatgactcctgaccacagccttgcctggtgagaggaacttacaggaaatatctctagtttgctgtgaattccctgaagtctggggagactggcatctgattgagaccctgatccaggtgccaaggatgcatgagcttcccatgagtcaagcagatgtgcagaaactggaatggaggtgtcttagaagcatcccacctgaaaggagtagaaagaggtactcacagctaccacctggcatgggatctggga

SEQ ID NO: 478896 - DNA, 1000 bp, Homo Sapiens; identical to SEQ ID NO: 346603

SEQ ID NO: 478897 - DNA, 1000 bp, Homo Sapiens
tgttactcctttccttgaaaggtgaagtttatttgatcttcccttgaattatagttaacattattaaggctccgatgatagaatatagcagaaatcatgttctgatagcccctaaaagatactgcaaggacactgtcatcttctaatacttctttgttgaaatacatactcttgaaatgctcctatttggagttgagtcacttaatgaagttgcattctctctttcttgatctttccaactctggaagccttgagagttctttgatgtcttttaaaatgtcactctttggtgtttttggtcagatatttttgctgttctcaatagtacagatagtttggtataaactggtgcattcctgttattgaacatcagaatggttgcttcattcacaaagatttgaccaagggtcttctctgtaaaaccaccaggtccttgacccatcgccatagctgactgagttagcggtgaaggcattttgtccaagcaaggtccatcaagttctcttctccaccgccatcttatggaaaatatcttctcattttctggttttggaagtgaaaaacagacaacaaacaaaaaccctgagacctaaagagtccacagtccatggtctcttgggtagcaagcagcagagctgggatctgaatccacatctatctgacttgggaatccacatgggcaacctctacttttcactgctcccctgtggaaagagggcctttcgggctataacaacgtgtagtgtcatcttcttagcatgtgggttgtcctttccaaaggaataaagttgtttttattcatgtctcagcatcccataaagtttcttttagaaatctgtgctgattactcagaatcaatagtaagcctggtggcatgtctcaatccttacaagagccaagagaggtggatgctgtagagatgagaatggtgtggctcagcaaggctgaggagtgggtgcagcctctgtggtgtagacctccttagaccttcttcagcacc

SEQ ID NO: 478898 - DNA, 1000 bp, Homo Sapiens; identical to SEQ ID NO: 346604

SEQ ID NO: 478899 - DNA, 1000 bp, Homo Sapiens; identical to SEQ ID NO: 346605

SEQ ID NO: 478900 - DNA, 1000 bp, Homo Sapiens
cttaatagaattccttcaattacacgtatgttttcagcagccgggccaatcctcctcctcacaggggtgaggtcagcaaacccaggaagctctcagagccaagaaagcctcagatccaggaggaagtagttatggatgcccatagctgaagtgctctgtgtccactggaagtaaaaggagcaggttcctgccgaagaatgtacagacgacgtgaaatcatgtgtggctacactgaagctaaaggctgccagccaaccatagccagttggggatataaacctctaaaaaccaaaactggggaaaaatggctccccattttctgaggtactcttggagcacaagctgaatgaaaaccaatcatcattgccctgcctagcatgaagcagaatgaaaagaaggcagataatatttcctcccctgaaccactcatccatatctgctctattcagatatttgtgcctaggcaactgcacccacccctctcagcatttacccacagatcctcaaaaccaagccctagcacaatcgactccagtgaaaattaaaaaagctatcccaaacatctccaagcttctttcctctgcaacttccctccttcttcttcatcaccagttataccaccaaagtatctacaactgctcagatgcaggcaaactaccctgaaagtgctcacatgtatttcttccttcccttgagggtgatattctacagtaattccattatgtttacaaatagaaaagttatttcaatacatctgtatattatatatatgtatatatatacacacatagcttttatatcactgacacagtgttacatgcaataaagagaggaattatttatatcagtacaatttccaaattagtaattgctcgcattgaattaggtactgtacaaatggattacaatgcaaatatataagctatatacaagcttataattttgaaaatattcaaacttgggacatttacgggtatgttttgagatgtgcctatacctg

SEQ ID NO: 478901 - DNA, 1000 bp, Homo Sapiens
taaaatagaaggggcagtatattcattatctatatttgtataacaaattaccacatatttagtggcttaaaacatcacagtttctgtgactcgggagcctggcacgttttaactgggtcctccactgagggtctcataaggcttaaaatcaagatattggcatcctctcttggagcctcagctagggagaaatcttgtttccaagtaccattggttgttggcagttgtaggacttgtggttgtaggactgaggtctggttttcttgttggctttcagcagggaactactcccagctcagagaggtcgctcttgggtccttgccatgtggctccctccggttcagcaatggagaagagtcctttcagtggatccctctctcgatttgaatctctttgacttctgcaaccagcaggagaaaactctctggttttaagaggcccgtgtgactaggttaggctaacctgggtaatcttcctttcttactgtcaactgatgagcaaacttaattccacctgccatcttagaattctacctaccacaggcagacttttgggtaatgatgctgaacaaggagcagttttggatgcctcgttttgaatagatgttgacacttaatggatatcttgtgggtttccaggccacagtctgcactgcttctccaacattatcgtgaggctggccatatttggctgttatctctgctgggtgtttgatcaccatgactctgcatgtgtcagacatttccagattggctggacaggatgagggccaattcagttcagggtgatatttacattccatctgtacgaattctattcagaatcccattcaaggtgccagttctttaaatccataagtggcacaaactgttgtcaaattcctgtatgtatagagaagtttctaaatacaatgatatgtttcttctaccatacagggtcctgcagatctttgagcgttaagacaaaacctttgtcctgaaagacttcgtgagctggtcct

SEQ ID NO: 478902 - DNA, 1000 bp, Homo Sapiens
tcatttgttctttcttccaatgggatttctgagggtagaagactgtgtccacagaagctgacaacctgttctaggcaaattttgctccataaaactcataatcctcataatcctcaggtgagtagatgagtactgttcatctgggcttgggtggaaagaggctgatgaggatttgggggaaatcaaggggctctccctggcattgcatgaagtcgcagaaccagtggcaaaagtccaactttggagacaattacttctcgggtgggagccccagccctgcctcttgcctgcgatgtcgccaatctgactgcgcttgctggagacgggaaatgtggcacggcactgcatcccccaacacgtgtagaaacttagagaatgccagttattaaaataacccttatgataacaccaattcgatgcagaagtcttttaaatatcataagcctcgtcgttttattccacatggttttctaggtaaccaaattctaggaggtgcgttgcagggccatcttcgcatcccggccatgcccagcaggacggtgttctctaaacggcgctgatgcccgatttcgaccccgaggagactgcggacctcgactgcggcccccaccagggccggtccgccctcactccaccctctgaggctggggcggagtcgaccggccggccccgagaccccttgccttaccggtggagcaaggaaccggaagccgcggctcttacataaccgggatgatgtcagggcgggcgactcccggggggcgggaccagggcggaggccgcgccgggagcgcggtggggctaggcgtggggcgctcccggcatgtccctgtaccgcagcgtcgtgtggttcgccaaggggctgcgcgagtacaccaagtaaggcggcgcggcggggcgcggggccccgggctgtcacgtggcccgcctcggcgcgggcgagcagggttggcggggacgcgcccgcggctccttcgccctctcgctgggccgactaagc

SEQ ID NO: 478903 - DNA, 1000 bp, Homo Sapiens
caaagcagaagattttaatgtattgttattcttgaggataaatctttcaggatattaccttccagaatttctgatgtaacaggaaagagtaagatcagtatctgaagcagtttccacagataagactagatcattatattttttaaagatatgtacatggacatcagcttgttctgggctctcgcatatatctactacagtgtcagacacctaccaagtgcttaataagtatgaattcttagcttttccttcagggttttgggtaagcctttgcaattcccaagtcgaaagtcagcaaaacgttatatatcaaacaaaagaaaccacctcacctacaacaatgggcctgagactcagcaggatgagaaatatctttttatgaatacagtttttaaaatatggagccaccccacataataaacagcaggacaggtcaagtattagacacaatgaatgacaatgggtggcttgggcgtgtcttctgaacacagtgggccatagccatggtcctcatttctttctaattggcacatgtgacatctggacctctctattagcctgaagtcacagcactttgtgcaggaaccacagatttaaagagaccttggtatgtattcataaggctgaaatgaagatcacatctgcgcaactccaccagccctttcctcaaagtctctccaggatcgatgattaaggaaagcaagatgattgacaggtagtactacaaggattagcaaattgcagctcccttctcaccaccccactgtctgtccatctctggtatccattcctgcctctcacctcccaactaccaggctccgtgtttcttcccctagacaagatgatgaaagcaagagatcaggtattcaaaattgccatgaaggctctctcttccttgccatgccatccctggcatcttgtcagttggcttccaagtttcagcattcactctgtaaaatgaattaatttatgtgaaatttgctgatagatgcaggatcag

SEQ ID NO: 478904 - DNA, 1000 bp, Homo Sapiens; identical to SEQ ID NO: 161458

SEQ ID NO: 478905 - DNA, 1000 bp, Homo Sapiens
ggtgtggggtgatttaatcaaagggtgcatgttcagggtgctggtaactggagacttttgcaatccccgccttgccagcccatgttggggggaccctcaggaattagggtgccccacagccatgtgcccgcaatctgagctacgtaagctctgggtagacccggctgattttcccaagcctctcagccaatcggctgcctcatcaagtgtacaatgtagatttggatgaattttctgacattttccctgcgagttacatgaacaatacaggcattcccattcatgatgtatgtaaatggcccatcctcatctcccaaatgtcacttctcactgggtgtctggggaatcgcctcttttctggtctgtccagattccttatctcaccccgtgcagatcctcttgatcctcctgtgctccacactaatcttgtcttaagctggtctgtgcagggatattgcttccctgtgtcagggaccttgttgctatctgcataaaattcttggcctctccatctgaagaaaagtcacttccttcaccccgattgactggcatagcagaagctgagacctttactgcaagaacagcatcctcggctcccagtggaccttccatgacctgtcttgaaatgcccagaaagccaagctgaagagccgtggagagtccaagctgccctggcccctgcagccgggactggggattcctgtcttgcgctggtgcaatcatgcattcgtagcttggggaggctgagcttcaagccttctctgattctgcttcacctggcttctgtgggccaagagtccagagaggcctagatgggtagttccagcttggtgtccttcagtcacaatgtcagcaggctgcatcatctgaaagcttgactgtggcaggaggaccagacccccatgaccccttccacctccagtgcttgccatgttgacctctccgtgggctccctgggcatcttcgtgacaaggtgaaagtctcggtgccttttagggcc

SEQ ID NO: 478906 - DNA, 1000 bp, Homo Sapiens
tccaaaatgtaaactactatatttatcttttaaagaaagttcaagttccaagatctgtaaatgatgtgggcttttatgatggtgattgtcttgtttttccagcatgagcagtcacatgattcttaaccccacagttagggggcggacggacactcatgcgtgcatgcatatatggagatggtgtggattttctgaaaatgaagaaaaaatgctaaaagtcatgaaagaaagggcttccactggctctgcatccttaagtgacgattgattgagaagtcagcctcttgttttctatgcccacatccctgcaagctgaaagtcagaacaactctgcagagaatcccattgaataagcttcttcccggccattgctggccttgcttgggggctgagccatggctgcctctggatgtaccatcagcctgggtgataaaagggccaggcacctggggacgccgctcatcctgggcaatggagagctgcaaacatggttcattctggaaacattctttgtcctgagcagcagggcttctctgcattcacctgctgaaaactggattcttctcctgcagccaaacacactgtgtgctccacgtgctcatgtgtgcatgcctgtccatcatcaccttgtcttgattgtgaatcctgcccggtgtgtgctctcgcttccctggagcactcggtatgttgctcgtgggccttcttcgaggccgcccacatcgtggtgggttacaggagaagggagccgtgtggatactaggtcttcaggtgcccttggatctgaagttccccaggcaccgatgttgctgtggtgtccgcctcagagcagccttccctgccaagttcagctcacaggaacactggactcgggctgcacaggcacacgccctggcagaagctgatgtgggagaagaactccaaccacgaagggaggctgaccaatggcaccagcttctgagcttggcctgaagaggactcatgagctaaaaaacgtttttct

SEQ ID NO: 478907 - DNA, 906 bp, Homo Sapiens; identical to SEQ ID NO: 161459

SEQ ID NO: 478908 - DNA, 1000 bp, Homo Sapiens
aactttactcataaaattttatttgaacaaaacaatttttgaaaatataaaaatttcataagaactgctttcctgttagatacaaaatttattttaaaaataaataattatattgacctttaccatcacttgtctaaattttactcatgtttattgtgaagacacagaggtgaattagaagagtatatcattatacattgtcaaataaagcgaaggtttccttatccaaatagagagaatatatatgtgattacttaatataaagcaaaagctatttctaccaaagaacagacatgcagttattgatctggaattggcatgattacaaactactctgcaattcttcctctccccaattaaggtgtctctcttgaactgattgaaagctgtttgataagtatacttttttcaagatggtgtgctcagttgggggtctttttattaaactgaaattctgtcattagctctgactagcaccagctgctgtataaattctgtgttgacgtagacctccattggtgttccaaatattgcagatgaatctctctctgcctccaaaatcctcagtcatgcagtatgaataattaacatcttggcctcggatgaactcctgctttgtgacagcgtcgtgggatgcagcagggctgtatggactgttcctggacttggcacgcaaacagcgacacaggtgggtatccgcttttccctctccctcaggcacaaagtggtagattctgatactgggttttcaaatcctgataattggagccattcagtcagtctctgtgcctgatcctgaagaaaaagaacctggtccctaatgagttggaagtcagaaaacccggctctcatttcctcttatctggatcgcctgagaagagactcgcgctaccttttgtgcactcgcgcctcgagatagcccctcactgacgcctggacgcggtgagcgcgctgaaggctgtgcggcctctaaagtctcagaattcctccctgcggcctc

SEQ ID NO: 478909 - DNA, 1000 bp, Homo Sapiens; identical to SEQ ID NO: 346609

SEQ ID NO: 478910 - DNA, 1000 bp, Homo Sapiens
ttgtgcctcagtgatttttaacatttaatcccttctattttttagcacagaataatattctgacaaatcaagtgaatgcaaagatccaagatccgttttcttgaataggatttttatctcccacattttctgaatggtttccattgcttctccttgcaaaaatcttctttaaaacaaagcaatcctctgagtttaagatgaaatctctcagtattaaatgctaatttattagatggttataaaactgcaataccgtcaactccagcaataatgaatccccatggtctctcatttcacacagaacttgacatataatcttaaacactgtcactctgagcttgattcaggtcaagaaagactgtggatgtttcacctgtccaactcagcttcagagagttagagctatgtccaccctgcagagacatgaggcatcgttcatttcaaggtgttgaaatgcattcaggagggggaaagtccatgaatctgccagtgaagatgttaacactgcaatgttatattaagtcctctggtgtcagatcacactccctcctatgaccaagaaacgtcacaccttctcccagcaagacgatggtggcccttggcctcccggtgcagagtgtcagtcccgcactgggagcgtggagaggtgtgtgggaagcaagcctttcttgaagtggggccaagagagagaagtcagcagctccttagccctcacgcttccaaggaacagagaatgatggagaagcctgagtcctgaagaagagcacatctttgatgccttccacgcttcatttaaaaatgcctttgagggggttcccgtgttcattccttttcagaggaagaaaccctaagagtgcagttaatggaggtggatctttaagcataagacagaccacattcgccatcagagggtccacaccggacagaagcccttcaagtgttagcagtgagggaaggcctttcggcacagctttgatgtcaccaaacaccagaggactga

SEQ ID NO: 478911 - DNA, 1000 bp, Homo Sapiens; identical to SEQ ID NO: 346610

SEQ ID NO: 478912 - DNA, 1000 bp, Homo Sapiens
ttccggtagtacttcatttattggtttagtaattctcagcaaacacaatgagttggtgacttagacatagagaaatcagtaagctatttgacctcccattgctcctatcaaataaattaagaatgtatttttaatctcccacctcatgcgattcctaagagtctggtactttctggaaagtccttttggaagtcctttctgaaacacgcagtgtttggcaaagaccaagtcatttattccaatttagaatgaaaataggaagtcagagagaggattatggtcataaacaatatttggggaatgggcagtgggtctagaaacttagaattctacttcaatcattacgtttatggctcccctacataaaaccactgtcccaaccaaaagcaggcagcccgtggttttgtggatggccaggttgtagactgcatgagagcaggaagtcttttctttactctgctcactgatagagctgtgggggccaagagagagctttccctttggccctctgaaagtttgtggaaaaatcaactcacaaaaggcagactagagaaaaggcatgcaaatttctttaatgtgtatacacaggagccttcagaatgaagactcaaggataacagaggaactgtccatttttatgcttaggttcaacaaagtctggacaattgtgtcgaaatatgattgggcagaaagggtaacatctaatgctagctatagactgagctgggaagcccagcaaggcctgtttagattcttcttggcttctctgagaatgcatttcctccttctctggaatggcagcctaatgacctaaacaaggtaagtcagataatttctttatggccagtttttacatagaaaggcagagggaaagttagagtaaggcttttttaggttttatggctggctttggggaaagggggttctggtttctatgacctgccttgcgggagaaaggaactgagggataagagagcaggagaaggtcagagataaatgt

SEQ ID NO: 478913 - DNA, 1000 bp, Homo Sapiens
aaaaccttgttagttttattgttggatcaaataattaactcagcatccagataaaagcaggaaatagacaagggacttaacagaatgacctgggcctcctccaggtacaggaaaccacaagtctgagcttgcagctacagctccaaaagttgggagatttgcagaggcacaatgaaatagggttgatgtccaggtcttctcactgctgggatcccagtccaggacctgcctctgccccactgtggggtcttctagcccatgttctgcagggatcgtttatgctccaggaatgaccctgggtgctgcctcctctagaggcttgatccgattcagatttgatttttcagcaggtgttgtggtcttccgtcagaaggaacatcatatccggccatgtatctttttatgatgttagttatcattggtggatcactgcctggattcattgtcctctaaatggtgataaaccggccacggtgatggacaagtggcatattcagttaacggactcactgtgccctccctccttccccatccccggcagtattgtgggcgaggcttgacctactctgtgatggggttggaggcaacacttcctgcccacttctcccctcttcctccccactccacatccgtgtgggaaagcttatcattaagggaaggctggcaaattagaaagagccttgagtctgggcctagccctgcagatgccagcctcagaggttgctaggatacaccgctcccagagcctcctcagagctgcatccttctggagcagctcagggacactgatgggctgtctgtgcagtggggaggtgggaggaggagtggcaccccacagacaggcctgcaaagaaggggttggtccgcactcctcccggagctccatggagcagggaaaatgtcaccccagaagcacctgtatacagggatcaattcggaccgcccacagtgaaggccactctgaattgtaaaagttccccagtcttattcttcactgtac

SEQ ID NO: 478914 - DNA, 1000 bp, Homo Sapiens; identical to SEQ ID NO: 346612

SEQ ID NO: 478915 - DNA, 1000 bp, Homo Sapiens; identical to SEQ ID NO: 346613

SEQ ID NO: 478916 - DNA, 1000 bp, Homo Sapiens; identical to SEQ ID NO: 346614

SEQ ID NO: 478917 - DNA, 1000 bp, Homo Sapiens
aatttcttcaaagcaacttgaacttttaataaataatcataataagttacagcaaccatttattctctgctatatgctagatattttacttgacttatttttaatctttactgtaacacatctaggcaaaatattaatatacctattttacaaaaaaggaaacacactcagcaatttttagggacccaggagccagaattccatttcttccaatttccttcaatgtgttcacgatgtatcaagtaactcgttcatttagtcaagcaaccattttagctgatttagtcaccgattcaactaataacatttactcattgtcttagatttgggaggcatagcttgatagctgcaaggattatgttaaatgtcagtgaaataatggaatgtggattggctcatttcatcttaaagatcctgctcacagggcaccaaacattaaactagttttaataattaaattgatagacatttcctggagcaagaagctgtggctacattctgtaagtttgttgggtaatacaaaacattgtgtgggtgtgcaaaaatcaagcacacactgctaatgaaatcattatgatcaaggctgaagaggcttcacaaaagaaaaacaaagcgtcgttgagttactgatctgtccaagaacaggattgaaccaaagtggggtgaccattctgtgaccttacttactgtaccttttgttgaccacgagtagatagaccaaaaagctaccctgtgttgaagatgacattccttgtccccatttcctaatggcaaaatttttcactcaagtcatagaacaagaagtctaatgttaccatttaggaatggcatatctctttaagcccttctcagtggcttttatggcaatgaagaaaccaaacagcacattttccttgccatcttacacgctgtttttagtctttatctggcagcatgcctagagtataagggtttgtctctagatagatctttaagtctttctccttgccatttaccatca

SEQ ID NO: 478918 - DNA, 1000 bp, Homo Sapiens; identical to SEQ ID NO: 346615

SEQ ID NO: 478919 - DNA, 1000 bp, Homo Sapiens; identical to SEQ ID NO: 346616

SEQ ID NO: 478920 - DNA, 1000 bp, Homo Sapiens; identical to SEQ ID NO: 346617

SEQ ID NO: 478921 - DNA, 1000 bp, Homo Sapiens
ttcacattttgaatgcgcaacattgtatctgtgaatgaaggcaagagttaacagctgtttaattgataactgctcgcatcattagttgctggctaacaactgggaaatcagaaaatgtcttgtagaaaaatgtaagaaaagttccaacaatactgacttaaacacgacaaaggtgaaaacagaaatgctgactcctgcataggttatcggccctaatgttctgacttgatatttccagatgcccagctctgcgctaatatcaacaccgtctatttactttctactctgaggcattcgctctgcaggattccagaccctactaaattattcacatggccccaaccggtccttccttgttccgcggtcctaacacaatgaatggtcctaagaggaaaacggcctcgcgctcccgctccaggcccacttcgcagtccctagttctccctactgccgctccagtgccagagcccctccgaaggcggccaggacctccaaccacgcacaagtctgcagctctccccaactttccgttcagctcagtctccgagggtgcgccagagcagacacccggaggagtggggagtggcagggcggggccgggagaatgctgccccggaacccataaatctgggccctgcccaggtaggccgggacagctggggtggcctgggccgagagccaagaaaagacaccccatctggcagcccaacttggcggcaacaggtggcccggcgcccgggggtctgggaggaaagtcgctccgggggcgggccccgttgccccgccgcgtccccattggtcatcaggtttcttaaaatgtgactctgaatctgtgtccttccgccgcagaatttagtcccaccgaaagggcaacctgcccgcgcgttccgccgccgccgccgcgcttcctcctgaaggtgactgcgcccgcggggacgcagggggcggggcccgggtcgcccggagccgggattgggcagagggcggggcggcggaggga

SEQ ID NO: 478922 - DNA, 1000 bp, Homo Sapiens; identical to SEQ ID NO: 346618

SEQ ID NO: 478923 - DNA, 1000 bp, Homo Sapiens; identical to SEQ ID NO: 346619

SEQ ID NO: 478924 - DNA, 1000 bp, Homo Sapiens; identical to SEQ ID NO: 346620

SEQ ID NO: 478925 - DNA, 1000 bp, Homo Sapiens; identical to SEQ ID NO: 346621

SEQ ID NO: 478926 - DNA, 1000 bp, Homo Sapiens; identical to SEQ ID NO: 346622

SEQ ID NO: 478927 - DNA, 1000 bp, Homo Sapiens; identical to SEQ ID NO: 161460

SEQ ID NO: 478928 - DNA, 1000 bp, Homo Sapiens
cttttttttcttttgcctttcaacacctggggcctgccaagcccacttcaaggaaaggggctgcattttaagttagccctgttttctggaactggtgggaacgtcttcatttttcagatttccgcctgtggttacctcgcgaggcttctcagccaggccctgcgtgtcccctctcccactgcatcccagctccccctggctggattcctcagcgcatctgctgtgggctgggtgcccaatcattttccattaatgcctctggacagagaggcctacacagctgcacagcttgtgacgcaacgtacccgacacatatactccctgcttgtccccggccaaccctggccagagagccatcggaaactggtgtttactgggaagtgatttgactctgtaacacggtgaccacaagccccattccactggccgacacggtcccaaatatttccttctctcatgagcttcccatccccctgccccgacagttgctgtttagaaaagtgcggctcaggaaggggaggagaaagtggcagcctcataatctgggaacgaaagagtctttgcacactgtcattagaggtctgtacatattgggcaaaatgtttatagttgctctcttgaaaagtgagttataactccttacatttacccaagtcatcgctttcaggatctgactctcgtttcttagaaggcattacatcgctttaatatgcaacagtctaacataacattaaatcatttttaaaagtttcatctagttgagcctgagccaaggtattcttgggttgggtttgcacatccacccttttgttttttatatagttaaaaagaaacacacggcaaaatacctatcaagtgatctcacccttgctggtgtccaagagtgatatcttggctaagtgggtctctttgatttctaggggccccaaaagatggcttcattttcaagaccagcaagtgttctatgtgtgcccaccacacacaccagactgcagtgtgc

SEQ ID NO: 478929 - DNA, 1000 bp, Homo Sapiens; identical to SEQ ID NO: 346624

SEQ ID NO: 478930 - DNA, 1000 bp, Homo Sapiens; identical to SEQ ID NO: 346626

SEQ ID NO: 478931 - DNA, 1000 bp, Homo Sapiens; identical to SEQ ID NO: 346628

SEQ ID NO: 478932 - DNA, 1000 bp, Homo Sapiens
tttttttcttgacgctttgatcttgaaatgctggtgttcccagcgttttctattcttttatctctccacacaccagggaagcacatgcttcacaaaaggggacggtctctcccaagttctgaacaagtgctgccatgggggaaggctggcccactgtcgtcagacttccccacttttccagagcagtcagctacagtagggttttatgtgaaatgtcccaagtttatttatttatttttgagacagagtctggctctgtcacacaggctggagtgcagtgatgcaatctcagctcactgcaacctcttcctccttggctcaagctgtcctcccacctcagcctcttgagtagctgggaccacaggtgttcaccaccatgcctggctaatttttgcgtgtgtgtgtgtgtgtgtgtgtgtgtgcgcgcgcgcgtatatattttttttgtagagatgggggcctcaccatgttggccatggctgatctcaaacttctgagctcaagccatcctcccagctgggcctcccaaagtgttggaattacaggaatgagccatcatgcccagtcaaagattgaaaaccccaactttaaatattgataatgaatagaaaatttcacaaaaccatgtagggcaaacaaaacacaaatattactccttagggctttatttcccctcttatttgactacctattaggcagtttataaagaacttattagtggtgttagttcacacttattgagggcttacaatgtgccagagacactcttctaagtagtttacgtttactcttcctttaatcttcagaataacattatcaacaaagtgttattattaaacctgctttatagatgagcaaactgaagctgaaaacttgagctcagtcatcccttagtatctgtgagggattggtaccttagtccccatggataccaaaattctcgatgctcaagtcccttatgtaaaatcaaaaccacctttgtaaaaagcataactgagaa

SEQ ID NO: 478933 - DNA, 1000 bp, Homo Sapiens; identical to SEQ ID NO: 346629

SEQ ID NO: 478934 - DNA, 1000 bp, Homo Sapiens
cagagttaaacttttctttttattcagaaggttggaaacactctttttgaacaaactacaaggggacattctgaagcccattgaaacacatagttaaaaagggaatatctcataatgaaacctagaaagaagatatccttgaaaatactttgtgatatgttgattcatctcgcagagttaaaactttgttttgattcagcaggttggaaacactcttcttgtgaatctacgaagggcgatttttgagctcattgaagcctatagtggaaaaccaaatattctgcagtaaactccagaaacaagctatctgttaaaattctctgcaatgtgtggattcatctcatagaggtaaacctttgttctgattaagcaggttggaaactgtcttcttgtagaatctacaaagggacatttctgagctcattgaggcctatattaagaaactgattatctagtgatgaaaactagaagcaagctacctctaacaatgttttgtgacatttggatttctctcacagagttaaaacattgctttgattcagcaggttgtaaacaatctttttgtaatatctaagggaactttcagagcccattgaggcccatagtaagaaaaccaaacattccacgatagaaactagaaacaaggtatctgtgaaaccgctttgtgatgtgtggatttatctcagaattaaacctttgttttgattcagcaggttggaaacactctttttgtagcatctacgaatggatgttttggagctaattgaaacctatagtgaaaaactgaatattccatgataaaacctagaaacaaactatctgtgaaaacactttccaatgtgtggattcatatcacagagttaaacctttgttttcattcagcatgttagaaacactgtttttgtaaaatctatgaatggacattttggagctaattggggctatagtgaaaaaatgaatatcccgtgataaaaactagaaaaaagctatatgtgaaaat

SEQ ID NO: 478935 - DNA, 1000 bp, Homo Sapiens; identical to SEQ ID NO: 161461

SEQ ID NO: 478936 - DNA, 1000 bp, Homo Sapiens
caaccttaactatggcaatacatttgtgctttaactgttacatagcagtatcaccacttaccaggatccaaatcgaaataataaaagctgtctccatagtttaaaatcgaatagtgccatcatcacagtatattagtcaaatagaagcttcatcagaaatgtatcccacatagagttttaagacttggattctcttctgcccttgttaatctccaactaattactacagattgacacgtttttaattagctgtcctttgtaagaagtcaggaaatctgatgctgtgtccaaaattatgcactgtttgttgaagtagaaccagaaatcctgacctcctgttaaatgacatcagtttccccctctgagcaacagactgcttgtcttgctaggagaggaggatggggggctgagcactcaggctgtccattgaaaccccttgtccatgaatagggtcatactcctaagactgatggggtgttgatcttctaggacatcacttgtttattcagtgccccaaacacagatttctcttctagcactttagagttgatccttgaagtctctcctggttcattcaaatacaagctgtgtgagtctggtggttttctgtgattggtctaatgtgagctctttgaacagacagatctgacagtgaatgactctcccctgcttctggcataactgctttgcctctgtctagtgtccaagcatcttagctgttcaagaggagagggcagcataacttcctgaccaccggtgtcagatatcagagcattctggactcctgagaggcagtggcctcttgagtgaacaggggaggccagtagatgccccagatccagagccgtggctgcaaatccagcaggaataaggagggacaaccacagcctcctcatccatgtgtcatttccaagggtttgccttgtgtctcagctcattctgggcagcacgtttgtcttctgtccctagagatttgaaggattttggactcttgtgaatg

SEQ ID NO: 478937 - DNA, 1000 bp, Homo Sapiens; identical to SEQ ID NO: 161462

SEQ ID NO: 478938 - DNA, 1000 bp, Homo Sapiens; identical to SEQ ID NO: 346633

SEQ ID NO: 478939 - DNA, 1000 bp, Homo Sapiens; identical to SEQ ID NO: 161463

SEQ ID NO: 478940 - DNA, 1000 bp, Homo Sapiens; identical to SEQ ID NO: 346634

SEQ ID NO: 478941 - DNA, 1000 bp, Homo Sapiens
gagacagagtctcgctctgtcgccccggctagagtgcagtggcacgatcccagctcacaggttcaagccattctcctgcctcagtctcccaagtagctgagattacaagcgacaccaccgcgcctgactaatttttgtatttttagtagagacggggtttcgccatgttggccaggctggtctcgaactcctgacctcaggtgatctgcctgccttggcctcccacagtgctgggattccaggcgtgcgccggcacagccagcctgttgttgttgttttttttaacctgtcttcccaacattaaaagcctgttgaagaaaaagggtatgttttccacattgaattcctaattgggaaaaaaaatactaaaaaaagagaaaagggtatgtttgggaccagcacatacagcagatgaaaaccagcttcttttccagagcgaggtgacttcctgctcttgcttttcgccccttggtacgtccttgaaatcaatggccatcacttaccagaacgcagggagcgagtgctgtgttggcatcggccaagcttcaaatagtaattttcagccagactttgttttttcctgttgcctaattaaagacactgaaaagctgttctcccctcctgctgccttgttctaggacagcaaactgaattcaggaacaatacagacggagccggatgtggcccaggagcagatgcgcgggacctaacacggtgttgccccgtgcagcttagggaggaaatgcaatgtatgagaggacacacgtctgggaaccctgcacactgggaagcgtagtaccagcagggccctgagcgagggcacacgctgttgacggtgccgttgccctgggcaggcccatgtgttgtgcgcgctgtgggtggctgtgcacacaggcccgcaggttcaggagtagcactgagcagggggctgtgagctcaaaggatctttccagtttgccccgaagcagctgaatgagagaagtgggcacttggctacacc

SEQ ID NO: 478942 - DNA, 1000 bp, Homo Sapiens
taacgctgattattattatattcataataacgcttgtgttttgtcaaagcccttattcgagtgctgtaagtggcctggaaggtgatgttccccaaatttgccaacatgcaatgcaatggtaaccatgatggttggagtggttttcacaggtgggcaaaacaactctgccatggtcaggtgaacagaacccctgagacctgggatggcagaggggacagacatgaacagaatccgtctctgccctgaggctgctcacgtcgaacccacagcccagagtggccgaggtgcctgtattttcctcagcagcaggagccgtggtttgcgctgtggctctgccacgtgccgcgtggttaatccagtttgcttcactgcaccagggtggaatctgagtgtcttaataactgaaaggtgctgccctgttgaacattctgtgggttccaaagcgagtggagcgggaggcatggttggcttcttcctcgctggcctcgttttttgacaaacaacggcaggttccccgcggggtctctggcccagcttctcagcacgtctctgttctaactgaatttgattttctttttttttttcagtctcgtgctagtgacggaggggaatgagactgtgatctccctcatgacactaattaatatccttcatccaaggtggtgacactgtactttggggctgaagtctgaaacttaaccaatggcagttctggtccagcctggagatgctaagtgacagcttgttaccttcagcttcatttattaacatcagctgaataaacaaatcccggtaggagcagagccccgctgcccaggaacccctcccactggttctcaaaactctctggtgattggaattgaagccatcttgagtaagaaggtcccactggaccttgtccctccagtgaaggctgcccggatgcctcagagagcacagccttcttagcttcattcttccggagtgcttttccttatttggtgctttctagggagtaggc

SEQ ID NO: 478943 - DNA, 1000 bp, Homo Sapiens
tttgctgcctcctctgaagatgtgattgtccccatgccctaccccaccccgggctcctgttctccagcccagatgccagtgtcctcaagaggcagtaaccagggccaggggctcggtggccactcccccaagagcaccctcccagcctgcacagggattgggcgggtaggctgcagagctggagtgcagtgagggccagcgtggcccctggtcagaaagtcgggctctggagtttgagccccagtcctgccaccaatttgcagcatgaccttgggcacgtgtactccagtctccttgctggtgataatgagtccctgtcccacagggttgtcatgagtacacactgggagcatgtgggtaaagtgcctggcacacagcaggtgctcaataaatggcagccgtgatgcgggtaaatgtggggaaggcggagggaagccagaccaccgggggccgagcttcatacttggtatgacccttttgagcagccaaactctggccgggaaagtgaaaccaatttcctgactgtgaggggagccaggcctcttaattcagtgcgccgggtgtgaggatgtgggccagaggcccgggcagtgcagagagcccaggaaggcagggagccaggaggccccagggcacaggaatggaccctgtgtgaggaggtcagaacaaaaggggctgcctgcttgaggaccgtgtctctaggagattttggaaggagggctggggcacagtggagggcacgggcagactccacaaagaccgtctggaaaggcacggtcaaggtgtggcccaggccagacccaagacagctgtagggggcaggccggcagcctctgtgccttcccttggagaagccagcatggcctccttggcccccaggaacctggtcattcctgtgcccctgcccacccatggctcaggcactctggtacttcactgagccagcaaaccccatcccagctcaaacaagcccccggccccaagccaggcccaagtgcct

SEQ ID NO: 478944 - DNA, 1000 bp, Homo Sapiens
tatccatcactctttcatgatttaattatatgcacttctattttttctcaacctgcctttccactttctttcttttttccgagacactatagagacagaaatttagttacaggtggctggattaagcacaactctttggttaatatgcttgaaatactttatacagatctgagtttcatcttcaaagcaatataagagaagaagatatgaaaatgtatgagatggcaaaataatgagacgtaaatttttttcaataccaaaatatatctggaactcctcttcatctttagagttgatggcacatttcttcaggagctgcgatagcgtaaatctttaagctttgaggttgaatttcatttttggaaacaaccgaaaatcatccagggccacgtctgatgaataaggtggttgatgaagcaggaaatgattttttggttaaaaatgaggtgcaattgtagagtcatgggatagaaaatataaactagttcggaagtaattccaaagtggaattctttaagcattttgaggcactttagtgaggaaaaagaaaatggagagcctcccttagtgagtactttgaaagaaaactcattcatcattatcattccctatccatttctctcgcccagtgagaatataacagcctccggccccatacatcctgaggctgccaccaatcttgcctagggaaacctcctcactctgtacaactgagtgcctttacttgttctaggaaatagtttgaaattatctgtcttcttctcaaggaattgagtccattcattcatgatggtcagttcctctacattaaattttaattagaggatgggcttcctaatttccccggccaggattgttagcaattattccaacatcttccatgctctcgttaactaaaatcaaccaaatgatgtgtacgaagtctctggttgggtgatctcttcctaagatgaagttctacacctggggtcatctttcacccatagtcttctctgtggat

SEQ ID NO: 478945 - DNA, 1000 bp, Homo Sapiens
agtcaccaaataacatttattattatttgctatcctcccttccatttacagataggaaaaatgagaatcgggattctctgaggaaacacagttgagtcaatgagactggctatttctagcacctgagctgttctgctacaccacgctccatcggctcagtagcatcagttatccgcaagtccttgataatgatgataataggttatatttacttcgtgtttagcatatgccaggcaccatcttgaatattttatatgcatcaaatcacttaatcctcacaaccgtatgaaataggcaccccatcatcctcttttagaagagggagaaactgaggcacagcgagatgttcagtcactttctcaagacacactgcaaagaaatgacagaggctggattccaaccaggcattctggctacagatcccgtactcacagcctggactatctcacattctaccgtgcccctaattgtgcccagcacgttcctagcatatcttctcatcatgcttccatagacactatcatttaatgtcctatttgtatgaaagatattctcacattatacatatttatgcattcacgtttctttttccattaaaaagcaagaacatatcctaagacatccatttttttttcagcaccagtcacatttagtacagctttcaagaatcctgtctcatcctgccaacaaggctgtgtgctcctccgaggacatttgcattccatatgtctgtatagcataagcactggcagaatcctgcctgtaggtgagattttaatttcataagaatgaaatgttgtccatgacagtggaatcccagcagactcttgaagagggaggaaacccttccgcactttatagctaataaaatgctgttaacatatggcagtatcttatttaagaggaatcattataatcattttctatgtgaagaaactgaggcttggaaaatttacagtgtttcctccagggactagctagtgaatgccagggctggggc

SEQ ID NO: 478946 - DNA, 1000 bp, Homo Sapiens
ctgaaaactggccagttctccttttattgacacaagcagtcaaagagagggtggcaggagggaaaacagcagccagggcagaccgacctggatggggcaccctggtcacaagtaatgccatgtaggctgccatgatggcgataggtagagccggcaagtctgtgtccaggtaggggcttcctacagtgaaggctgatctcagccccctccacagtgtgggcggcctgcccacaggcagcccgctggtcctcctgggaaatggtgccggcccaggaatccacagcaagtctctcatcatcagatggggtgctcagcaatggtgaggcgggcgtgcagcaggcagggccttgaagcctccaggtggcatattggcatgtgaagccggggcactcaggacacttttgggctgggctccagagatcagactgcctgcactgcagtgatgaggctgggaagaggcagcagtgttcacagctgttggccgcattgagccagccctccacatcctcattactgcacggtctcccgtcttgcccaggttctctgatgtgaatccttacagcatcagggctcacagtgccctggtcccctctgtggtcaccctgggagcctgtggtgcctctggtgcctctctcttcctaggactcgagttgaagccagggacctctgggcctgggactcacaggtggggtcagaggccccagggcatgctgctggctggctggctggctggggctgcaggaaccctatgcttagccttccctccagaggccttgatgggaccaagccccgctgaatgggattttccaaggcccagaaccaaggtccagcagccatctggggctgcgacgcagctgggcgtgtgccacctgggctccttccatgccacgttcttctactgaggggcatcgcaggcaggtgctgccttgttgctggggtgtctcctgacctgcctcctctgtcataagcctgggcagggcctggtgtcggggtcccagtg

SEQ ID NO: 478947 - DNA, 1000 bp, Homo Sapiens; identical to SEQ ID NO: 346635

SEQ ID NO: 478948 - DNA, 1000 bp, Homo Sapiens
gtaggcaggacccacaaagacccctaccctggggtggggggggtgcgtttctttatttggaaagccggggtctgtcgggttgatcttgtgggctctctctgaggccttctgggcactgagccaataggagtgagtggttccatatcaactcctgagtgaggaagttacattcaatagaggtcacaagtggcctccagccaaaatcctgctaatatatatgcacagcaatcccacccatctcttggtattcagtgtaaactaagcacatcactcaatgtggtcagttggctggggcaaagtcgaaacaccagatcttctagcttcagagaaggaacaggtagagcacagtcttcatcttctgagtgctggtgaaatggttcaggaaagtgtcatgagagtgacaggggctcattgatcacagacagtctccagctctttcaactcttccagtgaagcacagatatacttgagctgcaagtcccttattatcacggcattgaccacagtgccaggcacacagtagatgctcaatgaaaatttgatgtgttgaaatgaaacatgctgtcagggcttaggctccagtctgcgctccacccaggaatcaggaaacctcagtgctggtttcaccttcaagctgttacctagatgtcttcagcagtcctgagtgctacacacaggacagcgtccagaggaggaagagaagctctcttcttatgagtctgaggtgggaggcctggatctctgaaccagttctgggttctcttggtaaggaagatgaggacgtgcatgggcactggtaaggcagatgaagtgtccactttacctctaaggactgttcttcagcatttagtgaaaaatgctccagtggtgggctggggatggggagcaggaggaggtagagctatacatttttacagatgcctcaaatgcaagaatcagaaggagccagggttgggaatgaggaagcgtggatttaattcccggtttatcctgtgagcag

SEQ ID NO: 478949 - DNA, 1000 bp, Homo Sapiens; identical to SEQ ID NO: 346636

SEQ ID NO: 478950 - DNA, 1000 bp, Homo Sapiens; identical to SEQ ID NO: 346637

SEQ ID NO: 478951 - DNA, 1000 bp, Homo Sapiens; identical to SEQ ID NO: 161464

SEQ ID NO: 478952 - DNA, 1000 bp, Homo Sapiens; identical to SEQ ID NO: 346640

SEQ ID NO: 478953 - DNA, 1000 bp, Homo Sapiens; identical to SEQ ID NO: 346641

SEQ ID NO: 478954 - DNA, 1000 bp, Homo Sapiens
agatggagtctctgttgcccaggctgaagtgcagtggcatgatctcggctcactgcaacctccacctcccaggttcaagcgattctcctgcctcagcctcctgagtgtctgggattgcaggcacccgccaccactcccggctaatttttgtatttttagtagagacagggtttcaccatgttggccaggctggtcccgaactcctgacctcaagtgatctgcctgccttggcctcccaaactgctgggattacaggcgtgagccaccgtgcctggacttatgcatatgatttttaaaacaaaaataagatcttactatgcttactgatatttttgactcaactgtcttggacaacttttcacatcaacagagatattctattcccacattatccatggttgaatagtattctattgggaggatgcatccccatcagacatttgtttgttcgtttgttttagaaactgggtctcaccctgtttcccaggctggagtgcagtgacgtgatcgtagctcacagcatccttgaatccctgggcttgagcgatcctcctgcctcagcctcctgagtagctggcactataggcacaagccaccgcacctgaccccctatcagacatttgttacttctaaatgtggttgacataaacaaaggtggacaagaacaatcttcctgaaacatggctggccacagcacttggtatctcccttttgcttgaaacccactgatagctctccattacccacagggccaagcctaaattccaaaccttggcattccaaaccttggcctgtccctggacctctgctctctgcccagctcctcttctacagtcagacagtttgacccaccgggtcatctcaggtcctgtccattcatacacctgggtcttggcttgggctctgtccccagcctgatagcgcccgtcttcccctgctgcttggccccatcaaggactgacttccttggaactccatccctcagcggtcaagtcctctc

SEQ ID NO: 478955 - DNA, 533 bp, Homo Sapiens
tgtggtaagcactgcttagtggatctcatttaatcttcccaataatccagtgaagtgggtgttactattgataggaaagaaagctgagctgcagagataaggcagaactcccaaggcctaccagccgccaagcagcagagtggggcatcatacctgcctgaccccacgcaaagaccatcaccactgccagccgctgcctggctgtgctgcaggtggggagagacgggtgggcaacgcctagcaggggcaaagatacagaggtaagggagttccagaacgagtgtggccagattcagcttcccatccaaccctgggcccccaggaggtggagtcaagaggggccatggcctggggtgtgggcttctcttcgtcccagaacactggcctgaatcagccagctctccgcacacacagccacgtccataggcacaactgtttctgggggcccctgagggcagggggtctgctagggctgtggtttgtgacgtgtggagtgagcgcaggctcagatcagggcgaggcagtcccgccat

SEQ ID NO: 478956 - DNA, 1000 bp, Homo Sapiens
cacttcaaaagatgtattaaatcaaacactgaaagcattggcacacagaattttcctaatagggacatgatgaaaagtcatttattaattaaaatgcatttatattttctttttttaaaatgaagcaatgggggtattctacgctaccatacatttacaaaatttcatttgcaaaatttcatccttcatacttccttatttagctaattaaggtaatgattctacttagattggaaagttctaattaaaatcattaatttttcccgaaccttctccttcaagatctaagctttgctgcacatccttcagtctttgggaggagagaatgttgggggatgtgctgctgataattgatgagagagagcaggatacatttattatgaccttcctcccgctgcccagctaaatttatacagccaaccataatctaataactctgtgttcctttctttaaagattttcctatcatatgaaactatttcggcctgtggtgtattctttctaattagagtagaatactaaagcaaaaccatttcaatccaagttgcataaaaatgccatccctttccgagtgactggttttcaaagcgagctcattacctggaaaaacaacaacaacaaaagtgttgcctctctgaattcacgtggtttggaaaattcttagccatctacagatgcaccaactgaatcataataaagaagagaaaatctataaatgattaatttcctttttctatttaggcttaacatgttttaagggataattaaacttttggcctgtttcttagaagtccaggaggaagcatatttcagaagaagcttattgaactgagcggtgaactcattcattatcctttggttaatacagagtgaacttgtctaccctcaggttcatttagctttaggctacagcctagattcttagacatccgtctattttacagtattaattcaagctgtttataaataacacatgactaaatagatgttaaagaagacc

SEQ ID NO: 478957 - DNA, 1000 bp, Homo Sapiens
agaaggctgaaccagacgacctttaataacttttatcagttgagactgtgagattcaatgactccatgacacttgcagattcagcttcagatttcagccactttacgggaaaaagagacacatcgaaaacttgatcctgggacttgcaaccccaccgtggcacttctccaagaaatggatggttttcaccttgggtggctcctgcgtttggttctccaaggcagcaggagggatgaaatagtcatgaacattcccttcagatccagagtttctgcatccagttattacatccattgcaagtctcttagtgacctcctttccatttctcacactgtgaatggacacaggacccaccagaaggggaggcagacatcttttgaagccaatcttgataaaggaggtgcttccttttcaccccatagtcagccaatttgttgcctataagctaaaaaccaaacctaaatactgaatttgaaacttagcacaatgaccaccaccatccgagctctctggaacctacaggtggtaaacagggtttctcaaccacagcactactgacttttggaaccagttaatctcttgtgggacaaagggctgacagctttcctgcacagtgtagggattttagtggcatccctggcctctactcactggttttcccccagatgataaccactgcactaaatgaacagaaatctttattctcaagaaatgcaggctacataagtgcagtcccatctcattcaatgctttgtgccaaagttccccactggacttgcagcatgattataaactcaggggtaacagcaatggatgcctcttccaggtctatgcaaaagcttgaacaataaaaagacaattcccatgactaggagagaccttcccaagaagaccattggccgataagtccaaaagctgttgggttctccgcatgtgtggtcctaattaggagatctgggtagcatttgtaaacaaggcatttacatctttgtccaactgc

SEQ ID NO: 478958 - DNA, 1000 bp, Homo Sapiens
ataggtactatatactgtattactacaataaagtaaggtagagaaaagacaatggtattaagaaaatcataaggataattaccatttgacccagcaatcccattactgtgaagcaatcccgttgctgtgaagacattttgtggatgtcattaacatcaacaatcagttgaccttgagtaaaggagattatccttgggaataagggtgggcttcatccaatgagttgaaggccctccatgggcctgccacttctgactccctccttcccaagccatcagctccaggagcctgcccagctgtctcgattgggtcacctgctggaattccccactagtgacgacttctcctcgcaggtgcttgaggaaggcaagacctgcacaggttgcatttcgggaaaatcactcatgatcgatcctcatttccccattgaaccatcagaacacacacagttccctttggggtgaggaagaggtggaaaccttgccagaacaggtctccaaagtttcctgttttcaggcaagcgaggagcagaatgcaaacatccttcttcatttacggtctttgttcttgctcagtcagtgtgctgtgcagcagggtggccttccaggcgcatgctcccatctgcgttatcgttctgtgcgtgtgtgagtcagagctgctggtccagggaggcctgaacacacgtgagctatgcagcagatgtcttgctcacagctcatagaaatggggatggagaccatcataaactcattccaacaatgacattacttatgcagaaagcggcaaacaggtgacattgagatcgaaggctttccatctgcaggtgctgctactgtgttgtgggcttgtccttgggaatgaacagtagactggagacagagtcctaggcatagccccagagtcactggtgactctgttggtcattgggctggtcctgtcccttctctgggccttgatgtccacttttccaaaatggggagtggatgggggatcttcactt

SEQ ID NO: 478959 - DNA, 1000 bp, Homo Sapiens; identical to SEQ ID NO: 346642

SEQ ID NO: 478960 - DNA, 1000 bp, Homo Sapiens
gccactaaccttgctgctttatttctctggacctgaactccctcatgcgcaaaaaggaagatggtgctagaaaggagcttctcaagccctaatgcatctacgaaacacctgggagctcgttacacatgcagatgctggacctaacctcacactcgcaaaatccagctctccaggcgtgaggctgggaacccatatcggttccaactcaggtggtctcaaaaccacatggagaaacactgagccaggccaatgtgttccaaccctcagatttcagaaggagacaatgtcaccagcagctgattgggcgtctatgtgagtgtctgtcctcagatctcagaaggagatgatgtcaccagcagctggttgggtgtccatgtcctcagatttcagaaggagacaatatcatcggcaggtgtttaggtgtccatgtgagtgtctgtcctcagacctcagaaggagacgatgtcaccggcaggtggttgggtgtccatgtcctcagatctcagaaggggacgatgtcaccggcagcaggtttggtgtccatgtcctcagatctcagaaggagacgatgtcactggcaggtggtttggtgtccatgtcctcagatctcagaagggaacgatgtcaccagcagcaggttgggtgtccatgtcctcagatctcagaaggagacgatgtcaccggcaggtggttgggtatccatgtcctcagatctcagaaggggacgatgtcaccggcaggtggttgggtgttcatgtcctcagatctcagaaggagacgatgtcaccggcaggtggtttggtgtccatatcctcagatctcagaaggagacgatgtcaccggcaggtggttgggtgttcatgtcctcagatctcagaaggagacgatgtcaccggcaggtggtttggtgtccatgtcctcagatctcagaaggagacgatgtcaccggcaggtggttgggtgtccatgtcctcagatctcagaagaagatgatgtcacc

SEQ ID NO: 478961 - DNA, 1000 bp, Homo Sapiens
ggctgaacatgaaagtgaacaaggagcgtgaccactgaagcacagcatcacagggagacagacgttggagcctccggatgactgcgggccggcctggctaatgtcagacctcccacaagaggtggtggagcggagcgttctctgtctcccctggagagagggagattccctttccgggtctgctaagtaacgggtgccttcccaggcactggggccaccgctagaccaaggcctgctaagtaaccagggccttcccaggcactggcattaccgctaggccaaggagccctccagcggcccttctctgggcgtgaatgagggctcacactctcgtcttctggtcacctctcactgtggcccttcagctcctaactctgtgtggcctggtttcccccaaggtaatcataatagaacagagatcattatggtaatagaacaaagagtgatgctacaaactaatgattaataatggtcagatataatcctatccgtttcctatctctagtaaaacttttcttattctaattattttctttgctgtactggaacagcttgtgccttcaggctcttgcctgggcacctgggtggcttgcggcccacaagataagatatattgcgttgaactataatttatgttgattgctgaatgatttagggcgggggggtgggcaccccctgaaattctgccctggaggagtggcctcaccctaaccctggccgtggctaataataaggcccacctcttagggccgtggagtgaaataagttttccaggtaatgcgcagtagagccctcagccctccgctgaagttgcgttaggaaggaggaagggagaggtaaatgctgagcccgcaggcggcagtctgtgcctcggagagaaactttatcccaaccttgctgggggccttgacgcccaccttgccccaagagcaccccggcagtcacccctgccctctggggtcctgccaccccgagcccgaccttcccccttttcccccgc

SEQ ID NO: 478962 - DNA, 1000 bp, Homo Sapiens; identical to SEQ ID NO: 346644

SEQ ID NO: 478963 - DNA, 1000 bp, Homo Sapiens; identical to SEQ ID NO: 346645

SEQ ID NO: 478964 - DNA, 1000 bp, Homo Sapiens
aaattgagtattgttttgtgcaagacaaaatgttttcattaagaaatcctctttgcttgtgttagataggttgctggcaccacactggctggttctgagtggaggcgggcattctcactcagccatggagaccatagggctcagagagctgacctggctgccccaggacacggagcagtaagaaatagaatcacaattcaaacctggattttgtctccaaatccagcaattctgaactatggcgctataaagtctagtgcaatccctgctagttcctggcagctgcccactaatgccgtctctgtcaggctggtggcctgtctgtccctgcagaggagagaacaggaccttgcactgctgtgaccaccagttcccaggtcctgtgggacgagccatgtcctcacggcaaccctgccctgcctgacctctgggtctgtctcgtggctattgtctctttatttttcagctacctcttgtcttcataacattagtgtccttgccagcattgggcacagtttgattaggggagaattatcaccattttaatgcaatatacaaccagtgtgagatgcagagacactgagtcttgtttaaattatcttacaaatctgaggccaggcacagtggttcatgcctgtaatcccagcaatttgggaggctgaggcaggtggatcacctgaggtcaggagttggagaccagtgcagccaatatggtgaaaccctgtctatactaaaaatacaaagattagctgggcatggtggcaggtgcctgtaatcccggctactcaggaggctgaggcaggagaatcatttgaacctgggaggtggaggttgcagtgagccgagattgtgccactgcactccagcctgggtgacagagtgagtctccatctcaaaaaaaaaaatgaattaaataaataaataataattttacaaatctgagatatgtgcctgaaagacacatcttagaactctcgccaactcattgatcaagtcacct

SEQ ID NO: 478965 - DNA, 1000 bp, Homo Sapiens; identical to SEQ ID NO: 346646

SEQ ID NO: 478966 - DNA, 1000 bp, Homo Sapiens
ccttaccagggaagcatggagctccctgaaggatgagccagacctcagtttccaggcatatgtgggagaggctgtggggaaaggggcttgagcttcagattcagtcatggaaaagggagagaaacccgaccaggcagagatcatatgcctgctgggaagccacagtgatttacactgctgagtggagaattgctgagtaaatattgcttccaaggagggaggatgtgccctgctgcctgctcccacccagtgcctggtaagtggatgcccaaaaaagcttttatctatgctgcaaggaagcccaggaatcctgtgggtggtggcagtggtggtggttcaggtgggagtaatttatgaatataagtatttgcttaggaggcagaggttatgtttaaaatgtgagcctgtttaagggagcaacctaagtaaatgaaggcaaaagcattacatagatatggcccaaaccaggctggtaggagaaatgtgcccgaggcttgactccatgggttaggagccaaaggggatggatgtaccccaggctagcctggaaagggattaattcatgggctgcagggccccagaaggcaggagccaggtggggtagtaataaaactgtctgtgcagcccagtggatgttggccatgcctcctccccaaacccactgtggattggtgacagagggatggcatttccagtcttcttcttgctcaccctcaaggactctgtgcagtatgcaggccaggattctctcaggctgtgggtttccacatgtgcttctgcatggaaagtcccctggctgctgcaggatgtcctttgcagagccccatcctgtcctccttatcgcagctgcaggcagcctgagccacattcctcctgcctgagtcactgttccaggccacaggccaccttgcctccagcttggcctatggaccaggccactgtccattccatcatttgccagacactgtggagtgtccctgcccttaaggtcttaccctgg

SEQ ID NO: 478967 - DNA, 1000 bp, Homo Sapiens
tttgattgattaaattattttaattaaacctccacaaatcattcccctgagagcaggcagccattcagcatctctctgcatgactggttgaggcaggatgagggggtagggtgggattggagtaaggaagtctcttctattcctattgcaaccacaagctggctccaagaccatagagatgagaagttgggtagtctgggtttcctttcactcctcaccagcagagctgttccagcttgttggaaatcagaacgtgtctctggcttctttgccccaagctagcatcaaggacaccactctgtgtggagacagtgacctccggataaccaggtattccgctttcacttttccaaagtgaagatgtgaagccagagaggagaggagaaacagacacatacaaaacaattcagtgcactaccatgtttgggttgctgcagagaaaggggttaaatgggtattttcttctcatatcttactgagatcactttatgactccaatctcaagggaaatgagcagtttgcacatttactgtttcctatcagtcgaccatctgtaggcaccacctttcacaaagagcttatacattaactggtcactttatcattgtaatatatttgaaaaatcaaaaaccagctgctataaagctataaactgaggattttattacatattgtttatcattgctttagtatttggagattcataatgcatggactttgagatctatctgtattgccaaggaggccgaagtttatttccctaataatatgcaaatggagcctttataccagataatgaataatcactagattaaagcctgaattttcttttagtggtactggcagtgcagccttttgcatgcagttaataattaatttaaagaattaccacttcagtgagccctgcttacattatttattaagtgtaattaaagtatttattagtcaagtaataaatgagggacaaccctctgcaccttaacagtgttgtaaaataatc

SEQ ID NO: 478968 - DNA, 1000 bp, Homo Sapiens; identical to SEQ ID NO: 346647

SEQ ID NO: 478969 - DNA, 1000 bp, Homo Sapiens; identical to SEQ ID NO: 346648

SEQ ID NO: 478970 - DNA, 1000 bp, Homo Sapiens
tttattaaaatgatattttatttattggattaaaaactttgatatgtcagactcaggaatataggtaatagtctgaaaaaccaataaaagattatcattctagtagaaaaataaaattggcccaaaaccacatagaaagatatttaacctcaacagtagttgaaaataataaaaaatagtaaatggaaatgctatttttcacctaaccgattctaaacatgaaaagtgaaggatgataactagtactttttaggaagggtgaaacagagtataaatgggtataagttttttgaagggcaaattcgcaaatcatgtcaaaattataggaaaaaatatatattgacttagtaagacctctttttagaatttatcctcaggaagcattatatacttataaaaatgtttacacaaaaatattcttgtcaaaattttaacatattgaaaattggaaactaagtttcctacaatatgtattgatttgctaaatatgttacatgggtttatacagtaaaagttgctacaactatttcacatgaaatatacatgtgtatttactgtcatagaaaggaatttacagtgttaattttgaaatagcaacttgttaactgaaaaatattttcctcaaaaatacgaatataatctatttaaaaattatgttttacaagaaaatgtttagaagtatatatagcagaatgtcaatagttatcatctctggatgataggattttaggtaacctcgtatttgctcatctacatattttcagctttctaaatgtgtatttgtgtaatgagaaacatggaaagtatataacaggacaacaaaaaagatacatagtttatttaatattttattagataacctgagtatagatacaatttaactgtgaataattctaagttaatttttcttcacttgtcatttgatattctttgtcttcccctgtatctaagagaaatactatagtatattaagcaaagtaaaggagcagatgtggatgaa

SEQ ID NO: 478971 - DNA, 1000 bp, Homo Sapiens; identical to SEQ ID NO: 346649

SEQ ID NO: 478972 - DNA, 1000 bp, Homo Sapiens; identical to SEQ ID NO: 161465

SEQ ID NO: 478973 - DNA, 1000 bp, Homo Sapiens; identical to SEQ ID NO: 346650

SEQ ID NO: 478974 - DNA, 1000 bp, Homo Sapiens; identical to SEQ ID NO: 346651

SEQ ID NO: 478975 - DNA, 1000 bp, Homo Sapiens; identical to SEQ ID NO: 161466

SEQ ID NO: 478976 - DNA, 1000 bp, Homo Sapiens
cacccgcacggctcccacgtggcttcccagcgcgatgtgtgcctgggtcgccatgaactaatttcaaggccgagtccaaaagccacagggctgccggaaaacagaactcactttcagccagcagggccccagagttgacataaaatgtgaagagggagtctggaggcggctctggcgaaaacaaaatagaagttggggacgggccggccccagtggcctccctccgtgcaggggctgggagggggtggggcagcggttctgctaaatgaatagagccagctgcttggcgaggccgagcccctcctctgtctcccctgcaatgctctgtcctgagcctctcagtcacctgtgtgaagggactcagacgcaaggagagttgtgctctgctctaaataagcacagtggagaccctgatgtggtggaatggggcggcttccttttgccctgagtccgaggctctgggtttcgggcacttgggctgggcatgctgcaggtgggacggggctgaggctccactgggcaggggcatggagctgcagagcgggcactttgcggtgagggaggtggtgtaggctgggcagagtgggacgtgggcggcctgggggacactgagattcatgggtcgggggcaggggctgccccgggtgctgccgcgggtgctgccgccggcatggccacgcatctggcttctgtgcctctggtgaccaggctatttccacagatggcaaagctggctgtaattggggttgcttccccagggacaaaccactggtcctaaaatggaaggcgagggaggggagaagactgttttactggaaaagaggccactttgccagaaccacgttggtgccacaaagtgaggaatacctgtctctccacactggtgccagttggcccatcgctgtagcttaactgtccaaaaaaggaaaaagaaacacttccaccagatagtataactcttggaccggagagtgaagtggaagcctcactctaaaccttt

SEQ ID NO: 478977 - DNA, 803 bp, Homo Sapiens
tctggctgcatggacagaggcctgggtacagggcacctgcaagggcagaggcggggaggctgagctgggccagccacgtgccagagcggtgtcagcctttctttgggacgagaaagaggaggcgctgtggggtgttaggcgtgggctcagaggggttggggtggcgctcgggccaggctggtggcaggtgtgtggcctgagtatctgcaggatgaggttcgatggtctaagagggagaagcgggggcagctttgggctttgggtttctgcgggtgtcgttctgatgtcaccccacgaggagcaggcctctgtgagtgcacgtttgggccccgatgggctctgctcagctttgtgccggggtctgtgatcgctgtcacacaggggagggggcaggagaggcatggcgagtcctccacagtgccagaggggacctcgggctgcagagtcgtgaattccaggacacccccagctgcgtccctgggacgtgcgcggcccctcctctcgcgccggcctcccccgcgccgcgctctccattcataaattctccgcctgctccgcggccaccgggcgccggagccagccgcgagcgccacgcagccgcccgccgccagcccgccgcccatgggccgctcgtcccggcgctgaggtaggcgcggcgggctcggggccaaccatggccgggtgggccctgccagggtgtagctgaacttcttggggtgggggtagccccccacccccgtgatggggcggacagggcgtctggagtccttctcgagccggctgcaccgccttggcgtccccat

SEQ ID NO: 478978 - DNA, 789 bp, Homo Sapiens; identical to SEQ ID NO: 346652

SEQ ID NO: 478979 - DNA, 1000 bp, Homo Sapiens; identical to SEQ ID NO: 346653

SEQ ID NO: 478980 - DNA, 1000 bp, Homo Sapiens; identical to SEQ ID NO: 346654

SEQ ID NO: 478981 - DNA, 1000 bp, Homo Sapiens; identical to SEQ ID NO: 346655

SEQ ID NO: 478982 - DNA, 1000 bp, Homo Sapiens; identical to SEQ ID NO: 346656

SEQ ID NO: 478983 - DNA, 1000 bp, Homo Sapiens
cctttttcagtgctttattccacacaaactcatcttttaggaggctatttgacagtgcttaactgcgacccacattgtacatgctcataacaaagacaagtccccatctaccatgctgtaacttagaaaggcacaagttatacaacatctggaatctacccaagggaaaaaaaatgccagtctacaaatctagcatgctggaggcagaaaccatgtgctcagaatcattaaaatcacatttcactttgccacagtgcagctctgtccctggctgatggccagataagcttgctggcagagatctgctcttgtggtgctgagcgaaaggtccacacacctctcggttaatacctgcccaggcttaatacctaatcaccatcctcggattgcctctcaacactcattaccagcactcagcagttgcagccaaggtgatgggatttaagattaggacaaaagagtagtcacttttgttctcaagtgcaggtctcctcagaacatcatcgttcagcaaattcgggagacagcatttccactttctactgaagcatcctggagcacattcttctccaagtgcaaggcaagagggcaagagtccaggttcaatcatattgaaagcctctggctggatgtgacatacatatctgcacacattccattcgttggagcaagtcacgtggcctgctcagtaggaggagcaagtcagtagggcagagaagtactctctgcttacagtgagcattttattattttagtgggattttgctgctgctattgttgttgtttgtagagataggggtcttgctatgttgcccgggctggtcccaaactcctggcctcaagtgatcctcctgcctcagcctcccaaagtgctggacttaacaggcgtgagctaccatacccggtctagttttgttctgttcggttttttttcctgcagctggggctaaacagtcatcattgcaatgaatcagcacaggactttgattatggaaccatc

SEQ ID NO: 478984 - DNA, 1000 bp, Homo Sapiens; identical to SEQ ID NO: 346657

SEQ ID NO: 478985 - DNA, 968 bp, Homo Sapiens
atggttcaaagcttaagctgtatttatttctgctcttccagagctagcattccacacaaaaaaagttatgctgaaataaacagtggtaggaaaccaatggtttcaaggctatctgcactttctaaaacccttctccatgtgaaacctgggaacacagttggtgcggctatgcctccctggaatgatgatactggagtccaccacagttccatcgcagaggtgaaaaactctaacatgaggctcttcagcatttgggcccacctggagcaaccctgtgctcagcctgtggtcccagctactcaggaggttgagatgggaggatttcgtgagctcagaaggttgaatctgcagtcagctgagatggcgccactgcactccagtctgggcaacagagcaagaccctgctctcaaaaaacggctgccaatctagtttggagacagaaaaatatacccgactgagaacacagaggagcctgttttcggaagaggggcgtctttggagacgcaaaatcctctccgcgggacgctgacgggcagtcggtaaaggacttccaagcactggtcagtgacaatcgggcgctggggctttgccaaggcccggaggcggcgcgccaaaccgggcaatgcgggaagcggggcaggcccgagtggccctactgctgccgtccctactgatccctgcgcatccgccacagagcagggaacggcagaaaggaggaaggagggggagttccgtaaatcaggccctcaggggctcccaggcccgcacccctctcaagccccggggaccaccgcggagccgctgctccgggccgtgcggctcgaggcgaacctgcctcagagccgccgggccctcctatcccgagccgtatctctagctccggcctgaggtggccggcgactgcgtgcgcaaacacaagatccgcaccccactccccgccactgcagctccgcggccgcgccctcat

SEQ ID NO: 478986 - DNA, 1000 bp, Homo Sapiens
tatgcttggaggcctttatgtttccaccacaagcagagcaccctgttgcacctttccaagcacctatgttgcagtagcaggggacaacacactacctgtgactgcaagtcttctcttcttgtgtctggtcagagcgcttggggcccatatggcctgggcaaacctgttactgctggagaagcctgcacaacagagaagaaacatgtgccccaagatacttctgttcatgacttctgtcaaacgcctttggaccactcagcttgagcacatctgtttctgttggaggggctggtgccatatctgtgactgaagaaactactgtttatgaatacaatcagagcatgtgagggccataagtccagagtataggcagtgcaatgcctgcaatgggaggagatggcaccatacctgtaatgggaggagatggcaccatatatgggtttgtttgggggggacacttctgttcatgaacacagccagaacacctggggtccacaagtcctgaattcaggtgtacaatgggaggaaacagcaccccacctgtgcctgcagaaacttctgtccatgaatagtcagagagcctgaggtccacaagtccagattaaagatggtgcaatggcaggacacagtcccacacctatgcttactcgcgaatacagccagagtgcctgggttccacaagtgaggattcagatggcaagtagagggtacagtaccattcaagtgtttgggtacccttctcaccatcattcagagcaactgggacactggtggctggagcacacttgttgcagtcagatgggagaacatgttgaagaagatacttccattctcaccttcaatcagaacaccaggggcctaagccagggtaccttccctctttcattttggagaaaacaacatcactgagaaaatatctgtgcttcaggaccttttccacctgcttttgatcaggtcaaatgtgcttctgtggtgggcacggcaagcacagcctcgtctt

SEQ ID NO: 478987 - DNA, 1000 bp, Homo Sapiens; identical to SEQ ID NO: 346658

SEQ ID NO: 478988 - DNA, 1000 bp, Homo Sapiens
atcatttatagaaaatagggataatatctttactcttaggagaggagagatttcatacacaagatgtaaataaattaaagaaaacagcattaaatttgaaggcattaaaattgagaatatctaccatcatttaaaggttaaagtaagaaagcatgcacagcacatataaccggcaaggacgacaatccacaatatttaagaaatgcatacaaagcattaaaaggaacaaaaactctggaaatataaaaatcaatagaaaaattagaaatgacataaaattgtacttcagaaaagagaaaacatgaatgccaatgagcatgaaagttgcgggggtggggggctcaacctcatttagtaccaaaatatgcaaatttgaaatcaaaataatacatatcaactcatacccaagtgcgtaaaaatttaaaatttaataataccaagtgttggtgaggatacgaagtaaaaggaatagtaaatgagtataataaacactttagaaaacaactgggcaatgttgagtaaggctgaaaatgcatataacctatgagctagcaattccttttttagttacatacagaaattcttgcacaggatacaaaaagaggagttcaagaatgttcactggagtaatgtacacaatataaatgaaaaaatgtattcttacaatggatggctatacagtaggataagtttgcaatgtgaatggatctcttgaacactcgttggaggacaagtaatagagttgcagaaaaatccaaacagtatgatttcttgacatcaaattagaacaggaaaataaacacatatggttaagactgtaaagaaaaacaaggaaatgccaaacacaagattcggaataacagatacctctgacagctaaagaaggggatttagattgggaagatcaaagcacacatgggatttctaacattagcattctacctcttaacatgggtgttcagtcccccttaatatattacacatgttctactattcaata

SEQ ID NO: 478989 - DNA, 441 bp, Homo Sapiens
ccagtcaaataacactttatttttgtaaattcaattgttttgttcccggaggaaagggaggagctcaggagaacagtgtcgtcaaaatttcctggtggttgtttaatcacagcagcagagtaggtcagaaaactcatccggattaccctcttcctcctgtgctgcttgtccagacatcatcttcttcaggaaatatgagatgtttctgaagagtttcagcagcttgtcaggaaaggactctgccttttccagtacatagatgagcatcatctggattagagacctcaacacggcgaatacaatttccgttgctagttttgggacacatgtcatgaattggtcggcacaccatttttctaacatatcggtcagaatactggccactttaggcactatctcttccttggccaggttctttataagtgaaataaatgagcccat

SEQ ID NO: 478990 - DNA, 1000 bp, Homo Sapiens; identical to SEQ ID NO: 161467

SEQ ID NO: 478991 - DNA, 1000 bp, Homo Sapiens
ggagccagagtctcacgctgttgcccaggctggagtgcagtggcgcgatctcggctcactgcaaccccacctcccaggttcaagacattttcctgcctcagtctcccgagaagctgggattacaggtgcctgccaccatgcccagctaatttttgtatttttagtggagacagggtttcatcatcttggccaggctggtctcgaactcccgacctcaggtgatccgtctgccttggcctcccaaagtgctgggattacaggcgtgagccaccgcatgttgcccaattatttttcagtagtatttttttgttttatttaatttcattttataagagcagtgaattaagtacacattatggaaagtttgcaaagggtacttcctgtcaccctttttttgcacggtcctaacactgtgtacttggtacccttttcacccaacaaatgatcttaagggattgctttccctggggctacaaaggcactgtgagtgtgtgggagatgttcttgtttttttttttttttttgagacagagtctcgctctgtcacccaaactggagtgcagtgagtggtgagatctcagctcactgcagcctcctcctcccgcgttcaagctattgtcctgcctcagccttccaagtagctgggattacaggcacccgccaccacacccagctagttatttgtatttttaacagagatgggatttcaccgtgttagccaggatggtctcgaactcctaacctcgtgatccgcctgcctcggccatccacagtgctgggattacaggcatgcgccacggcgcccggcctcctacagtgctgggattacaggctgagcccccacgcccagcttcccatagtgctgggattacaggcgtgagcccccgtgcctggcctcccacagtgctgggattctagcacccgacctcccacagtgctgggatgacaggccgagcccccgtgcccagcctcctacctgtggtggtttccagccctgagg

SEQ ID NO: 478992 - DNA, 1000 bp, Homo Sapiens; identical to SEQ ID NO: 346662

SEQ ID NO: 478993 - DNA, 892 bp, Homo Sapiens
tgggtctcgtcgcctaggagaggaagcggagggtgctgcagacaccgaggtgaacgtaaagccggcgagatctccgtgctccgggtacccacagatactgtccgcgccgcccgcgccgacttcctgcctagctaaggcgagccccacccacttcccgcctccggggcacgccccctcagctccgcctcgccattcgtcgggagagccgtcactcattccctcacctcccggaaaggggtgggactgcgacggctgcagtagcgtggaaaggggggtgacgtcccgcggacttgaggcgggcagatctggggggccccgactccccagcggccctgtagtggtgcgggcgaaactctggccccagataggaccggtgagccgaactggggtgtgcggagccggggctccgggggatggcccggggcggcgtggcgggcatgagagctcggggctccgtcacgtactccgagtcccgcacgcactcagcgtcgctctggggccccacgtccggccctcgaccttgctgacaactttggcggcccgggcctgccgcggccctcctgccccgcccctcctgcctcgcgccgcgatccgagagaccccgttggcgtcgagtcgttgagaggctgcgcgcctcggccccactccggggttggggcgctggccccgccgcagcgctgcgtgtccggggccacgtgcgccgcctgcgcctgcgcgctgccctccagccgcgcccgtctggccgggctccgcctggcacccgccaaggtgaccctgtccctttctccttgtctgctgtggccagaaccagtaaatctagcaggaaatcagaggccgaacatgatcccggactgctgccgttgcaagattcttggaggctgcagcgccacat

SEQ ID NO: 478994 - DNA, 1000 bp, Homo Sapiens
tagtgaaagaagagatttattgcaaagcaaaaagtacacactcaagaaaggggagttcaggcatacccaagagagaacaatggattctggggtttcatcttgatgggtttctttaaccaaggagtggaatgttcatgaaaattcctgggtaaaggtggagatttctcggaactgtggtgccatccatttttacatcaaatattggtctcagaactgtcatggcactggcgggtgtgtgatttagtatgttaatgagcatataatgagggcctaggtaaaacctccgtcaaatccagcaccacattgggtccactcagccttagccagcttggtccacaccctggtttttcagcgtcttaacagcccacagcctcaagtcatgtaaatctgctgcctagaatttgttatcctgtgaccaccctgtagtattcctgtctgaaatctacttgtaaatattcaaatggtctttcacttgggcattccaactttgcttacttcacagtgtttcctgcgtaatatataagaaaagatgatccagacattgttaaacatctcaaataagatgtagcccaggtatttgtgtcaaatttggattattttgatttcgtctttgcagaatataaaaaactaacatgaggtaagcactaaggtgtggagatggctgtgcaagagatgacaaagtccagcaccacgcttgagagtgtccaatcatctcttctggggcagcatagttttctacaatactgattttggaaaaaaaatcaaaaaaaaaaaacctacaagattcatgaaactggacaactgtctttataacattaccagtgataaaaccagtaaggaaggctggtttgcagtcatctgagcagcctctttactttcataaacatggtttctctcggcttccaattgcaagtggaatgctgcatcacagggataaagatgtgaagagaaccggtttcttctgtaatccgaaacattctagtctgcgaattaaaagcca

SEQ ID NO: 478995 - DNA, 1000 bp, Homo Sapiens
caagtgaggaaattaagtcaaaaaatgaaggaagaaagaaaaagacaggtatggacatcctctttggttggtagatttcgctgtgagttccctggcggcccaagagaaaaagaaaatataactggttttaggaatcatggtgctcacaaagtaaaactcaaccagttgagggaaaaaagccctgctcttctaggccctgagaactgagggaaatccatccccttcccaccctgggtggggtttaatggatggggaaagtgtggaatattcaaccatgtggttcacagcatccttgtatttgggtctggcttgatccatgggtttattttgggatgggatgtctacagaaatatgtgttttgggtccttcagactcttctccatgagaattctttgttttaaccaaacctttgtttggatagtgccagggaatgtggggtttccctccctgacattggctcttccttgcagctgccagaacaacgacccaaagtcctctaatgtcagccaacccggggctagagttgaggtcccactgtgagaatcagcccaggtccagcacctcctactgattcactcagagctgggggacactcatacctggaaaggggatgggggacagcacctctgtggggcatccccccaatgcagggctcacatctcggcagccccttctatgaaggccccttggaccggctgcctccttgaacacgtggagacagaggcacagagtgacttgccataaaccacacagctagggagaggcaaaccgaggtaaaagacagaaaaccgatcccagagttagaaacttggattcttgggcccccctcatggtttcttgaaaaacttcctttcctttcacagaagcagctctgcccaatggacactctccatctagatctggcccacccgctgtggttctcacgatccaggttgctggtgagacactgtctcgcaagaacttcatgggacagaagggctcagcacctttcccaaaatca

SEQ ID NO: 478996 - DNA, 1000 bp, Homo Sapiens; identical to SEQ ID NO: 346664

SEQ ID NO: 478997 - DNA, 1000 bp, Homo Sapiens; identical to SEQ ID NO: 346665

SEQ ID NO: 478998 - DNA, 1000 bp, Homo Sapiens
cctcctttgatttattaacgtgaattccacttgttgaaaagatatcattccctccaccttggcgcctcccagccaggagcccagcccctacgatgagactgaaatgcactactccttccacttgctcatccaagagcagagccgctgggaggcccaggaggggctggagctgtagcagagggagaggggtggtggccacagcgagtggccagcagacactcttggggcccgagggcacccacagcacggccacactctgcgtcctggccagcattcccagcctcaccattggccggcccctgctcgcagacttggtgcgctcctcccggcacagcctgcgtctgtacgacctgaagctggaccccacgtcctgggaggaagaggaggagaagcggagcctcctggtgaaggagctccagggcctggctgtggcgcagcgggaccacgtgcttcgagggattcccctaagcctggctgagaaacgcggcctgcgagagaagagccgaacccagagcgggaagtggaggagcctgcggggccatggcagagtctgctcctgctgtggttggctcagatatgtctgtgtgctggccttgcacagcctggggctggcgctgctcttgggcctgcaggccctgaagccgtggcgctacgtcctgaagcgcatcaggggctagttcagctccaacgtgctctcctacttcctcttccttaagaccctgctggccttcaacgccttcctgctgctgctgctcgtggccttcattgtgggcccggaggccgccttcacgcccgccccgccgggccctgcccgcatctgctctggcctggagctcctcaaagacacaggctgcttcacccacatcatcatgtattacagccactacagtaatgctaagctaatgctaataccgggtgggcagcacctctggcatccacgccgtcactatcttctgctcctgggactgcaaggtgaggcagaagcgggccccccgccctc

SEQ ID NO: 478999 - DNA, 1000 bp, Homo Sapiens; identical to SEQ ID NO: 346666

SEQ ID NO: 479000 - DNA, 1000 bp, Homo Sapiens; identical to SEQ ID NO: 346667

SEQ ID NO: 479001 - DNA, 1000 bp, Homo Sapiens; identical to SEQ ID NO: 346668

SEQ ID NO: 479002 - DNA, 1000 bp, Homo Sapiens; identical to SEQ ID NO: 346669

SEQ ID NO: 479003 - DNA, 1000 bp, Homo Sapiens; identical to SEQ ID NO: 346670

SEQ ID NO: 479004 - DNA, 1000 bp, Homo Sapiens
acaaaacagaatgttattttattttgtgtctaagagtacaaaaatcataatcaccaacctcttgggaatcccaaggcagaattttagtcccagaccccccaacatcctcactacatacatggaagttgctttactcctttctaccttagttatttgacctataattagaggataaaatacaacattctaaaatcctggtaatatggccgatatataattttatttttgatgtgggtgagagtcttgaagtctggaaagcatttaacttattaaaagacagatcatcactgatcattatggcaaggacaaatttagaagacttattaaacttacctcggcggggaggggccaagactgccgactagaagcagctctggtctgcagctgccagcgagaggaacgaggaatgtgggtgatttctgcatttccaactgagatacccagttcatctcactgggactgactagatggtcggcatgacccacagagagcgagaagaagcagggtattgcttcacccaggaactgcacagggcagggggacctccctccccagccaagggaagtggtgagggacagtgctacccaccaagggtactaagcttttcccacagatttttgcaatccacagatcagcagatcccctcgggagcctacaaccaccagtgccctgggtctcaaatacaaaactgggcagaccaatgacagctgctcccgtcggcggctgtttgggcaggcactgagctgcaggaatttttacatactccggcagcacctggaactccagtgaggcaggagaaatgtccacttctgtggaaagggggctgtagccagggagccaagtggtctcgctcagagggtcccactcccacggaaaccccgcaagctaagaaccactggcttgaaatccccgctgccggcacagcagtctggagtccgcctgggacaactcagttcccagggggaggggcgaccgtcattactgaggctttagttggagg

SEQ ID NO: 479005 - DNA, 1000 bp, Homo Sapiens; identical to SEQ ID NO: 346673

SEQ ID NO: 479006 - DNA, 1000 bp, Homo Sapiens
gaggtggggtttcactctattgcccaggctggtctggaactcctggcttcatgagatcctcctgccttggcctcctaaagtgctaggattacaggcttgagccactgtactcaacttaagttgttcttataactaaattataattatgtatattaataaaattttccttaaggaggggagattaataacaaaattttaaattttttttgtacttagatctcctataaccccattagaaatatttactaagaacataaagtgacttttgtttctcataaattttaagatttcaattcaattagataaagtaccattttgaatttaagataacaatatatttctaaagccccaaatggaaatgtcaatcttagcagtaactctaaagtccaagtttattaccctttattctagaaagaaaaaaaaaaactaattttgtctccctcagtcagccaattaaaacaatccaaaaaagcttactaaacaactgcctttgtaacactgttcatgtttttagaggtgatcaggtatagggccaagatcaaggtttctaacacttattcaacaagggattaaaagcagagtgccacgcaaatcaaaactctaaatattctcaaagattagctgaataaaatagtcataaagttagattcacagggatcaaagagcttcaaattctaaaaatcgtttcccagtgtaacttcaaataaatcctttgtgaatattcctagtttcttctatacattaagaaaacctaaaaggcaaacaagttctagataggagaccaagtattagttgttcacatttgtatagaacattaaattttagttcttataacccaatgaagaaatacaaatgagtctaagagtttgagcaaaaccctctggggtgatcaaaacaaaactgcaaacttctatgagtctcaacttttcttccataaagagtccctggcagcatgtctactgtacttagagaagcatgcaaagaattaggtggtttttta

SEQ ID NO: 479007 - DNA, 1000 bp, Homo Sapiens
aaacgttttaaaatttattaaagggcacaggttttcaaaagcttgtaaaatattatataagaagacatccatttcagtgttatacatatcttagccttggtacaagaaaacactgactggtaaaagctagaagtacagaggtcaaagaaaacatatttttcaatacccattgtttaataattcaatgcaaaccttcctattacgcctctaaaaaaaatttccattgttctgagaggagaactggggagacgttgcagccgcctctgggcactgaagacacagcttgtgcagttctaggagccgaagacgttcaaacctgctctcttgtcctgactgcaaccctggtggtgagagacaaatactcttgcacatctgctcgatagacagttgtggatggtgggggattccttctgaacagatttgtagctgctgtgtaaacagctgggtttaagaaatagctccatttgcactagcctattgtttgattaaagaatttgagtgtgtggccttgcacctcaagaaggccaaagggattgattattggctgggtgaaatgctacctttaaaaagcactgtaatctcttctcggccttttggctaagatcaagtgtaaagggcactgtatgttcagggacttcaatctcaccctcattctgcttgagtatttctgtcccacttgtccttcagattcttcttatttttattatttgtggctagatggggtaagattcataggctccagggaccatatctgttttatttgccagtgtatactcggcatatagcatagtatttggcacatggtaggtactcagtggatgagtaaagcaaataatcttgctgtatcctgcttagggctctgtgctggtcattgtccagagtttattcaagttcattgggttgaattccaaacgaagcaggagagtccatttttaatgatacgtggacaggttgccactgccaggcccttcttattaccatttggaaagcaaaccactgc

SEQ ID NO: 479008 - DNA, 1000 bp, Homo Sapiens; identical to SEQ ID NO: 346674

SEQ ID NO: 479009 - DNA, 1000 bp, Homo Sapiens; identical to SEQ ID NO: 346675

SEQ ID NO: 479010 - DNA, 951 bp, Homo Sapiens
cagacctgctcagggaccgggttcgcactttctctcaagctctggagcctgaaaaatgagcattccccggggacgacccatgtaagaatttgggctatattcagcatagtgcagcggccagcagccctgtctcggggtggggtccggaggcccccatttctgcttgcccctcactgccacataaccttgggtcagagtccctcatcctctccctccgccactgtgcacagctgcaaccgtgttcacttcagcgagcaacgagccccgtgacccccactcagggtcaggactcaccgcagcccctctgcgcaagccccgaggctctgcgtggcctccggatgcgcggcctttcctaacccggggactccgcacgtgggcgccaggcccggaaggcgcggatgtgagcgctaccttcggcgtcccgcagcggcaggaggggctgggcggcccgggcttcggctggcggcggggggggggtcgcaggggagtctgaaatgaggcggccgacggcgcgcggggcctcctctctccgctccatcccgcacccccaattccagcttccatccccagccgcgactcccggtcggccgttccgggcgtccactggccgcgtgtcctgggggcgccagagaaggagaacagcggagaaaagagccccgggccgaccttccggaccggcgggcccgcggggaagcccgggcgcggcgacgtggcttgtgagctgttggaggttaagacgcggccacgctggacaacctcgtgcagatgggggagtggcaggcactgccggtcctttcccagggcttctccaaagggctggtctctgagggcattgacagtttccttgtcactgtcccccagaaatgaccacaggagaccagaacactgaagccagtgatttctgtttggaaatagggtcgtcttctgctgctgacccccatcaaatcccat

SEQ ID NO: 479011 - DNA, 1000 bp, Homo Sapiens; identical to SEQ ID NO: 161471

SEQ ID NO: 479012 - DNA, 1000 bp, Homo Sapiens
caaatagatgccttttattccactgtgaatcaaaatgatgccatgtcctgtaattaaggatgttattgaccaggttgaatgggcgccaaccatgccttgcctttgtttctatgacagtcatttcaaagttcagcatcttaagtctgatagtcaccttatttggcaaacattcaggaattctgcttccaggtttatttcagggtgacagaattttcatttaatctttatctcatgttaggagacacgttaattgcttgaggccagacacacaaatatttgtgtgcttgaggcaggttactgtgcagacaaaaatagtcatagatgaaagaaatatatatcctaacatagtgacttgagctaaactatcattgagccgaaggttttttttttaagttgtcaaatgtaaatatatgtgggattgagtcaatagataacattagcttattatttctttcctgtggaagccatatgcaaccattagtctttttaaatattaacttctcaaactgaccaggtaactagctcctgtgggttctgtataatggtaggatgaaatggtccgttgaaccagcatcttgggtgggaggggagcagaaacacatttagagcaatgatacaaacacctctgaaatcagcaactcaactctcagatacacagggcctgtgtggaatctcctccttcgggggcactctgcccaacttccccagctgcaggaaagaagacatcaccctaaacactgagagaatgcctgaacttgccgtgtcttctctctcgcctgctcgtccacccccatcaaattctatctttgttttaggccatgactcacaacccacccccacccttcagtcagctgtgactcatagcagaggccagataaactgaaggctgaacagcaggggtgggagagagctgcagtggtttttttttccctcttgctttttttacccagtgagaaaagctaggtcaaatggtcaagttgtgggaatctttgagggttta

SEQ ID NO: 479013 - DNA, 1000 bp, Homo Sapiens; identical to SEQ ID NO: 346676

SEQ ID NO: 479014 - DNA, 1000 bp, Homo Sapiens; identical to SEQ ID NO: 346677

SEQ ID NO: 479015 - DNA, 1000 bp, Homo Sapiens
atcaaacatgaatttcactgttttcctccccaaatctaataagagcatcaatctttgatctttcaaataggtctccgtttcttctcactattctgttgaacttgggcagccttttttatgtggtccccatcagagctgtcctttatcaagttgcattttgctctcaggactgacagcatctggacattaaattaaaaattacttagacatactattggtgataatgttgggcactttgtgactcacctcatactgtcgtccttaggaaaactgtggctagtccagaccaggcataggtcttcttgtggagggcatagatcagaaagcattagagatagaggaaggtgttagctagtgttctgtatacaaaggagcctgtaggacacagtgttaagcaaaatgatccagcttccttttcttcaggacttctcagagccttgaatatagtagtggacactgactatcctaaagtgcaaatgaactataactgcaagtagcccagtctggacaaggagggaggccttccaaaggacacagtttctaggtggttagttttggacatcctgatatatcttgtcaggggcagcagcaaagctttggggcagccttcctgaagatctgagctgaggaagggtcaacgtggagaagtgggtgtgaaggggggaaggttgttggacattgagatctatccattgatctattttgatcaatgtctgtcaatatccttatgtcctgactacctggttcaccctctggctctgaaaagaaccactttggtttctgatgttctggaggcccaccagaccctctaatgacctgagcactgggtctgtcttcctggcacccatcaccagtgtcacatatatgtcccagccacaccatccatcatgtcaaattgtatgtacaactgtcttctccattatgagctactgaaggcaggtcttgtgtctttttcttctgtcgcctcctagcatagcaccaggcacactagttgtgttga

SEQ ID NO: 479016 - DNA, 1000 bp, Homo Sapiens; identical to SEQ ID NO: 346678

SEQ ID NO: 479017 - DNA, 1000 bp, Homo Sapiens; identical to SEQ ID NO: 246650

SEQ ID NO: 479018 - DNA, 997 bp, Homo Sapiens
ctcctttcctagttgtgacaattgcaaacatatccagacattgccaaatgtcctctggggggcaaagttgccccagctgggagccactgctctgcaggtttggacactgtgcctgcaattccatgcagcatcacgggctattgatcatgtgtcagacggagcttaaattggtcgatcgcatcctcaagtagccactccagagcgtgattatctgacacctgtaatttaccatcctggttacatgaggggcaaacgtggaattatgcacatcagcgggcccagggcctgttttccatggactcagtgttcctgctgagcgtggcctccgtctccccgaattgttaaagacattgacgcctcagaactgactctgcctccacttaatcagctcaccagaaaattacaataaaaatcatctgccacttatgaaattgccattaaaatggactatttcctgccacttggggacaggctgctgtttctctttcagcatcggtatctgagatgctgtctctgggaaacagcgatcatagatgctgttgagacactccactggccacggtgtgtccctggattaaaaccaaagtcacaacaacgagtctgaaatgtactgaggaatccattccaaagatggcaagagcaatttcaaacagtgctgcgagggccctttggggtaggacaggcctttcctggctatcaaggcgttgatcagctgagagcacaggccctgtgccgccacggctcctccaagccagcactgctcactccgtccgtgaaatcccagccaggaaggccaatgtatctgtgccagtgcctgaaatgtcagtatcacaaagccaacaggaggggtgacccggtggagctcagcaaagatgacataaaacaggccacaaagctggtttgccaggatgcaggaggatttgtctgttttctcctgagaacggctgcttagctcactccacacagcatttccatgcttcatctgttcctgcaataa

SEQ ID NO: 479019 - DNA, 1000 bp, Homo Sapiens; identical to SEQ ID NO: 346679

SEQ ID NO: 479020 - DNA, 618 bp, Homo Sapiens
atgtccctgtacctcactttactcatctgtccaataggagggtaagagcaccccaggacactcctggtgctctgcccagacctccagggatcccttttacccattttgtgtgtgcatcccgcagcttctgtgtgctttccttctacctgctcgcacctgcaaccttcttcagacacctgctaatagagctgcttcacctgcaaaggacatagagttggaagtgccggggactgcgtggtgctccctggagccaatgcacagcatgctggtcttcccatggtggaatacaggcttgcagggttcccacctgaggatggatgatgtgggactctcgccgtggctgcaacagataagaccggcactgttgtggagaagcttagggggtttccagggcctcccaagcttttctgctgcctgacttctccctttggctgttgatggcagcaagcccgcaccaggagtgagaatgaagggggcatcctgggcattaccccccttccttgtgactggtggggctattcctggaggaattaactttggcaccattcagggaagctgtgaatgaaaggcagctgcacagacatcataatctgtagccgggaacaggcaggccgctct

SEQ ID NO: 479021 - DNA, 1000 bp, Homo Sapiens
ttctcatctgaaatgtttttattataaatgagagaatagaaaatagatgaactaaacattcaatttcagacagtagaaaagaaaaccactataagcccagaggctgaggaagcagaccgttgtgcgaggggagatgaaagccaggcttggcttggcagacggaaaacagccgctgtgataaacccaaggccgaaagccgtctccggggagcagctcgcatggcacctgggtgacctgacagctttctgacctgaagccaccatccggaatgtgattcattccctctctgcccggaggatccgtcccaggagggtcaggagcagccctggggccggatgaccacggcgtcccctctctgcccggaggatccgtcccaggagggtcaggagcagtcctggggccggatgaccatggcgtccccggaccattctctggagctggcagcctggggcaaggcacgtggcctctctgtgcagcacctggctcttgtgtaacacggatggtggcaggctctgggcagaggagggtggagaggcctaaggtgcccatgctggtctgtacgtcggacggtggggccggcctgcgccccgcaagcaggagctgagccctgggcctgcagattctgtggtgtgtcggtgcagtgctcagcatcagccgtgacggtcacactggcactcgctgtctgtgtcacgcattcgcatccactgtcagcgcgtcacagtggcgttcgcggtgaggatggggcgttgccgttggccggtgtctcagcgcactggctgtcgggctggtccccctgggttcgctgctggcgtgcttgttctccgagcactcgccgttcacgtcctctccgttccacactggcctttgctattttctccacgcgggtcttatggatgctgtccgagctgtggagcatctgccctcctggccctcctgcagctcgggctgtgctctggatgagcgagggcaacgttagctgagcgtggggggccttgaggtc

SEQ ID NO: 479022 - DNA, 1000 bp, Homo Sapiens
tatggtttggacctgtgtcctctctgcacaaatctcaccgtgaagtgtaatccccaacgttggaagtgggacctggtgggaagggattggatcatggtggtggtccttcacaagtgggttagcgccagcttcttggtgctgttctcatgatagtgagttatcgttagatctggttgtttcaaagtgtgcggcaccccctctttttctctctctactgctcccatgtgagacgccttgtcccgccttcaccttccaccatgactataagtttcctgaggcctccctagaagtggaagctgctatgcttcctgtaaagcctgcagaaccgtgagccaattaaacctcttttcttcatgaagtgcccagtcttaggtatgtctttatagcagtgtgagaatggatgaatgcacgaggtcttcaggacaagcccgatttcattggttacgagatgcatgtttttcattctagcccccagagacctggatacgttgcacagatgctgacagcaggtggcagtgtggagcagcggtgtgacacctgcagggccctccggggacaccacataagggcagccacagtgtcccggagcccatgcagtgtgacagccccaggtaactctccagccagcactccacccgtggaattacagccgactgaagcacctctgctacattcgtcagcttgataaatgtccaaggaatgaaccaagcacagggaccatctcttccggtagcttctcaccatcacacacactttgcagggccgagggctcttcctggcccatatctagcacctagatattttattcacttatgttttgaatatttcatgggtccttctcccccagaggcctcagagcactcccagaattggaatggaaatacacagtgtgtccttgtcagctgtccgggccgccgcgttcaaagggcaggacatagtagcttctgctcaaattagaatgatctgtctcgtcaagcggaagatggttgttgagactttg

SEQ ID NO: 479023 - DNA, 1000 bp, Homo Sapiens; identical to SEQ ID NO: 346680

SEQ ID NO: 479024 - DNA, 1000 bp, Homo Sapiens
tttttttaaagcatttaattcttaccacagtcctttgacatcttattatatccattttacagataaagaaacaggcacagagggtttaagtaacttgcacaaggtcacacaatcacaactagtaaagccagaattaaagtccagtcagtctgcattcaaagcctgtgctcctgccccaaagtgacaattagtgacttaaaggcaagaaaaacagaccctcctctacccaccatcctcatacacagccttccagcccaggatctgaaccatttattcattttctctcatattcattcattcattcaattcttcatcacacatttagtgaagctctgccgtggaatgttcacacagaaggtacaaaaatgaggcaggtgtattttctcccatctaacaggggatgaccacatgaaaagaactggtggcctgtgtgtcccatggtcttacagggcagtggtggagggtggcccggtcatccactttcatcttgaagcatttctgtggaaactgctatcagccaggtggcccatgacctaagttgacccaagccaactgaagggaggatgtattctatgcaccgtatggaattccacagggtgctggtttccccagctgctgctggtggtcatcatgtagtgaagatatttcttttttcagcataggcctcaaagggttccaaatatccacttgcagattctacaaaaagacgggttccaaactgctcaatcaaaagaaatgttcaattcatatgatttcatgtatttggaaataaaaactcatggatagtgactggaagtggatcagtggttacccataaattcattgccaagtgcaatgtccagacgaatatttcctaggttttcttccaggatttttatagtcagaggatgtaatcttatgccaacgggtcttaataatcaaatgactccacagtgagaatcattactctgaaaaattgattttgttagaatgatggaaatttaaatatttgaaagtaaaa

SEQ ID NO: 479025 - DNA, 790 bp, Homo Sapiens
gttttcaattatattttattacattttctttttctcacctgtcatttaccagaactccttgggtctccagaaatcacagtgcaccctgatgttgtgcctcctcctccaggaggccctccctgatcagcctcccctctattagggctgattattctggttcctaacacttgggtgtttcattgtccttaatgtgtgcatctctgcgttgtaggtagaccttgtctttcaagcaggctggagcacagaggctgtgtgggttcctccccggtctgggccttgctctcctctcctcggctgccgcgggcggggaccgaaggtgcagctcggcctggcgatgcggggacatgagtaaaggtctggaggacacggagctggccagggtccgggttgcacgccccgcggccacaccggagtccacgctgcagcgggggtccgagcccgttttcagggtccagggacgtggcggcctggccctcagccccgcctcagggctgtgcccccgactgcgcccggctctgtccccacctccccagccccaggtaagggcgcgcgagaagggacgcggagagcgccggtcaggaagcccggactgagcgcgggggctgggatctgggatccaaacgccgtggccgcgggcccgcgcccgggcagacccgggctccgctctcacgtcacgcggtacatgggctacagttccttgtccgagggcttccgggagcggaatagtcctgcttgctgcccttgaagaaccagggtgtacactaagactgcaagagcagagtccagccat

SEQ ID NO: 479026 - DNA, 1000 bp, Homo Sapiens; identical to SEQ ID NO: 346681

SEQ ID NO: 479027 - DNA, 1000 bp, Homo Sapiens; identical to SEQ ID NO: 346682

SEQ ID NO: 479028 - DNA, 1000 bp, Homo Sapiens; identical to SEQ ID NO: 346683

SEQ ID NO: 479029 - DNA, 1000 bp, Homo Sapiens
taatatccgacatttttattgctcgaatatttttgtaataaggaaaaatagttcagtacaaatttatgatatttttacagtagattgaaactagtattttctaaatatttgaattttccgatcgattgattttatccattatcctcttctaaagtatcaatccagtggattttctaggatcaaaaattagcaacaattgtatatgtactttcactatggagaatcttgtgtgcacctacagtataccaggtcatcttaggcaggcatgtagttacagtattcgacactgtggggttatctgatgacctcgcagaccccgtaacgcaggttgacctgtgtctgttttcgaggacaatgggagtgcttcctgacactcggcctcatcagctccatgggggtcaggcctgccgggacccctgctgctggcttcatccttctcttcggaagaattccctttttccccttttcccagtggaaggctctgctttctgccacactgcaggccaccggaaaccccagctttctctggccccacacaggtctttgagaaaagggaaagatgaacatggccaagccgccatcaggtgaaggactgagccttgtgtgcccatccttggccttccctggtgtcactgttcagcagggaatgttctggagcaaagaggccagagcaggcggtgcttccagcaagtgcagccacaggtgagagacactcactgttctcatcgtgatcaactcaacagtgcacagctctgtgtgttccacagctgggaactggctgtgctggtggatggacggcaggagcagcaggaaggatattctcgctgtgggccccactcctggcccacaaatgtgctcagtttgcaaaaatccatggagctggaaacttgcgatgccttcccctttctgtgtgatgttttctgtcatcaaaactttctcgagaacacgcaggatagaacatgaacagcttcccttgctctttccaaaggacctgatcaga

SEQ ID NO: 479030 - DNA, 763 bp, Homo Sapiens
taatagagcaattgcgaattatcgaagtaattgcgagaagttgttgcagtattctttccactggatctttccgaattcgtatctattacacatgtgaatgacagccctcgagtgtgccagagccgaaaacgatggctacactctgcgctagccaggatctcccgcccctcaataaactactaaattccatcttcctctccgaagaggaaggaaatacagagcagaggtcacggctgccgtctcttttcgtcgcaatttcttttccagaacggagctggtgccagccctgacacgctgcgcgttccccacggggcctcttcttccccttgagggttccgcgctcggagtcccgaccacacgttttcgcggatcccggcgggaaggaaaggcagtcggctcctcccggctccttcatccgaagcacctgccagggtcccaggctctggagagcagagtccacgaggcagggggaaccccgtcctcacaggttagagccagagggctacgtctccacggacttagatttcctccagtccacaccctctccttgacccactatgtatgcttccttgtagaggggttttcctggtcacatggtcatctctcttttccgtggtcttcctcctgccgaggctgacagccgtgctgggtgctgagacatcaggaatcttcaagcctgtccctgacatcacttctctcctttcctcttccccttcccccttcaccgctagaggtcaaacactgcggcggcgttctccgccaa

SEQ ID NO: 479031 - DNA, 1000 bp, Homo Sapiens
ttgatatcctatatccatttattagatgagatgagaaagacatttcccttttgtagagttcttccccaaaacctgtaagcccagtctaacccaggagaaaacatctgacaagcaaaatttagtgacagtttacaaaatacttaaccagaattcctcaaaattcaaagccaggcaatacaagaaaagaataagaaactgtcacagcccaggaaaaacaaaggagacgtgatgaacaaatgcaacatgttatccagattggaatctgacacagaaataatagaatattagtaaaacaattgacaaaatccaagtaatgtctgtaattcagtcaatagtatggtaccaatcctcatttcttagttttgacaaatggaccacggttatgttaacattaggggaagtggggtgaggggcatgtggagactttctctgtaaattttctgtgaattattattattccaaaataaaaaagtcttaaaaatatacagaagcaatcctaaataccatatagtatttgccttagcctattaggcacttctataacagaatgccgtaaactgggtatttataagcaatagaaatttcttcttcacagttctggtggctggaagtccaagggccaggtgctggcaggtttggcatccggtgaggccctgcttcctggttcatagatggtgtcttttcactttgtcctcacatggtgggagaggttaaagagctccttttgccttatttgataagggcactaatcccattcatgagggctccaccctcttggcctgatcacctcccaaaagtcccacctcctaataccaccactttgaggctaggatttcaacctaatgaatcttagagggtacaaacattcagtccatagcagtatctggactccagaagagacacaaaacctactgtgttttataaggtaaattctaccaaatatgtaaggaactgatcattcttatgttttgcaaaacactccatggcatggagaataatg

SEQ ID NO: 479032 - DNA, 1000 bp, Homo Sapiens; identical to SEQ ID NO: 346684

SEQ ID NO: 479033 - DNA, 1000 bp, Homo Sapiens; identical to SEQ ID NO: 346685

SEQ ID NO: 479034 - DNA, 1000 bp, Homo Sapiens; identical to SEQ ID NO: 346686

SEQ ID NO: 479035 - DNA, 1000 bp, Homo Sapiens; identical to SEQ ID NO: 161475

SEQ ID NO: 479036 - DNA, 1000 bp, Homo Sapiens; identical to SEQ ID NO: 346688

SEQ ID NO: 479037 - DNA, 1000 bp, Homo Sapiens; identical to SEQ ID NO: 346689

SEQ ID NO: 479038 - DNA, 1000 bp, Homo Sapiens
gttaagagtgttttttattatttcaaaagtgcataccaatataaaatactcagtccctgtggaaaacaatttggcagttcctcaaaacattaaacatagaattaccatgtgacccagcaattccactcccaggtatatccaagagaattgaaaacatatgttcacacaaaacctcctacattcatgctcagaacagcatcattcataataactgaaaagaggaaacaacccaaatgtccattcactgatgaaaggttaaacaaacatgatctacacaatggactattatgcggccataaaaaagaatgatgtactgacgcatgctgcaacttggatgaactttgcaaacatggtaagtgaaaaaagtcagtcgcaaaacgccacagagtatatgattccatttaaatgaaattcccagaacaggcaaatccatggacacagaaagtggattagtggttgccaggggttgggcaaggagagagtggggagtggcagctcgtgtgcactgggtttctttctggagtgttgaagaggttctcgaattagataatggcgacggttgcataactctgcggtaggtattcttaacatccccattttactgatgataaaagtgcgtgtcagggaccagctctgccaggtgcccagcaaccctgcacatctccaccgggctcgacggcaacctgacctgcgtcttggtggaacaccctgcaactcctcatggagcaaggggcgttaagtggccctgtgcatcgctgccgtgagtggtctcacctgcctccccacccttttggaactgctgcaaggccatttctcatcgatcttcctagtttctgttgagcgcagcgctttcctcctctctccccactcccacaagttacgtctgcaggtgcctgctaagtctgtagagtgctcggttgcagttgagagctggctgctgcacagcagggcaacccactgtccatgccatctggtgtcccaaccttccagccttgtgtcc

SEQ ID NO: 479039 - DNA, 1000 bp, Homo Sapiens; identical to SEQ ID NO: 346691

SEQ ID NO: 479040 - DNA, 1000 bp, Homo Sapiens; identical to SEQ ID NO: 346692

SEQ ID NO: 479041 - DNA, 1000 bp, Homo Sapiens; identical to SEQ ID NO: 346693

SEQ ID NO: 479042 - DNA, 1000 bp, Homo Sapiens; identical to SEQ ID NO: 346695

SEQ ID NO: 479043 - DNA, 1000 bp, Homo Sapiens; identical to SEQ ID NO: 346696

SEQ ID NO: 479044 - DNA, 1000 bp, Homo Sapiens
gccactgcaacaactttatttctggagagaacatgtgctctggcttcctgcctcttcctactctggggaaactggggccaatctcgaagactgatctcctagaaatgtccttttttattccaacagggtttgatgcagctcaaaatacaggctcagtacttgctggcatcctgggaaaaggcacttacaatcttgaaatttgttaggttcttcgcagctttaactgccgcttccttctctgtgcctccgtttctctgtcaaagatcctgtgggcagtcagggtctgggccaggccagtgagcccattcatatggcatgagccacaacactgttcctcttcctccggcagcagcccgttttgcgtgtcccctcactcccattctactcttcggcagaagcatctcagtgttggaaagataaggatttcttccttatgatttccctgcaaacccactccgatggggctggagagtgctctctcactcagatgaatctctcaggggttgtccagcaggtgtttgccaacttgaagagctacctactatcacagacctataaaagtacgcctgtggacagactgaaaacaaacaaacaaaacacacacacaaacacacaaaacaaccgcacactgggagaagttctaggcaatttccttgcaaataactgctttgaaaattactgttttaaattggcagaacactaaggactttgaacagatcatcccttttactcaatgttttcataaccttgaagtgaaggtggagggagcagtacgttttaaggtgccaggattacactacggggtcagtgctcccggatatgaactttctttttcagaccgaccttgggacctacagctttgtaagttactcatacaactccatcaaatgttacaggtaggtcagaggacattcaggttgtttaagcctctataaatgactcaggcagcaacaatttacaacgtctttgtttctgctatgcagtgccctcctgctagaga

SEQ ID NO: 479045 - DNA, 1000 bp, Homo Sapiens
aatttttaaaaaagttttttttaaaaagaaaagaaaaatccttaattctcacttttcaaaatagaactcttaaatagtaattgatagcactttacctctgttttcctgataaaaaaaattctaaaagaataaaaacaatttcatcctgcccccatattataaccagaataattgaaataatatgcttcaattgatagtaaagtagcatttatgtttttggatcaatgaagctaagccagcactaagaattttcttactattcctccactacattacagttacttcctcatccctatacataccgcaataatgagtcagctacatccatttagattatcaacccaacccaggaaaagctggtgcgacgttgctccgcacaatggagggccttaggatggcaatggttaggttcctgctctcctgctgcaccaccatttctcccaaggccttgctataggtctaagtattgggacaatctccaatccgcttgggagtgatctcgtcaataatggcgttgtctcctttgatatctcctggagggctgtgatgagggccactgatgctggctgttggggtctccatttccctgcctctcacccctgcgccttcagggcacacgccacctttccttttttacatggcagactagctgtgtcttctggtggccacgtagcttcagaagtgtggtttttagtaggtacagatctactaggaactttcattcaattaaagcttctaggaactttaacatcctcctttcattcatttgagcctgataagaaaggagtctcttgggagagaagcaagcatacaccttggggccagacagcccatggtcaaagttgaactccaccactgttcagctgtgtgactttgggcaagtgacttttcctctctgatcctcatgatcctttttggtaaaaacagcagaatgacaggtcattcaatgtcttcaggattaggactcttgcatcacaggctggcagcactcccgatgtct

SEQ ID NO: 479046 - DNA, 1000 bp, Homo Sapiens; identical to SEQ ID NO: 346697

SEQ ID NO: 479047 - DNA, 1000 bp, Homo Sapiens
tatgtccgttcatttatttgtttatttatttatttatttgactgctcttcgccgagctgctgccccccagagccctcgaatgtgctgtgctggcataacaagatccgggaatggtcaggccgaaggattggcctgaagtgtggcggtttgaacaggcgccaggagaaaaggccttttcccaaagtagtagcagcaggctgaaaaaaaaaaatctacagccttccccgaggggcaaatatatgctatatatatatataaactggaaagaagagtgtttcctttggccctcgtctcgtattttcagcctatgtctagcgtacagatttaaactggggtgaggtgataagtcataatgattggaaatgtagccaaaggtagaactgttcagctatacagggaaggctgagataaaggcaagatgagtagcgagccttgacggagggagaatggaaagatcgggtgtatcttcctgctcgagtccactcgcccccccccacccccccgcccccacacccgtgctttgccgatcgaattcccgggctaggccatttcactgcacatgcgctggacctctggcgcgggtgtgtggcgggcgctgcgggaccgtgagctgtgcggccggcttgcaccgcgcagtgcggataaggtaccgcgcactgcttctacgcctggatgcagaggagcttgggaacctcatctcaagaagcaggaaacacacttttctttttcaggaaaacatgtattaaaagcttcaactgtcctttctgatttgcaaaccctattccgccgaacaagcagcatctcctcgttgccaatgaacactctgaaggttgttatgtggatcagaaatgtcacatcttgggcaccgcttccctttgagtcgttcttcaaggcggggaaaaccatcctacatccagagagcacaacttctccctcattctgcaaaactatcaagtctaaaggaccagtccctagaaagagggcatctgttcacgccatt

SEQ ID NO: 479048 - DNA, 1000 bp, Homo Sapiens
tctttattcattttcattttatttttcgctttattttttctggttttccaaagaacacacactcagcatagaaaatttggaaacacacacctaaggcctccatgaactattggttggatgaagcgtgtaaaaacgcatgaaggggccaggcgcggtggctcacgcctgtaatctcagcactttgggaggccgaggcaggcggatcaggaggtcaggagatcgagaccctcctggctaacacagtgaaaccccgtctctactaagaatacaaaaaattagccgagcgtggtggcgggcgcctgtagtcccagctacttgggaggctgaggcaggagaatcgcttgaaccgggaggcagaggttgcagtgagccgagatcgcaccactgcactccagcctgggcgacagagcaagattccatcaaaaaaataaataaataaataaataaaaaagccaaacctatagtcctgttacacagacgccactgttactattgataattttttgtcaaaatcctcccttcctccctttcttttctcgatgccttttatttattttttttgaggcagtgtctctctctgttgcccaggctgccaggccgagtgcagtggtgggatttcagctcactgcaacctccgcctctcgggctcaagtgatccttccacttcaacttcccgagaaactgagactacaggcctgtgccaccatccccagctaatttttgtgtgttttgcagaggggacggggttttgccatgttgcccaggctggtcttgaactcctgggctcaagcgatccacccactttggcctcccaaagtgcctggttttacaggtatgtgccacagtgcctggccgatgccttttaaaatttgataataccctgctttcgtagctgaatagaaaacaagtatgttccacatcattatgcccgacaggcctccccggatgggagagtgggctggtgcattcatcaagcaggtgagccagtctggcctggtgg

SEQ ID NO: 479049 - DNA, 1000 bp, Homo Sapiens; identical to SEQ ID NO: 346698

SEQ ID NO: 479050 - DNA, 887 bp, Homo Sapiens
atctactaaaatgtgcagaaagaagaataagtccttctgggtcaggggaggtagagagcacaagcatgaataagacatagatgctgccttcagtgaaatttgtggtctccgagggaagacagtggataatgcaggtaggagataaatgtccattatatgatgaaaatgaaaattgtccaactggatcttcagaaaaccgctgttaatattccattgtttctgagttagaagcacatgaaataattacccttcactatttaccagttacacaggcatacactgatttgttgaatttgcttgaaaagtagagccgaagatcctttgaaaatggaagaggttttcatgggggaagagatgagtgggggcgaatgagaaacatctcctttatatggcagatgcggcagtttcttgatgatggggagaagcagcttaacgtattaggcactagaccccagcgtccagtgaccaggggataatgctgtgtctccgcttgcgtggaccgtcgctcccaggcttggtttctcgtgcaaacccgagcagggcggagcagattaaataaagacacctcgcgcctttaatccttgaccgcaaacactggcgtttttgtgccccggatttctgaaattcttggctcggggaaccaaggcagggggagggtgggcttgtaaaaacttcccaaagcagaaatccgagctcctagcccctccccggccccagtgacacctggattccagggaaggggggcagccggaggagaggcgtccccaagggttgcgggcgcttcccaggggtgactttgaacggctggctccaagccctaccgaccccagccaaggaacaggctcagcagcctgaaagcctcgcaggacgcccctcccagtaaccat

SEQ ID NO: 479051 - DNA, 1000 bp, Homo Sapiens; identical to SEQ ID NO: 161477

SEQ ID NO: 479052 - DNA, 1000 bp, Homo Sapiens
tttttttttttctttcttttttttttttttaaagctggagggtggtcagtttttaggaagggataccattatgaagctggtgagctttcatgtcaaaactgcaaaggggaagagggagtctggtcatggcctcattggcatggtcacgattggctgaaggtaataaaggaatgagtcgtctgtttcttgttttccaaatctgcttactccttacgaaggaattctggttaaaagtcagtaagtaaggggcatactgagatgtgtttggcctcctgtcccatcatggccaggaacttggtttttaaggtttctcctgggtccccttggccaagagtgggtctgttcagtccgttgtggggcttaggatttgatttttagttctcagcacctactatgcactctgagcaaaagtggttcagaggacagactcttctctgcctggggagtttatagcctagtcaggagtgagataggaataaataactataccaaaagtttcttaatcacaaggccattaagtgctgagaacgggaagtgcagggagtggctagagtgtccaacagggtgacccagcctcctctaagtggtcagggaagacctccctgtggaggctcatcttgagctcccctgagagcagagcctggagcagagacctaggtgcgggagtttatttgggagcgaacgcggggagcagcaggggaggagtggggaggtgacaccaggcatgaggaaagccagcataaaggttgcaatcacggtcgttcctgtgggcagctggactggctatgcctgcgaccacctgacgaagggacagacggccttctggtagtgtccatgcaaagggacaagggacatcaccaagggaggcccatgcacctctcccagtgtgcttccagtcaaaggaacctaatggcagtcgtccagcccatccagagttcaggcccagatgagtcagctgcatcaagtgacattttcaatgcaactgtggagggccttaggg

SEQ ID NO: 479053 - DNA, 1000 bp, Homo Sapiens; identical to SEQ ID NO: 346702

SEQ ID NO: 479054 - DNA, 1000 bp, Homo Sapiens; identical to SEQ ID NO: 346703

SEQ ID NO: 479055 - DNA, 1000 bp, Homo Sapiens; identical to SEQ ID NO: 346704

SEQ ID NO: 479056 - DNA, 1000 bp, Homo Sapiens; identical to SEQ ID NO: 346705

SEQ ID NO: 479057 - DNA, 1000 bp, Homo Sapiens; identical to SEQ ID NO: 346706

SEQ ID NO: 479058 - DNA, 1000 bp, Homo Sapiens; identical to SEQ ID NO: 346707

SEQ ID NO: 479059 - DNA, 1000 bp, Homo Sapiens; identical to SEQ ID NO: 346708

SEQ ID NO: 479060 - DNA, 1000 bp, Homo Sapiens
aatataatgctatattggttttattgtgctgccataacaaattaccaaaaatttagtatcttaaaacaacacaaagttattgtcttatggttctataattctatataattctataatgtcttatggttctataatataaggtcagaaattcaaatatgagtctcactgcactaaagttaagatgtcagtaggaagccagatgtggtggcacatgcctataatcccagcactttgggaagccaaggcgggaggagtgcttgagctcaagagttcaagaccagcctgtgcaacatagtgagacctcaatgctactaaaaataaaaaataaaaacaaagatgtcaacagggctgagctcctttctggaggctctggagagaatgttcccttgctttttccaccttccaaaagccacccaccttccttggctcctggcccttccctccatcttcaaagtcaaaaacaactggtcaagcccttcttacagtgcatctccctgagcctgttttcatcatcacatctctctctgacccagctaaaaaaggttcttctcctttaaggactcatgtgattagcttggacccaaccagataatccaaggtaatctcctcattccaaggtccttaacctcaatcacattttcaaagttcttttgatgtgtaagatgacatattcacagattccagggattaggacctggacatcttttgggaacttcatcaatgggactagacttccagtccagaaccattgtgttgtaccaggtaaatgtccttgtcacctcttggaaaggtccggttcccctgtagcaatttcagtgtcagtcacgctgatcttgggagggaaattctcccacagctaaatcatcaaatatcacctcagggtaagcccccaaatattcccctcataacaaggcttaatctgtcttcaatcataatcacctaacggattctttcatccagatgtgtcaagctgacccatttttctcaaagaggtaaagaa

SEQ ID NO: 479061 - DNA, 1000 bp, Homo Sapiens
ttgggattgatgcagggctgctttttatttttctaagctgaggcatgtgaaaattaatttccagttactagcaacaatatggtgttacaaacaaaagaagttgtacagcagatataatatagaattaaaacagaatagatttaacttatggaaaggcatgtcttttctcctgtttttcttgatttgctgaggaatggtggaagtaaggtggtctggcagaggacacgaactcacatttagaaatctctaatcccatccaaacctttgcctccataaaccgtctgagccaagtggttgttgctcctaattttagggatccttgggcatgaagatttcacagtcttcctggcagcttcttctaaagtttaatcatgcttaagttatgtttgagcctgagccgcccggaggattgaatccaagcaatgaagaaaaagcagcctgacctgtctgccttctgggtgggctgtgccttctgaggtgttcacatgtataatcaaatctccttgtggtcattcagatttgaagatgagcctcactcagagcaagcactcctaagatgacatcttttctgtagcctccaatcaggcagatgattcaacagaacagttgaaatttttattatactagaaagcttcaacatgtgggttcactgtatctgaaattcttttgtgtgtgtgtgagatggactgtttcaagctcagctaatccagatctatttctatgcatccattattattgttggtagcagtaatgggattttaaaatattaacggatgtttccacctctctgcagtgttttctgccgctgtctccattccttcaggtatccaggcaattgtgtgctcattatctcaggaaggatgtgattcatatggtgtggatgttagaattatgaaacctatcattatagatttcactgtttcaaaacatttccatgcactttaaaaaaagtgatctcctccaaaagtgtgtgaggtttggaggaaggctattatcctta

SEQ ID NO: 479062 - DNA, 1000 bp, Homo Sapiens
tttttttgagaactaccatttattgagaatgtcttattccagtttcctacatgggttttcataactactgttttcaacaactttgagacagacataataaataatgtagtaaacagcatggatataccctcagatctctaaaacccatggttttggcacaatgccattccaacctctgccatcttcatcctcctgctttaaccaggaaaacatatttactgggcagtagacatgtcaaaggtgaaggtattcatatccaaataatactgtgctgttgttttcaaagcaatccatgtttcacgagccttcaagaaaaggaaacacaagtcatgatctctgagtgtgtagaacacatcttgcatcagttattctgattatcatacagatattcctaaaagatgagaaaaatataatggaagaattataccaaatagaatttggttttcatacttttaattatctgtttatttcaatactcagatattttacagtatttgtggggccacagtataaaccaatgtagcagagtcttgctacattacatagtgcctgtcagttggtacaaatctggtctacaagtagaggcaggagagtacctgaaaatgtcaacattctataaagaagacacagtctaccagcctacttaatcacttaattgaccaaataaacaaatgtcttgttttaataatgctaaataatgcctattggacaaaaacagccataaaactggatgcattattcagttagtagttttcatcagcaagtgcaaaacaagcagatcctggtagaccggttaagacccagttatgtggagtacggacaagatcaaggccccatgaaaacaaggacattcaactttttatgactttatacaatcctcatgcctgatgataatcagatcctgagatatgtggaaagaaagaaagaataagtgaaagaattcattcattcattatacaactttgtttcctaaattgctaaattgtaagagggagatcat

SEQ ID NO: 479063 - DNA, 1000 bp, Homo Sapiens; identical to SEQ ID NO: 346709

SEQ ID NO: 479064 - DNA, 1000 bp, Homo Sapiens; identical to SEQ ID NO: 346710

SEQ ID NO: 479065 - DNA, 1000 bp, Homo Sapiens; identical to SEQ ID NO: 346711

SEQ ID NO: 479066 - DNA, 1000 bp, Homo Sapiens; identical to SEQ ID NO: 346712

SEQ ID NO: 479067 - DNA, 1000 bp, Homo Sapiens
tttttttttttttagtagagatggggtgaaactatgttggtcaggctggtctcaaactcctaacctcaggtaatccaaccacctcggcctcccaaagtgctgggattacaggcgtgagcgaccgcgcctggtcgtgcattgcctagactttattggcccttcttgcacagtcacttctgctctggaagcttcttaaagggtccttatgattttggacgctgacattgacattgtctttatcttcattatcttcatcgcagatcgttgattctccaagttgggtcctctagcagtctccctcagaactcactgcttccaacctgatgtcaactgtgctggggaatgaatgaagggtgccaggaaaacacacacacgcacactggcaaacaacaacacaggcatcccagcttgtgaatcagttgtcctactttcacctgcactttgaattcagcatgtcagatgctggctgggctccagtgtcctctcatacaccatggtgcgtgtcctttgagaaatttgttttcccctcaccacaccaaagaatgtttcacttgtttatcaagtcacagctgtgttccaggtggtgtttctaatttgtgtcaaaaacaaggaaaagatgtgtcaacgacagcattttttttcccattccagtgacaggttagcactccaactgttgctgatctgttggaatttcctgtttcctcttccatggaaatgttttctcttttctgcccgggcctgggagcatttacatttgtaccactgaatagctgttctccatcatcccatttggtcttcagactccataatcctttaaagctctgcacctttcggttctctaagcggtcacagcctaatgctgccaaatggctccagatgctcatgttgaggtccaggctctctctccatcttcagtctcctccactcaccaggctcctattaacacattttctgctcttcagatagtgaaatgtggacagctaggtttaagccaccagat

SEQ ID NO: 479068 - DNA, 1000 bp, Homo Sapiens
ggcaacaagagaaatgtgtgctcaggatacaaccttaataaaacctccccaaattgtcttgaaaacccaaaaggtgggaacactacctacctttccaactgtacggctttgcccgttctaggcttcttgaggtcagagttgataatatctacaaacttgggacttacttaacatggcgtctggctcataagagaaattcaataaatgtttattgcatgatgaaaggaaggaaagaaggaaggaagaaaagaagaaaggaattttaagaattatttctattagagtcaactcaacatgtttttattgagtatattactacatgccaggcccctctaggcacaagtgttataaatctgaataaaacacttttcttgccctcctaaagcatgtgtgtataagcaggggagattagaagcatacttcctaaagtctaaggttaatatcctcagaaaaaaaaaactgatataaatatattgtaactaaatcaggctctagaggagaacagagaaggtaaatacttggtaatttggacaaatagagaagctatttctaggtgactaaaactagaggtggaggagggagagaacagaggtctaaaccatatgttttattacaggcacaggaaaggttttgcagatgtatcgccaatctttccatatactctcagtcataaaaaggagcaataacggcatatttttaaaagagtttaaaagtaaagtttcttggaaatacagatgacagataaactatagcaggcaagaattatttcaaatattaaaataatcttctgaactttgttaattttaaagtaaattttactttgaaacacattaggctcgtgcttttaggaaaatggtttaaaattagcaagcaagaggtttgcttttctggtgggtgctccattctgaaaaacttaatagctcacttctgttctccaccatgaataaattctctagcgtgaacagttctcactggcttagactgacacaagagcaggggc

SEQ ID NO: 479069 - DNA, 1000 bp, Homo Sapiens
agagatagggtcttcctatgttgcccaggctggtcttgagctcctgagcccaagagattcttccactttagcctcccagagtgttaggatcgcaggcatgagcgaccacatccagctgaaagtgtgtctttaggatggattcgtagaagtgagatttctaggtcaaaaggtaaatgtctatctaaaattgctggatattgctgcattgctcaagaaacttattctgttgtggaaggaattataatgaagggattaggaagtggaggaagaaaactgagacctccctgaagggctgacatcaacctccctataggaaggacccaccttgacaggtggtttgttcacatgcggctgagaagattagggtgcttttcacccttcccaaatcctcactgaaaggaggtggtgccactcctcaccctgaacctgttgccatgcgctgcctcaccagctccttaaaaggaaggcagtggttaatgttaaagcaaaatgaataagcctcataaactaaaaagtggaaaataacctagcaacttattaccatccaatttcagtcagttcactccctcaggaaagcaaattgcaatcaggagatggtgccatgcaacctgcagcagcgcgtttgcagaggacaacccagggtcgaatgggccatctcccttagctggaaagacggcaggccacgtttctcagcactgtttttttcagcttctgatgacactgaggatctcctggagagttccctggcagcagagcaaggagttttgatttctgagtgtttccctggagcaagggcctgccctgttggctacaggcaccgtctggtgaagtgtagatctgccaggctccttgatatgcttgttccagcaaactgatggcactatctctgatgcctccaccagattttgccactgtctaccttggatggtcaccctgcatggacaggcctggctttgcatacaaggctatatattgtgggggactggtcagagcggtggaa

SEQ ID NO: 479070 - DNA, 1000 bp, Homo Sapiens
atatgtatgtattagctttattgaggtatgttttatatgcagtaaaagtcacaacttctaaggaaatattgggataactttatgccaacaaatctaaaaacttaaataaaatggaaaaattccttgaaaaacacaggacactaaagctcattcaagaaaaaaattaaataaccttaatagccctatatctgttaaataaattgaatttatagctaaagtcattcccaaagaagatgtcaacctcagatggctttgcaagtgaattctactcaacacttaaggaagaaataacatcaattctatacaattctttcacagaaaacagaaaatgagggagtacttcccagctcactttatgaagttggcattactctgacactgaacaaagacaaaaacattacaagaaaagaaaactacaaataatatcctcattaacataaacacaaaaatcctcaacaaaagaacagccaagtcgtatccatcatatattaaaagaataatccatgtgatcaagtgggcttcatctctggagtgcaagcttggttggacatttgaaactgaatcagtgtaattcatcatattaacaggcttcgtgtgccgcaaggactgaatgaaaatctgtgtagagcactcggagcggcacctggagggcagtgggatcccacaaaactgagttacatctcagtggggtgaagcgagcatctcgtttccctggaaactgaaataatcagtggaagtcagctcatggtaagtctgcttgcgcgcgtgggtgccacaattattacacaagctgatttacacactgtcctttgaaaacctatgcaccataaatgcaaaggaagggtcactattcctgttctggagagtcatcgtgcaggagatacaggaccgttcgcgaggttctaaaatctgcactctctgctaaaaatacagtgaaacatgctcgtcctcctcgcagcgatagcagttgaagtaaatcccacgcagatgtccaggagcg

SEQ ID NO: 479071 - DNA, 1000 bp, Homo Sapiens; identical to SEQ ID NO: 346715

SEQ ID NO: 479072 - DNA, 1000 bp, Homo Sapiens
gtagaggcagggttttgccatgttggccaggctgatctcgaactcctggcctcaagtgatcgaaccgctttggcctccccaagtgctgggattacaggcgtgagccactgcacccagcctattttcttgatagtgtcctttagagcacaactgttttgaatttgctgaaatccaatttatttattcttccttttgttgctcatgctttggtgtcaaggctaagaagctgttgcctccatgaggtcctggagacacggccctctgcttcttctaagagcttgatcattctagtgcttgcctttagttctttgtttttgagggaacagaggccatttagcttggagaaggagggaggggtatggtagctactggcagactcagaggggctgtcctggcatagtgtccagagggcactgggaccctgaggacagctggagccagtgtgtgtgtgggtgggtgggtgggtggggggggggggcggtggtcagctctaagaatctggggatgaaacacgctgggcagggaggggtcctttggagctctcgcctctcagaagcaggacccaaaccaactccccagctcccccagcattccccctccagcttgaggcagggctggtgtggggtgggagtggggaaggagccctggtgagtcagatggagaacaaagggcccaccttggtgggaggagggagagaggaggccgaggagggtgaactatgcagacaggtggcctgcgaggggtgctgtgctgccctcgggctctgggcgaggcctctatcccaccgcaggaaaaccctccttgcagggagctcatcttccgcctttcaaaacttcagggcgctcctcaggcatcgcacagggtaacggcttggaccagcagcagcactggctgttcacaagcatcttgtggtttttcagagccctgtcctgccgcttggggcagcacttcctcccgccgggccctctcccttcctctctccagacgcctagtcctcaca

SEQ ID NO: 479073 - DNA, 1000 bp, Homo Sapiens; identical to SEQ ID NO: 346716

SEQ ID NO: 479074 - DNA, 1000 bp, Homo Sapiens; identical to SEQ ID NO: 346717

SEQ ID NO: 479075 - DNA, 626 bp, Homo Sapiens; identical to SEQ ID NO: 346718

SEQ ID NO: 479076 - DNA, 1000 bp, Homo Sapiens
ggttcaagcaattcactctgcctcagcctccctagtagtttggattacaggtgcccaccaccatgcccagccagaactcttttaaaaaccatcagatctcatgagacttattcactatcacaagaacagcacaggaaagacttgcccccatgattcaattacctcccactgggttttaagatgagatgtgggtggggacacagccaaaccatatcacagctactgtgaaagcagagttggagggtcacttcagcctgggaggttgaggctgcagtgagacgtgttcatgccaatgcattccagcctgggtgacaaagtgagaccatgttgcaaactctctgctccacagcacgcacagacatcccaaatcccggattgggcctgaggaacatctctgcaaagagcgccaggagggcgtgggggtcccgcctctctcgccagggaccagggagtggacactcactggtccagtcatgaggaactcagcatcctcctgacgggaggcgcctctttcccagaagcggtgggtcaggaggaatctgactaaaccctgggttgccggcccggagggcgcggttgaccccggggcctcgaggttgtgggcgaggagtaatccgcccgccgagaccgacccgcagatccaggagaccgaaacccgagggcggcgctccagggtgctgaggagaccggaaaggcggccaggaccttccggtcgcctcggcccaccacccacccagtgtccgcgcagccctaaagcctggcagacgcggagcgcacgcggcctttgcctcggccaggacagggcagcggggagagggctgctagacaacaattcttgacccctcctcgacccacgaccgccaggtaggcgcgcaaagctcctacacctgcggcgcgcccccgtcccctggtccagcggacacgccacgcacgcagccccgcccagcgccgctcgcggtaggggcggagccgctgagtcagagtgtaacgcgtggcagcc

SEQ ID NO: 479077 - DNA, 1000 bp, Homo Sapiens; identical to SEQ ID NO: 346719

SEQ ID NO: 479078 - DNA, 1000 bp, Homo Sapiens; identical to SEQ ID NO: 346720

SEQ ID NO: 479079 - DNA, 1000 bp, Homo Sapiens; identical to SEQ ID NO: 346721

SEQ ID NO: 479080 - DNA, 1000 bp, Homo Sapiens; identical to SEQ ID NO: 346723

SEQ ID NO: 479081 - DNA, 803 bp, Homo Sapiens
cttatcaaagagtatgcgacactttatctaatgagtgtgcttctaagacatgtgtccccagtcgtatagcttcttcctttcgggttctcttccatgcatgccggcaccacataacagagtttccatctagtgcagatttgtttacaacaatgctttctcggggactgcatatgcgtttgtcttttatggacttccagaatgccaatgtggacaggctccttccaggactgtgaatgtgcaggagtccactgtcacggggatatcattcagataactgtctttagacttgaaagaatcatagcagagtctcagcaaatacttagcagacactgccttggtcattttgatgtcccaagggtaactaataactgtcttctgtcaaacagaaaaagatgtaagtaaactgcattcttcagtgttactctctgagtcctgtgaagtgttcttggtccatgtaatgcaaggacaaggcacagagccatcccccagttgataatgggcgtgatcattagagcgggagcagcaggtgggggtggttctccgtgcgggcattcatgcatatttcctcttttcatatcttcagtcttgtggagtctcaacaggctgcagcttctctcaccagtttcttgttctaggcaattctgtgttgagctcctctggggcagaacaaaagagtattgaaagtattgttgtctctgtggaccaaagcctgtactgaccacaaaacaaagccagaatgctggcaatagattgaaactatcttcaggaactcttactactattactacataagtccatgccat

SEQ ID NO: 479082 - DNA, 1000 bp, Homo Sapiens
tttttttttttttttctttgacacagggtctcactctgtcactcaggctggagtgcagtggtacaatcacagctcactgaacactcaacctcctgggctcaagtcatcctcccacctcagcacccctaagtagctgggaccacaggggtgtgtcaccacccgtggataacttttgtagtttttgtagagatggggtcactttaacaactacagcagtttctctgtctctttgattttgttagttgctgatatgaagcacacctgacatactcctatttagccttcaaatcccagctcaaatgacccactccgaggaactttcttataaaacatcatctttcttctgcagaactcttagatctctgtacttgtataatacttttaatcctccaactagaactcaagctatgtgacatgtttatgtctatgtctctgtcttcttagttgtgccatgagttttctgaggtcaggtacaaccatgtatcactccaagtgtattattaaacatttgtcactttctaattgttaattgtacaaatgaatggtagttttgtttttggattttctttcctgatgacacccatcattagtgagatttcccccatccacctgcccactcacacacacatatacgccagcacattgggctcatgtccaaaatatcaaatattgtttttctttgattgtattaacttgtgcccacttattcaaaacttcctgcatttaagaagtcttgtctgtggctatagtttataactcttggttttgcatttcagtaaatattcactatcttttggggcacagtttcatgttattagcttagctaggggtggggtggcaggtttaggagttcagctggacaagaagaaggtgatgacaaatatagtcaattgtggcggctagaggtcaaattccaagatgtggggatacttgtgtctctttttatctgtcaagcagtcattcccctggaaatagaatttctcttccttcaaggaattac

SEQ ID NO: 479083 - DNA, 1000 bp, Homo Sapiens; identical to SEQ ID NO: 161479

SEQ ID NO: 479084 - DNA, 1000 bp, Homo Sapiens
ttaagcccctcattcgttatattttattttaacttcataaggtatgacataaatattattttggctcctattttatagaaaagaaaaataaggttggtagatagtaacatcatagtaaatattatattattattcacgtaggcctaaattcacaaactatgaataataattagaggatgctggccaggcacggtggctcacgccagtaatcccagcactttggcaggctgaggtgggcagatcacgaggtcaggagatcgagaccatcttggctaacactagccatctctagtaaatatacaaaaaattagccaggcgtggtggcgggcgcctgtagtcccagctactcaggaggctgaggcaggagaatggcgtgaacccgggaggcagagcttgtagtgagccgagatcatgccactgccctctagcctggaccacagaacaagactccatcgaattgcggtagaatagaaatgacagatgtgtgagatattgcacatgataaatcaggtcttcttttttcaatctccaaaatagccggatagttaaatatgctcacagatcgattcccacattaccacaggagctgaagagagcaggctcctcccctgcataaggcatgacatccacgtggctccatccacttcctccagtgtgcattttgggctccagtccactgtgggcatacccagacaagccctgggaagtttccctcatcgcaggttaagaaccctgtatgtggactgtgtagacaaacatttgaggccagttttcccaaggggttcccatcagttctgcaagttgagcttgactgcttaaagggaagcacacatttccaatcaacgcctggtaaaacaaccagtttctccaattgcattcatttctcaagccccgtgtttgggtgccaaaatgttgcagaattgtgctccttagttcagctaatacctgggttcttttcacacgaccaggaatatttaggcacacgggcacattgaagggt

SEQ ID NO: 479085 - DNA, 852 bp, Homo Sapiens; identical to SEQ ID NO: 346728

SEQ ID NO: 479086 - DNA, 1000 bp, Homo Sapiens; identical to SEQ ID NO: 346729

SEQ ID NO: 479087 - DNA, 1000 bp, Homo Sapiens; identical to SEQ ID NO: 346730

SEQ ID NO: 479088 - DNA, 1000 bp, Homo Sapiens; identical to SEQ ID NO: 346731

SEQ ID NO: 479089 - DNA, 1000 bp, Homo Sapiens
ttgtagagaccgggtctcaaactcctggcctcacctgatcctcccacctcggcatcccaacttaaagattaatttctaaccagacagctctaccactgaagagtcctaaaagcaccccaatttcaacattaaccatatattgatcagcaagcctttagtcaaagcacagaataaattctggccataatcaccaactacctgtcttgctcgggacagcttccaatgtgaggatttggcacataaaaagaagaatattttgagtagcatacttatgactgctgttttctgttcttcccgctttatatcaattcttggaaaaccagctgcaagaacaaaagatccatccgtcttttgattaaatagtgcatcactaggactgttcctgtatacctgcaaatgctgacacagcagtggcgactggccgcaacgcacaactgagttctagcgacggtcacgggcaaggaggcgacgaaccggtcgtctcagcccagggaagcggtggcgaatgccccggagaaaggagggccagccggggagaggactgcgccccgaacgatggctcgcggaccggctaccgatggcgttcgcctccgtctgtcgtccccacgccgcggacccggtgtccaggacccgcagagcgtctccggagcgcgtcacggtagggcagagcaagcctgccactgcaggcgccgcggaaggaggcgggctgtgcgctcgggggagggagctagaaagcgccttgtgtgccggcggccgccaggcgtctggaccgggtctccgcagcgccaccgccgcaccgcctcctctccggctgccagagcagtctgcgccccgccgccgtgcgccccgtgtctcagccgctggcagctgcaaccccgggaaccgagaataaaataagttttcccgggttcgagtgtctgcgcctctttgggccagcctggttaatggacagccccggatctgagggacccaccttaggggagcgcagcccggggctgtg

SEQ ID NO: 479090 - DNA, 1000 bp, Homo Sapiens
gactggtttataggaaagtttacttgaaatccatgagggcctatgattgcttgtaaatgattaagatgcatttttttgtaagtctaaacacaggcaaaatgacaagaatgtaaacagtgcttagaaagtccccttcttctggtgcctgtggatgagaatcacagtaaaagcatggaagaggcaggagaagacaaggcactagctggtcattatgcccctgggggcctgtggctgcccagaactggggcaaaccagcagcctggacaccggttatggtaccagttccttagttctcttccaggaacaagggcttggagcctgcagccttaacttcccagcttccctctgggagagccctgcagagttcctgttgccagctttggattcttgttggagccatgcgactcagtgaggaggtcccagctaaccaatttatgggaagatggagtagagacaatagcgggaaccctgtcctgtgcctggcccttgccctgaggtgtttggcaacagcatccacagaaatcactaggtatggggtcttgtgggataagattattttagggtggaaaagagttctgtggttaataacacaaattgaaaaaaaatggtgtaaatgattgacttggtgtcagttggctagggcacccctcatgagggggacatgagtctataaggctttattgttttcttcatcaagtgttgactgagtgtctaatccatcccaggtactatgttgggtacctgacttggtggtgactgtatgccggctggggagaaggaatacgaacaggtgaaccacagttgaagaaggggtaacaaatagcagacagggtgctttggtgagagtggccagtgactcagatggggtagtcagggaagacttctctggggtagtgcctttatacttagaccagaagggttaggaggagccagtgtacaaagggtggagggaaaggaatcccaggcaacacaacagcacaggctaaggctctaaagccag

SEQ ID NO: 479091 - DNA, 1000 bp, Homo Sapiens; identical to SEQ ID NO: 346732

SEQ ID NO: 479092 - DNA, 1000 bp, Homo Sapiens; identical to SEQ ID NO: 346733

SEQ ID NO: 479093 - DNA, 1000 bp, Homo Sapiens; identical to SEQ ID NO: 346734

SEQ ID NO: 479094 - DNA, 1000 bp, Homo Sapiens; identical to SEQ ID NO: 346735

SEQ ID NO: 479095 - DNA, 1000 bp, Homo Sapiens; identical to SEQ ID NO: 346737

SEQ ID NO: 479096 - DNA, 1000 bp, Homo Sapiens
actggtattatctttattttactgacaaagaaattaagacagataggaaaagtgatttgcccaacgtcacacaactaggaactagcaaagccaggatctagacccacgcaaacctctctttgaagctcatgctttgctaccaaatatcgtgtcattctggcattcacgaggaaatcttgaaaataaagcaaaaagttgtaaaatggtatcaagtccacaatcgctgtcttgatgtagtgcaagcacagtggtatacaagggacatccgtagatacagaggagagggtcagcaaaccttctctggtaaaggccagatggaaaacattttaagcttcggtggtcagatgtggcaacaacttagccctgccattgtaacgtgaaagcagccataggccctctcaggccatcagtgagaaaatggagacaaaatgtgatagaatagtcgttatgggtcattgtcagtgttctttatttgtaactgaatcaattggtgagaataatctgcaagattcctttcaatcctgaaatactataaattcttgatctttatttttaagtaaagagaccccactatcgaggagttctgggtgctgtccacgtaaatggtgacctacttcaggacaactgtgattgcctgaagttgaagaaatatagtgtcccttgcattcaaaggtgacatcagtgatggtgatggtggctctgcatgggaaaaagaggtgccaaatgaacacacattccacctgtactccacatgggaaaaacaccctgagctggcagctgtggccgatttgctagggtcttaatttgtggttgacctagacagaggtgcccaactgtgcctggcttttgtgaagtggtcagctggccccactggctcatgttcaaagagtcacctgattttttaaatagaagagctaccgacttgtggttgatcctccttcttttaagtaaatggtcatattgcacttcttgctgcaaataagttgctagagcacatttc

SEQ ID NO: 479097 - DNA, 1000 bp, Homo Sapiens
gacgtgcttaagtgcatttattgttctaggtattagattttagggctgtggacagagcagttctatgctggcagatatgacccggttgcccttacaaagaggagagggctgagcactcgtgatttagcctgaggctctccagactcccatcttgcttgcacatgtggcctctgccattggttctcttcctcggtgccccatactgttgcaaacaaggtacacatgtggtttccagagggaaacaaaatgagactcaaggcagtagcatttgtagtggttcctaagcatggagagaggacctgagctgtaagccgttctctcttctctctctctctcttcagctatctgctcctggacaaatcttcaacttcctggctggctctcttcttcccattgatcctcactcatttcctctgggttttccatgcgtgtggcgtgcttcgggcagggctacatgcttgggctttttggctttgctggattcctcttggcagtcacacttggactccacagctccattagccacttccttcttctgtctgtttgttttgaggacatctggtgaaacagacaatggagaacagccatccatgggtcggggggaattgagaaggatgttcagtagtaacccagggatgacttggtgacggaaaagaaggcacacattttaaatctgcagaggacatcaaattagatgtggttgagcagtaaatgcagatccttcagctggtaaagttgaccctcaagtctgagctgaagattttctcagaaactttcaaatcaagatctagatctccacagataagaataatggagtgactccaccagtagattttactcgtctcaggtaattctgctggaaagggaaggaagtaaatcttggagtcctgcacttccatccgttaatcatatacatgcacgccctcaaaagcagtaaatcactgtctttcactgtattgccatgattcacacctgaagagcactcatcagtcattctgac

SEQ ID NO: 479098 - DNA, 1000 bp, Homo Sapiens; identical to SEQ ID NO: 346738

SEQ ID NO: 479099 - DNA, 1000 bp, Homo Sapiens; identical to SEQ ID NO: 346739

SEQ ID NO: 479100 - DNA, 1000 bp, Homo Sapiens; identical to SEQ ID NO: 346740

SEQ ID NO: 479101 - DNA, 1000 bp, Homo Sapiens; identical to SEQ ID NO: 346741

SEQ ID NO: 479102 - DNA, 1000 bp, Homo Sapiens; identical to SEQ ID NO: 161480

SEQ ID NO: 479103 - DNA, 1000 bp, Homo Sapiens
gagatacacagttgaaggtgaggcacactgcttcggctctcctatgcccttgagttagaagtttccttgggaaacttccttcttcagacagactttcctgattaatcttctcctttctcacagcaaaatcttctcactccaaagaattctcttgcaatcatctgcccacccgggctcccagttgtaactgagacaagcggaggagcctgaggagctgaagacgcacaggtgacggtcgcggatggccggcaggatctgacatttaaaatcgccctgctcatctgggcctcggagcctttgacaggcgggcgtgtcagcgacagtgtggggaaggggctgggctccgccaggcagcgcgcgacgacgcccttgccttggccttcacagagtagaacccgagaagcccactcgcccgtcttggccaacgcccccaacgcccagggctccccccgcagtcggcgggcaggtgtgcgtggtgcgcgagcccagtgcgtgccgggtgcggcgccagcagcggaggggcggcccggcgcccagcggagagccgctggctgggtgggtgtcggcctccccgcctccttcttctccccgccggcttgccggggatgcttgcgcgaggcgccccctcgcctgactcgtcggaggagccacagctgaggtgggggcggggatggggacgcagctcggagcgctagagagacgcggcggcgctggcagaagaggcggcggcgggcgggtactggcttctggggccaggggccaggggcggtgggcgccgggaccgcggagctgaggagcggggcccggccagggctggagactttgcgcccgggggcaccggggctacgcgcggtcgcacacatccaccggcgcggcttccctcggcggcccgggctccgctcatcctgcggcgggcggcgccgctcaggggcggggtgagtacccgcggccgtactcggccccctccccgcgccagggtctcgcggggatccgcagagga

SEQ ID NO: 479104 - DNA, 1000 bp, Homo Sapiens; identical to SEQ ID NO: 161481

SEQ ID NO: 479105 - DNA, 1000 bp, Homo Sapiens
aaagcacctattgaagtgttttattgaaggtctccagttggagaaacattatccctattggtgaaccgtttcagatactatagcatttggaataagattcggaactgttgtagtgagaccattgagggttgtgggagcatttctggcccctggtgaaaggccttggagcataggatgcagctgaatgtagggtaatgtagggagactgccgacttggtctaggtggaggccaagacagcaggaatgcaaaggaccgaagcagttcaggactgaatgagatcttaaactggacctatgagaatgagaagtgcaaaggcctgactgtgcagctgcttggtaaagctgtgctggataaaggatttgacaaattcgttagcagtgccttcaggcagatgataaacccttgggacttgttccttcatgggaaaatgaacatgtttctgcccctctctacatataaaaaacattcataaatctagtcagtttcattggagattctctgctctcattggatggcagaaaagaaacaggccttgttctaaagtacttggtagtgcttggtgctgaaaacatgtctatatagagctcatgtgttatcacaatagctgagatggtggaccagcacccaccagagctggaactggccttctgaagtgcccattattggaggaagatggagcaaaccttgatagctgagccacaaatgtggctggcagctgcctgagataggaatacgatctgtcctttcacactttctgttaaagaaagcatttttacataagctgatttcccccaggggctaaaaagagatctctcccaaaactgaaagaatattgttattccttccatatggcaagagcactgttactctgaattagttcagtctgaaaaccccggcagacattttcattgtaatcaagtgcagtaaaatgcagaagtgagtgtctttattctagcaataagttttatattatgcaagaagtgcaaatggaaactactc

SEQ ID NO: 479106 - DNA, 1000 bp, Homo Sapiens; identical to SEQ ID NO: 346744

SEQ ID NO: 479107 - DNA, 1000 bp, Homo Sapiens
gtagagacggagtctccctctcaggctggtcttgaactcccaagctcaagtgatcctcctgcttcagcctcccaaagtgctgggattacagatgtgggccaccgcacccagcccttttctttagtaataatactaataaagtaggtcactaacgtgggaataacttgaaaaatgtgggaataacttgaagaatgtttaacctgagttcagagcatcccagatggaatatataattgttaaactcaggaaaggacaactgaacattaacctcattttctaaatttcttttcccaggaattaaagcatgaataatatttgtttggtaagatctaaatggcttagtaatctctaagcctgcagagaaattcactttcagaattgcaaaatggtttataaggttcattaatagtcaattttaagtatgattaagtgcttagactattgttaagtacccaagaattacttcttgttgattaactattacgatctcctttacctgactcagagaatgcatttaagtagccaaagaaatgtgataattactcattaaggaaacaaaatgtggtgggtatctggattccttttaatcttcagtggtttatttaagaaagaacattggaaactaattccacagggaaaatgctgttgctgaagaaggcgttgggacacagattgctgacaacaggatttggttttgagaactgaatttgaaagaccaaaatgagttatgttttcttccctgaaggcagatgggtacttgtgaagaacttccttcagtaagaaagttaggatccctgccacgttctccacctcctcacagtttcctcccttctggagctctccacgggaagcaggcacgagtcaccagaagagggaggctcttggtggggcactcttggtggtccgaggactcaatcagggtcctagagggtgagcccatcttaaccagagatggcagaacttgacccaagaaggccttgtggtcatcggggctgtacgc

SEQ ID NO: 479108 - DNA, 1000 bp, Homo Sapiens; identical to SEQ ID NO: 346746

SEQ ID NO: 479109 - DNA, 1000 bp, Homo Sapiens
aagtgccttaagaaataggacgtttattatatcatgtaactagaagtgaaccaatcagaattggttaggacagtgcttggtcagaggaaggcttaggtgctccccacttcttcctccgccctcttgtcccattgtcagccttggcctctggtcctggaagggctgtgtctgctctaggcatcattcgtgtaagagccatggcgtctgatgaagaagagggcttcctaccctcactcagaaatcagaagaagagacatccttcccagaaatgcccggccaacttccctttggatcccatgggtctgcaccatgttgagccaaagccaaaactaatcactccagagggaaggagaccaccacgattcgctcaaacccccaggaggcttcttaggagaaatcagcggcagagtccccgctgtcgataggccacagcatacacaaactttgcctacaattttggggattcatatacccactaaagtctctccatagaccacccactaagatcccctgagggcctgtggggcaggcactgttaacatgatgaacttagcccatggagaagctgcatccagctagggagagacatcacacaggtgcaggtcaactttgtagaagctgactcactaaacacgatcacagtcagtgtaatagcacaaagagcaagcccaccactgccatgcagatcaggcggaggtatgaggcctggaagatgcggacaaactgagttgactgaaaggatggacacgattccagaaggaggaaaggcaggcggagctgggaccaacaggcattccacacccggaaaaagccaaaagttttcacatgacagaagagtttgcagctgcggtcacagctaagccatggcaggctggctgcagtgtttgtattgagtccttttgatgacagcatgaattctgagaacaaagcttccaggctgtggctgtgtaactggaacccagagacaaaaatagcttctcttctcatgcatatgtgaggt

SEQ ID NO: 479110 - DNA, 1000 bp, Homo Sapiens; identical to SEQ ID NO: 161482

SEQ ID NO: 479111 - DNA, 1000 bp, Homo Sapiens; identical to SEQ ID NO: 346748

SEQ ID NO: 479112 - DNA, 1000 bp, Homo Sapiens
gaactttcaacttccttttattaccataaaatagatgcaatagataccctcaccccattcctcacccaccccccaattagctttacctggtgcctaatccacagcccatcccagactcaccctatccctccttagacttctctgtatcttttacccgatccttccaggtgtccaaacagtgtcatccggtgtcctgacatgcggccccaatggactgatccagggtggaaaggaagagtgagaagaaatcagacagaagaattcaggagatgtggcaacagagtggatgtagcagaagggacatagagagtgcctaaagatgagtctttggtcagcatgtgatgaaaagaatgaagacactggggaagtggggagcagaagcggatgtgggcccaggaggaagaaggtaggtttggactggggcatgctgaggtcagtagcaacatcaaagtcctgagcaccctcatattgttgcagattccagagagcagagatggcaaaaagatgcatggaagagagacacagcagggtcgggttctggcctcaggagccaagggggaagtgcctgaggagacccccaaatgaggcctgtgtcaatgaggtctttaggggactggtttccatgtatgccaggccatactccctggattcccagcattgagaagaccaaacacttctacacatttattactgaagccccctgcaagctgaaggcggaggaagtggccaatctcctaagccgtgtgtggctgaggcagttgtcagagctgtgatgagggaaatgctcattattcttctatccctcacttggccaaataaagaacttcttagaattcttcccctgtgacaaaacggggctgtgatttggaaagcctcaggcaagtttgctagggccgcggtaaccaagcaccacagactgggtggcttcaaaactggacggcttcaacagaaagttattgttgctcagttctggaagccagaagtccaaaatcaaggtact

SEQ ID NO: 479113 - DNA, 1000 bp, Homo Sapiens; identical to SEQ ID NO: 346749

SEQ ID NO: 479114 - DNA, 1000 bp, Homo Sapiens
gacgtaatggacctgtatccagtctttattccttgacacatgtcagagaaggagggaaaaataaaaatcaaacacattctgcagactgacaacgaaatatacaagtagcccgctccagtccccggccttgagcaagcatcaagtgggggcggcaccggtccagggaaagttggggatgggggtgagagtgtggacaaggtctagggctttatctaccagacgccccttaaaaataaatctatggcaaagaagaagcgggatgcagctgctgagagaaaacatctccttggttccttccttcgcatcttgcccctctaagaacttcgtgaaaagttcaagtgattctgccgagaatctgccgcagggggagactccgccgccaggtcttgggaattgcctgggcgccgccaaagctcgagccggagctgtcatttggggcagcggccgggaagaggtaacgatgccagcaagaaagcagcggaggcaggaggcggccggaggagtggactggagcggacggagcctcgccgctctccagcccggagcgcctggagcgaaagccaagcgccctccgagggcgacctcccctccccgggcgcgcgcccacccgctgcagccggcagcccggcgggagaggtggcagctgcagctccgcaccggggagagcgagccccctgcgcgcgcgcccacccgccccctaggtgacccggcgtcctcgccgcgcccgctggaagtttgcaaactttctccgggggttccgccgccacgctgggaagctggggacgcggggggaggttcctggctcgccgtctccgctgccgcttgaccgcacttctggagggctccgcaccttgccaggtctctggaggcaaacacacacccccgattcataactggtccccgcgtcaggggactcgcgcgctcccacacacgcacgcacgccgggcggactcggcgccggctccacgttagcatccctccaggcgcgcggcgcggcggc

SEQ ID NO: 479115 - DNA, 1000 bp, Homo Sapiens; identical to SEQ ID NO: 161483

SEQ ID NO: 479116 - DNA, 1000 bp, Homo Sapiens; identical to SEQ ID NO: 346751

SEQ ID NO: 479117 - DNA, 1000 bp, Homo Sapiens; identical to SEQ ID NO: 161484

SEQ ID NO: 479118 - DNA, 1000 bp, Homo Sapiens; identical to SEQ ID NO: 346753

SEQ ID NO: 479119 - DNA, 1000 bp, Homo Sapiens; identical to SEQ ID NO: 161485

SEQ ID NO: 479120 - DNA, 1000 bp, Homo Sapiens; identical to SEQ ID NO: 161486

SEQ ID NO: 479121 - DNA, 663 bp, Homo Sapiens; identical to SEQ ID NO: 346755

SEQ ID NO: 479122 - DNA, 1000 bp, Homo Sapiens; identical to SEQ ID NO: 161487

SEQ ID NO: 479123 - DNA, 1000 bp, Homo Sapiens; identical to SEQ ID NO: 346757

SEQ ID NO: 479124 - DNA, 986 bp, Homo Sapiens; identical to SEQ ID NO: 346758

SEQ ID NO: 479125 - DNA, 1000 bp, Homo Sapiens
gcaaggggaacagatttattacaaatagaaacaataaggccgggcctggtggctcatgcctgtaatcccagcacttcctgggaggccgaggccggcggctcaactgaggtcaggaattcgagaccaccctgaccaacatggtcaaaccccgtctctactaaaaatacaaaaaaattagctgggtgtggtggcacgtgcctataatcccagctactcaggaggctgaggcatgagaattgcttgaacccgggaggcggaggctgcagtgagccaagatagcgccactgcactccagccggggcaacacgagtgagactgtcgcggaaaagaaaagaaacaataaaagaatttcttaaaaagatgaattcacagttgttaacacgattgacccagttgccacatcaaagggagtgctattcactgcagacatctttgttattttggaaaacattattatacgttatttcatttcaaagatggaaaatgtgtgtgtttactacagctttggtagatggtagtaaagtgtcttgtgactaaatttgtatattttgacaagtttttgatggaattaagtatcttgttcaaatggagtccatgtctgttatagtaattcagaaataatatacttattttaaaacgtttagcttctcctgtaattccagctctttgggaggccgagtcgggtggatcatttgaggtcaggagttcaagagcagcctggccaacatagtgaaactccatctctactaaaaatacaaaaattagccaggcatggtggcatgcacctgtaattccaactactcgggagacagctttttctgattctcataaagggcagtggtcacccaggctgcctggatgtggagcagcctggcatcacagtactttctagtggcctttatggagagagggctgagaggctggtgttttgctagagatgagcacgtcggcatggggatgctgggcttgaggcttctagagacagagcaggcaggggcat

SEQ ID NO: 479126 - DNA, 1000 bp, Homo Sapiens; identical to SEQ ID NO: 246653

SEQ ID NO: 479127 - DNA, 1000 bp, Homo Sapiens
ttggtaaataaatacatgtttatttctgtctcaagctgtaccactttggacaatcataagtgcaaagttctttcgaagaataacaaatagacattgaatactatgaaaagttgacttagaatgcttatctgagaaaacatcttcgtgctgagaaagctttacttttaattacttcgttcctttgaattatttgacgtagtactcattttgcttacaactcttaccctttaacctgaaattataatatacagatttgacgcggtagatcaacagaggaagccattctgtgcctctccactgcttacccaagaacacgggcgatcaccaaggagtgacagtgaaggggcaggaatggcgcacagaggcaggatgcgtcccaggtcatcactgagagcagatcccacgcgcccgagctgccgcggtgaagatgcctcaggtgacccgagacagaaccgaggacagggccggctctgtgtcacctcggtccctccacggcctccccgcccagatgtgcttggacagagtattgcctacagcctgctccacatgctgccagatgtaggggataaaatattctaatgtgttctcttccaagcaatgaaaaagtcacaccatccagaaggaaatggtacgcacactctacaattactattggagccaaatctgtgagtcacccagctgccggcacaagacaatttggctactggaaaatcctgattaatgacatttttttaaacccagagtaacaacttgacctgccaagaattaccattttttcatcatttcgccatttttggccttggttatctattacctttctcagagaaaaggaagtaaaatgaaaatggtgtaaggtgcgttcacctcaggccaaaatgcgccttccaaggtgcgctggggccggggtttagcgcagcttcgcgacccgggggaaggctccttggagagcctcctggactccctcgggctacgccgaggtaccgggttatttcccaactgc

SEQ ID NO: 479128 - DNA, 1000 bp, Homo Sapiens; identical to SEQ ID NO: 346760

SEQ ID NO: 479129 - DNA, 1000 bp, Homo Sapiens
tgagaaagagaattgtttattttacttttcatgggatacaataaaacatttatacattaaatgttctttgaaggacctagagaaacattgtattattctgagatgtttttacccttacttaatcactgtttgctattctaggcaaaacaaaaacaaaacacagacacacacaaattcctctccagtaagtagtgtttcaagcagcagcttgttgagactatgatgcagagagatttggatctcatccaggttccacaacagcatagctgcatgacattgaacaaattacctaccttctctgatcattaagcttcatccctacaatgggaatacccctatgtccctactggcaagacagaactgagctagcagacacaatgtgccttttaacagtgtttggaacttgataaatattaagttatagtttatatcaatcctcttcctttttgccttcatatcactaatatgagttttctatgttatttgagaaaatgcaattctactacagaaaacaggaaaacaaaccaggatgaaataaaatattatgtatagatggtaagtaaataaactgccatgtgaatatggaaaggattcatgagacatattatatagagagtaatttagtagcttgtaagatatgctgaagacaaaataagtggaatatatagtagtatctgccaaactttttattcctagatgaaaaggaataaaaagaccaaaaggccaaatcacacagctgccacctctgggtctctaaatcaaccacctttgataacaaacagtagggttccttcctggctccctaagcctgtctccaggtgagttggcaactccagctgggattcagtataattgcccctccagctctctaatagagcaagtgtgtcttggccacaagcatattccttctgtcaagtcctcattctcagttctggttcccttggaccatgtccctcgtgtattagaggaggaggagtgtgagaacatggccagcttccag

SEQ ID NO: 479130 - DNA, 1000 bp, Homo Sapiens; identical to SEQ ID NO: 346761

SEQ ID NO: 479131 - DNA, 1000 bp, Homo Sapiens; identical to SEQ ID NO: 346762

SEQ ID NO: 479132 - DNA, 1000 bp, Homo Sapiens
ggcttaatagatcttcactttaattaatcaaataaaatgaatctttcaactgaagtttacatttgtctgtttgatctacaattttgaaggatattcataatattttgtacactacaaaaagcatatctacttttatttttatttcaagcagctggcctgtgtatacaatcatagaggagaaatgtttttaatagggatatcatctctaaattttagtgtgtttcaatcttatttataaaagggagaaaagcttgaaagaatacttcagaaacattttaatagaaaagtattaagtatttatgattctattatgtgcattaaacttttggaaaataatttaacttcagatgatatttcaggatcagaatgtctgaataatgttaacacatttttgtcatgatgtcttaacattaagacagtaagacattctgtaagattgcatgatgagaagacatagataaagtgagaagttattgagacaatggggctaaagtatttattaatgttgactagtaaaatacaatgaggatctagaagattttatgtctccatagatcaccacatcctattattctttttctaccatatatggtaaaatcattcacaaaaagtaaaacagggaactgttttgtaaaattatgtatttatgataaattatagaatcatatcttgtaaattcacagcataagcgtctgaatctataaaatacatgtatgtataaatatacaaacttctatttacaaataattagcttccaggattgtgtctgataacttttaatgataataaatgtccatgtcagatcatattttgtaatcataatcaacctatcactgaaataatttttgaggcgtttctcatatttgagtatttcatagtcagcatttcagtattgtcatccatcgctatattctcctcattaccaggagatggcgctgtgggttttaaatcgcaaagctaaaaattcccaaagccgcgctgaaattttcagtttctttct

SEQ ID NO: 479133 - DNA, 1000 bp, Homo Sapiens; identical to SEQ ID NO: 346763

SEQ ID NO: 479134 - DNA, 1000 bp, Homo Sapiens
catcttgactatccattttgtttttattctcttggttttggacaggtccaaactaaaacatttttagtttgttgtcccatccagtttcccgatgggttacctcagatgtgaaccataataaccaggagaagtggcatgctgggcccagggcccaactgaggaatgtgaggccaactaataacttagctccttctaaactaatatccattcaaagaaattttcaagtctcatttaatgtggatggagctggtgccagggaggactatttattgagatcttaattcacaaatgtctcaaagcagtttaaaatgttcttgatgttacgtaatgagttagaaacctgtccaaccacataccagatgcatgggctggggctgggacaagttacttgaccaatctggacttccattattcatgactccaggagctccttcactcatgaactgtgtacctagacagagacacagctcagggcaggcatttttattacctttgtgtcccaaggagagggcctccttttttgagaggcatagcatatgggacaagaatgtggttctgcagctgggcagcttgggtttatatgctggctcctctactgcctactgattgaccactagcaagttattatatttaacctctccgtgccttcattttcctgcccggggcactgtcttcctaaatctgtcttggtgaaaccagttttagctggctgttctaatagccacctagcagggctagggggagcaaagtccagcttcagcacttggcctctgtccacacggaggggaggggctcctggttactgctgggcagggtggcagttctggattcccactagacctcgttactgttccttatggcctccactgacaccatagggaggtggcttcattgtcactgggctatggtgaaagtcctgactctccacttggcctcctctgacaccaccccagcagggaggtggagggactgccttgttacagctgtgagtgggtggaag

SEQ ID NO: 479135 - DNA, 1000 bp, Homo Sapiens; identical to SEQ ID NO: 346764

SEQ ID NO: 479136 - DNA, 1000 bp, Homo Sapiens; identical to SEQ ID NO: 161489

SEQ ID NO: 479137 - DNA, 1000 bp, Homo Sapiens; identical to SEQ ID NO: 346766

SEQ ID NO: 479138 - DNA, 1000 bp, Homo Sapiens; identical to SEQ ID NO: 346767

SEQ ID NO: 479139 - DNA, 1000 bp, Homo Sapiens; identical to SEQ ID NO: 346768

SEQ ID NO: 479140 - DNA, 1000 bp, Homo Sapiens
atcaaaacttaaccaatttatttaatatggatgaaactctgctgtgaatgaaagaatgaagagaaatataagtgtctgtcagaaacttcagtatgtttagcacactatttttactttggataaatgtgttttgtgctatggaaaaatgcagtgatatggatctggtaatccttgtagctatgaagcattactaattacaacaaaatgtaacacagtcttgtaaatttaaaacatgaaatccaaagcaataattgttttataagctacacttttattctatggatagactcgataacacatttgtgaacatttaatttctacactagcatgactattttatcttatttatgctattcaatagctgttgtctctctggaaacataagcacacccaacctctgaatgcataaattatttagtgggagaaaattaagaactttcaaaacaatataaactttttgaggtcaccaaggtaccatgaagtaaattattgccccacagttctaaatggtacctagtagccaggaagagtttaatgcacctttcaaagtgcctaatttactctcagggaggaacagaatagtggacaggctctggatgatgaattacacatcaagatgcattttcccaagtgaattgggctcaatgttgtctgagtaaaatgaatgcctcacatctatttcaaacttgtgaaggaaaaggtctacaaatagtttcggaagtctaaaaaacaccattccatttacctaaatgcagtaaagggcaaggcaaactcagttacataaaataggactattggtgataaaatgctggccaaggcaactgaatgaaaagaatcccgtgtgtagtttggaagggtcatggaacaagtaaaactgagaatgaaatctcatctgaaagatagctaaactttctgtaattcttgggtgttccagaaaggacttccttgcaagaatttaacctgtccaaccttgtagaatctatcacatctgccaggatca

SEQ ID NO: 479141 - DNA, 645 bp, Homo Sapiens
cggccgcattcctggcccttggccacagacgctgcgtttctgctaggacctgacacgtgcggtgggggagctccgctggccggagctgccggggtgtccgcgcccccggggcagctgtgatcaccctagccatccccgcagttggcgcctccgcctgcgtctgcatccacgtcccacataaccgccctggctccgactccttttctttgtaaactggctcaagcattttttgctcgccacgttcccaaaaagagaagaggcgcccgtaagaggggggggggggggggcaagactgttccaagagctttcccgttcacacacagctcccgctgggtcactgtactcgagcccttcccgccctcgcgggcccaggcggccaccccacaggtttgggaaccctaggacttgcagtgctccaacacccacaaggcctttcggcgcagctcctcccgacccgtgcgcccccgcgccgttgcccaggtaacggcggggcggtggcagcggccgagaagggcgggacttccggcgggtgacgcgcccgggttcggctacaaaagaggacggctgcggcgcgccgggcggaactttccagaacgcggtgagtttgagccctcgcgctgcccctagtcccctggctggcgccat

SEQ ID NO: 479142 - DNA, 1000 bp, Homo Sapiens
ctttttatacttcccccaaatatgaagcactttactgtttgatacatggatgaacctttaaaacatgctaaatgaaataagccagataaaaaaggacaagtattgtataatttcacttatatgaactaaacttagacaaatgcattgaggcagaaacagtaccaaaggctgaggggaagggaaggagaagttaattgacaatgttacagggcttctgtttagggtgatgacattttggaaatacaatagtggttgcgtaacatcgtaaataatgccactgaattgcacaattgtttaggaaaatttgttacatgttttacaattaaaaatcctaagaacactaaaagaaagtcatattaggtcggttggtgcaaaagtaatgtgccattacttttaatggcaaaaaccgcaattacttttgcactaacctaatagttatatcctgaagaggcagaaactgataggtttgtctgtgtagtttttcagcttgtattattactaccactaacagcctctgttgaacccttcattactatgtaagcagccatatttaattctcagaacaatgtaatgagggagagcctatgaaaaaacaaagcctatgaaacagagcctatgaaaaaacattaaccaaggtcatcatccacaaaaatacaagttccagcactaactctgctttctctgtgatgcttctcctgcccattcatacttgtagggaataggagtagaggccaattatgtcgcttgagagtgctcttggaacagtggcaaattttctgtacgtgaaattagcttctcaacttttttgtacgtacggtactggttcttaaccttggctaccattggaattacccgggaaacattaaaacactcatcaggtcccaccctccagggattctgtataactcggctgggtgtagcctaagcatcaaaatgattatgcgcagccaaggttgaaagccaccaacactgacacatggatttaatattaaccacttgg

SEQ ID NO: 479143 - DNA, 1000 bp, Homo Sapiens; identical to SEQ ID NO: 346769

SEQ ID NO: 479144 - DNA, 1000 bp, Homo Sapiens; identical to SEQ ID NO: 346770

SEQ ID NO: 479145 - DNA, 1000 bp, Homo Sapiens
tgcctgcctggtttatttatttttcaaataatgcatctgaataggcattcacacaagacagggcaaacataattttgaggcaaaggccctttccaactgttgcccgattaactgttctaagccattgtgtagccttgtccttatcctgcggagtccaaaatttatccctcgcgtactaattagatggcaggtgtctgtgtctgacagtcaagattcgcattatccagccccaccacctgacccttacaatcttatctcctgctgctatgactttctccactgggccaaattccactcatccatcctccaaggcccagttcaaacgtctgctctgtgaagccatctctggttctccctcgaggggggaggtcccctcatgcttctgaatttccagtcttttgttgttgtatccttcatcagacgctaagctccccaggacctggcacgcagtaggttcctcaatggagcgtttgctggaatgggggagggtggtctccagcttcccgagaggcacctaagcacgccagccaaagtggggctgggcagagaccagacccgcttttggagtcagtgtctacaaagtgctctcgggggaagggggcacgcggggaacgtcgcccacccggagccgatccccccaagaacgcttcactcgggtggggttactgcttgggctcgccccaagcacagtgcgcacacttcacacatccgcaagcctcctgaaacgcctctcccctcaggccgacctttctgtttccttcaacgcctcccatctgttgtgtgcgttccagtttccaactcagagtcagaaccatcatttccaaagactcgtcccaaagcacgcacaaagcgttcttctgtaaactgcggcatgggtcgctgataaaaggtccctctgaaggtttgaagatactcaacaaggctccacagagggtactttggagttttccgcgaaggcgctcgccccgcagaaccgacaaggcccctaaaaccgacaatg

SEQ ID NO: 479146 - DNA, 1000 bp, Homo Sapiens; identical to SEQ ID NO: 161490

SEQ ID NO: 479147 - DNA, 1000 bp, Homo Sapiens
aattctaacaatatacgtttttatctatatagctgttcagagatataaatctgtcaggatatcaaatgtacataaagccggatggctgtaagggagtcgcatattttcccatatataaatctgctcctataactactgtatatgcacaaatacaatggaaataattatatttccctcaaacgtaaatctgtaaatacaaccacagcacatttaggtaccattagacatagagcaatatttcctagacatcagtctgtcagtagagccaccagtgcctccaaacagagagttatagagggagttataaataaactctccagatgtgaacggatcagtagaactagatgtaaacatgactccaagccgttcctcctcctcctccttcttctttgtaagatattcctgaagcaagcccagtcatataacagggtgcagaggtgtctgggtactggtattttttcccccaaggagggtcggaggtggctggactttgggaaactgtgcaggagtgggtaggggacaatgcccgctcccaacacagcccagaagccccttccgtctgtctcctggtggctgagagctcgggcaagtggagaggcctggagaaaatgaggtatatgttgcaggatccgggaccgcggtctttgcttgcttcgtgaaaaatcggctggtctccaaactcgcgaaggaaaattcaaggcgcctcaactcctccgagcttgcaaggaaaggaaaatacataaagaatcccttctctccaaaacctcccccagcactgaaacaattctcttcatccttttttccccactcttcttccctctggaaccacagacagggagattgagggcgggagaggcatctcccaacagctgtactggatgttccaactgccggtgtccactcctggaccccgttcccccactccccagctatctccgtagccacggcccccttcccatgcacgtgttggtttaccacaccctccttcaggtacctcctc

SEQ ID NO: 479148 - DNA, 1000 bp, Homo Sapiens
tcttagaatgtgactttatttggaaatagggttgttgcagatgtaattggttaggagtggacccttaatccactatgactggtgtcggtgtccttagaagaagaatagagggaacgcagaggcacacacagagaggaggccatgtgatgatgggggcggaaactggggtgatgcatctacaagccaaggaatgtcagggcttgcaggaaaccccaggagcgaatggaaaggcatggagcagattcttcctagcatcttcagagagagcatggtgctgccaacacctcgttttgaacttctagcttccaaaactctattgcagcacagatcacactgcattataaaggaccatctcctgtctctctgtccatctttcagagtttgctgtattgatcttagtgacgtcagcacgtggcactcagctgcgatatcgcgtgtcatatcctcccctcccacgctgcattaaaaacaatatcagtgggggcgtgtccatctgtagggaaaagaaagagagatcagactgtcactgtgtctatgtagaaaggaaaggaggcaccccccgcgaggcggtgactgagagcaagcccctattcccccagtggctcttacgacccccatcgcagggggaggaggcaccccccgcgaggcggggactgagagccagcccctctaagccttctggctcttgggacccccatcacagggcggggaggcaccccccgcgaggcggggtctcagagccagcccctcttcccccactggctcttaggacccccatcgcactggggggagtcacccccgcgaggcggggactgagagccagcccctcttcccccgctggctctgaggatcctccgtggactcacagcctctttaccatattgtgagtaatatcatctccccctctggagattaagaactctttcacagacaggtgtacaccctcggtgtacagagggtgtacacccgtctgtattgggagtaatatcatcctcttcct

SEQ ID NO: 479149 - DNA, 1000 bp, Homo Sapiens; identical to SEQ ID NO: 346773

SEQ ID NO: 479150 - DNA, 1000 bp, Homo Sapiens; identical to SEQ ID NO: 161491

SEQ ID NO: 479151 - DNA, 1000 bp, Homo Sapiens
acaaataaagcatgtgtttattgaaatagtacctctatgaagaatactttaagaatgtgaatggggttttgtttttgtaaactttcaattaccttcccttccctgaccctgccaggtattcatctcctgcccagatcccagggtggccttcctgaaatgaacgctccatctgaattttcttctcccctgtctctcaagagaatgcccaggctcctaaccatgtctcagactgccctgcacctcagcctctgtctctgcacccccaggcatgttcaacctcttgcaattcttgcattccccatagttcatgacccaacctttgcccccctaccagctggtcctggaataccccccaggctcgtttgtgaaccctcaggagtattcatgttccaaagtcgcagcactctggaagccgcctccccaggctgctgtgggtctttgctgggtcccactagtgtccaggtctgtctccgccatggccctagtgccatctcaagagtctgttatctcctcaccagcactaccctagaccatgggcttccttgatttattttctcaagatcctcaacacccagcttggggcccaaggcacagtgaatacatagtccatgtttttaaatgaatgcatttatgttctaaatggcttaaacattcccttgctctatcagctgagagagtctagaagcaacaacacctcactagcaatgaacacaccagtgcccagatcttggtttctaacactgttctaggaaaggagccagagcttcttggagaattgactgattcaagggcaaaggcaggacatgcagaagataagccaggagcatctttagtagcagaaattaaggagatgcccaaaaagccaagtgatgagcacctgtcagaggcacacaggagctgggaacccaccacgggagctcaccaaggccaacctcgaagaagctgagcaggaaaagaagcaaagtcacactggagtccagcccgagcatgggctgagtat

SEQ ID NO: 479152 - DNA, 1000 bp, Homo Sapiens
aaggcaatatagatttgaacacttgggcatgaaatcgtttttagtatactcccatatttttctgatctttgaattctctttagcattgccctattttccattcctaatgtttatttgagtcttttctctatttttcttgattcatctcaccagtggtttgcctacttcattaatcttttcaaagaatcaacttttggcttcgttgataatttctattgtattttttaaaattactctttaacttctgtttattttttccttttattctagtttctttaggattagcttgttgtccttttttaaagttggaagcacaattaattttcagcttttcttctttttcaatatgagcattttttacactttagcaatttcccacaaactttgatatgcagtatgattattcagttctaatggatgttgaaacaccaggactcaggggatgaaatatgaatataagttcatttattggaacaatactcattcaaacccactttgagaaccatttttttcttcatattcttgaaaggcaactaggaaaagtctcatgattcttctagtctctcttgataataaaaaaatcctggggtcacttctagccaatggcaaaaggattctgctgatgtgatcaagggcagagacctggaaatgggaagatgatcctggattactcaggtgagccctcagaatcttttccagctgcaatcagcggtagaggatccgtctatctgtgctgcctgggagtgtcaagaggccgtgtccttcattcacctcgcgcgtgggcggcgctgccctgaagatgctcccgggctcagtgcagacggctcagcgttctctcgcgttcaacgaaccgccagaaacgtcagatggtacggaggaaaacactttacactttaacagtatttttacgtttatttgcagcaaatgttgttggctttgtatttaaagtatttatgactcactataaagtgtaggatccaagaaaacgcgctagtttcac

SEQ ID NO: 479153 - DNA, 1000 bp, Homo Sapiens; identical to SEQ ID NO: 239941

SEQ ID NO: 479154 - DNA, 1000 bp, Homo Sapiens; identical to SEQ ID NO: 346775

SEQ ID NO: 479155 - DNA, 1000 bp, Homo Sapiens; identical to SEQ ID NO: 346776

SEQ ID NO: 479156 - DNA, 1000 bp, Homo Sapiens
gaggaggtcattgtatctttcaatataactgtgtccatgacttcctgtctctgtacacacatttttccttccccacctttagttagatcctcttaattgctctagtgtgttatatgccatccagggatttgacctcatgtaggggtgggagctggtgatggcagtcgccttcatatttggtgctggaacttgaaggtatccacagaaagggtaccttaatagaaggcagctggattctcatagttggctctgtactcaatctgtcgtgacgtcactcatcatgtagcctctggaaaattccactctgcataatacagaaggtctctcctttgctaatgcctgcccaccgcagagactgtccaccctgtgctcataggtcatcctcatacttttcccttctatattcattgagctctgtcatttgagaagcctttagagggtgcagctgtcacctgggagaaagttgatgtcagacgtgacatctcccagggtttccacatcacaatccacccagcacgagcactgctcaatgttcctggacaagaaggtatcatctcacaaaattattcatgcaaatagaatcacttgactatcccacctgctcacccgattttcctttatagtttgaatcctggctgagtcccaagaaggaccctgttatacaactagcacattcttagttttgagcactctgtgttctgtaacttcttgcattataaaccaaactaacatgattttctgcctcccctgatttcactggtgccgtcatcattcatcgagaggttgatttgcaaagcttttctctggacacatggagaagatgacacgctggccagccacagggaagcatgtcccgtgtctgccactcatataagctcttcaatatattgtctctgtttatcatcacatatacataatgagttatcatctctcctgttttgtagctgatgaacacatttccaggtctcagcagtgagtaaggggttggattaagcaccat

SEQ ID NO: 479157 - DNA, 686 bp, Homo Sapiens
ttccgtgaggctggtgttttattagtcttggtcccagtgctgcaggtgtgggctggggagtgcctgagggaggggcctctgcttgggacccttcctgcctgggcgaggggctgagtccctcctgccgcccgggctgggccccaggtaccctgccctctggggagcacagtgggagtccaggacaccgccttggatggggtgaggctccgtctgtgacctcagaaagtcagtctggggctccccttgcactgggcaatgtctgctgaagataaggacgtcttcactgggccaggcctggagttctcccagatcgtgagctttcctctctctgaggctgcctgtgcagggcccccggctggtgcccctctcctctgaagctcgggggtcgccacagcctggcaccctcatcgggcctgttacgcacgttctggtctctccgtgcccacagacccgccaagctcaccagccaatgtgcagccagcacaagcccgacctgctaggggcctcagaacaagcggtgtggcccgaggccgtcacacagcacctgtgctgagagtgagctgacgtggacggcggcaccgtggccgtggcagaggcaccatccctccaccctcactcatgtagggatgtggggcacacggactggagcccaaggccttcgtgctgggccctggctctgcactcgg

SEQ ID NO: 479158 - DNA, 1000 bp, Homo Sapiens
ccagcaaactcatgtattaaatgcatctcgttatgataacccgtgttaaggagcaagcatttctattttgaactctcatttcagaggcggggtgagccatataaattttcatagcagtgatttgtttattttatcatttcccttgctgacccttctctctctccagctctctatgagacaggtggtttggcttattaccggcttatttgaactggagcaatttaaatatttctttctctctgtctctctctctctctgacggagcctcactctgtcgcccaggctggagtgcagtgtcacgatcttggctcactgtgacctctgccctgtgggttcaagcgattctcctgcctcagcctcccaagtagctgggattacaggcgcctgccaccacggtaatttttgtatttttagtagagaaggggtttcaccatattggtcaggctggttttgaactcctgacctcgtaatccacccgccttggcttcccaaagtgctgggattacaggcatgagccgctgcgcgcctggcaaatacagtatttttcaaaacacaatttgttgtaaatccagagtttcatttggcaagcacctttggtatagaaattgtactaagattccaaacgctgaagtttggaaaggagggtctatccataggctgtaaagattgtatcttccatctttccagactctgaatccaactttctgtgaggctgattattacgttggcaccaatctctgatgcagacattgccctaggcaaaggtggagagtagggggttcctctacactcatctgacacccccccaaagaaactgtactaatgcttcaattagtacatcatgcatacacactccaagtcctgccatcaaacttcccttgtggcagcaacagttttccttcaaatctttccgcctgctgtctcactaggagttgctatttaactgtttcacataagggttaaattagcagaactttgtgtaaaaagtgtgtcctcctcc

SEQ ID NO: 479159 - DNA, 1000 bp, Homo Sapiens
agagactccttctcaaaaaacaacaacaacaacaacaacaacaaaaaaaaacataccaatagctatggcctaccattcccaggaaagaaagtaaaagcccacaaaggtaaatattttcttccctttggcgtcttctgcccttcattataaagagttgctcagttgttgaaaaaggatcttaatatgcaaaactttacattttagtgagaatcaaaggcaaattcttttgaactgtgtcacaacgaataacattacaaacatgtctctcatcagcacataactcgtccttattttagtcaagcaggcaaattagtgggcctgtggtttttcagattcctgtgcttgcttactcatgtacatttgactctttcagaaaccacttctggaagctcccggtctggcttctacactgccacctgtagacataaaagagaaataaatcatgtattattcgtcaacaatgcatcttttctaggcatctaacggggacatctggggaaaaagtggcaaaacatttgctccaaaagacaaaaatgttctttctcctctgtgttgaaaattcctaaggcgtccttctccccaatggtatgataaattatttgattagaaattgaaacatatgtaagtctcagatcatcaactatacaccactctgagccgatcattaaagagatggagtcgcagaactcaacttacagccatttcaagacctgtcgtttaaaattaaaagaaaacttcaccgctttgttcatctgtaattcagaattctgtaaattgacacaaagaaagatcaggggcgattcaggctaaggttactttaccacaaggttgtaagatgtctatttaaaataacagtaattctaacctgaactacagttttgtccaatccaaacagcagtttggtggggtattttcatcaaaatgccctatccttgatttgaatatgaatgactgcggaagggtctttctgaaaccccacggattttaatacaggtaggtc

SEQ ID NO: 479160 - DNA, 1000 bp, Homo Sapiens; identical to SEQ ID NO: 346777

SEQ ID NO: 479161 - DNA, 1000 bp, Homo Sapiens
ccaccttggcaagaggaatttattacttacaattcccaagaaaagaggggacgatgctcctcacagagccacatgaggaagcacgaggttctattaggaggcagaagcagccaggggaaagcacaggtacaggactatgttgtggcttccatgacaaagacaaggcagttcaagggaagtaacttaggattgagtagtttaaacaatgtcagtaggctcagagctgtaggtactacccctggttgcctagtgcctggtcctgggataatactaagacaggaggatagtgactcaataaattagatagttagcaggcatgggctctgggttggtttgtttgcatatgacaggtgtgctcagatggcagttgttttctatctctaggaattagctagccctgggaagggaagtctctcctcatccatcaaggccccaaaaggtcaaagcatcataaaatataggcaatttttgaaaccatgtttaatacacctactggctatggtcactggggaaatgagggggtgaaggcaggcccagaacaaaaaaaggacagtacacagaggaaagggcctggcttcagaataactcctatatcagtcagtgtccagcctgagaagtagaaccagtgaaagatagatacatagtgatatggtttgtctgtgtccctaccaaaatctcatgttgtattgtgatcccaattgttggaggtagggcatggtggggggtgactgaatcatggggctggtttctaatggtttagcaccatccccctagtgcagtctcatgacagagttctcatgaggtctgtttgaaagtgtgtagcacttctcctttcactcactgtctctctcctgttggccttgtgaagacatgtcttgcttcttcttcaccttcagctatgactgtacatttcctgaggcttccccagccatgccttctatacatcctgtggacctatgagtcaattaaacctctttactttataaattatccagtcttg

SEQ ID NO: 479162 - DNA, 1000 bp, Homo Sapiens; identical to SEQ ID NO: 161492

SEQ ID NO: 479163 - DNA, 1000 bp, Homo Sapiens; identical to SEQ ID NO: 346778

SEQ ID NO: 479164 - DNA, 1000 bp, Homo Sapiens
tctgtatctgtttcatccaattttattctttttcataaaagcaatgcagtaaagataaaactaaatgtggaccctgggaacaaggagtccagaggttgcccaaagagtcgcaaagtgcatcaggaaacctgaatgtgaagatcggtgaccgagagcctgatgccagcctcctcttgggtcttgactgaaatcttcccaggttgctattggattttgcatgtacgagcctccatcagaggatagacttaggcatatggtttgcccagtgaattgaagaatctccagagtttatgaattgaagagtgggatgaatacaatacacagagcaccgaagcaaacacatcagaatcgaggcaactccctgtttcgttcaccatgaagaaacatctgtgaaatcaaagtcatccccggtggaatcaggctgcttggggtttggatttggctttggtttgggtgggttcagtggtgctggctcgtcaatgaatccaggctgctcagggttcgcatttggcttcagcttgggtgaattaagaggtgctgggtcgttatttcctccatcacgaaaggcatctgctaagtcaaagtcagcccctgaaatctcctcttctcagatgacacggacatcactgccaggtaaacaacatagagaccaccccgtagggttagaggctcttatcagtgaaaccaggtcagttgggatttggatctggctttggtttggggggattaggtggtgctgggtcaccagtgaaaccaggtcggttggggtttggatctggctttggtttgggggcattaggtggtgctgggtcactgtttcctccatcaggaaaggcatcgctaagtcaaagtcagcccggggcggccaccagacggcggagcaggccgaggagccgcagcgccagcacggccccgcgcgccacggcgcgcccaaggcgagcagagatcgtccgcgagtgcagcgcgcgggcgaaggcggcgggacggaacctcccccacg

SEQ ID NO: 479165 - DNA, 1000 bp, Homo Sapiens; identical to SEQ ID NO: 346779

SEQ ID NO: 479166 - DNA, 1000 bp, Homo Sapiens
gacagtacaaaatctctttatcgctcattttctgtaaaaaatcgtggctctcggcggaccctggagataggaggtgcaaagggcgctcacacgcggcccgggtccgcggccgagagctggggggatctggagcggggccgggtcgcaagaagaccctgaccctgctccggcgctggggcgcgtgctaagggcccgcggggtatcagctgtattttcgaacccctgtgcttggccggggagttcccaaggctccactccgccttggagggggctgcggaagcccggaggtgacccgggctctgggaggggcgtccccaacgtgggggaagggagacaggggccttcgaagacagcgcgagactcggagggggtccccccgacctaagacgtggtaaactgaggccggcgaggagcgaggctgagtccggggaccaggcggcccctcactgctcctccggcccgtcgcccccctgcgcctgttcgtacgggcagggccggcggccgagtccagcgggctcggggccaggcctgggccccgggggcggcgcctcctcctccgcgccgtccccatgctcgccctccgcgtcgctctcgtccgagttgtcctcctccaagtagccgtcaccgcgcaccttgtgctggggccgcgggatgcggggctggcgcggggccacgccccgccgcagcttctgctccatccgcaggtaggagaccgcggccaccaccagcgtcaccagcagcaccgccagcttagccttcatgtgcaggctggagcccaggtacacggtgaagatggccacagcctgccaccagtggtagatggtgaagatgaagtcctgtctctccttgtcttcgtacaagattcccaggagtgtgctgagtccagtcttgttcagggcgctgcccacaccccaaagggcggctgccacacagaggatccagctgtgttgcaggacctgaggcacaggggcccagaaaaagaggatgaaggtgagcagca

SEQ ID NO: 479167 - DNA, 1000 bp, Homo Sapiens; identical to SEQ ID NO: 161445

SEQ ID NO: 479168 - DNA, 1000 bp, Homo Sapiens
tcattcttttacaacttctaggactttgtaaacactgttctggaatacagtggtgaagtgaggtttggaatccttcaccaagaggttacataagggagttttcccagcattggcaggatcttctacatcccaaatttcaggcatactgcaaccaggcagaaagtagagaacgacccacagttttcctgagttcaacagttggatcttcttacacaccatgacttttctagaatgtaatagttcacttttaactatcagttctcgcttcacttcttcagctgctttctgactatacattgagtatactatttttgttctggcacctgtgtgtgaacagggatgaactacaagaaatacaactacaggactactctgaagctgcaacagtcccaatgtctgtttgcatggaaggtttgatctcaagcctgcatcttcataatgtggatgattcacaatgggctgaagcacagagagcttaacacttgccatcctgggcgtggcacctgcaaacattgcatctggtttagtactatatttgatccattctataaattcttgtggcaagttgctgaactcccctacagtattccactgggtttgcagatttgctgaacctggtattgacattgctgctaatatagcaaaaacaacagcaccaggatgtactttgcaaaagagccatccaaatagctgtcttgagcagatcagtgatgccataacacacatgtgtggtgtcaagaagagttttagtctcataattaaaataccaagggctgtatatgctaacaattgcaatgcatggtaaaccagctttctaacaatagcaacaaacactacaagaacaactggaaacaataatgtctttgtgtatctcagtggagtctctttttccataaagtcaaactctgctgcacaggtatataataaagtatcaaaatccttataactgaagaattttgatgttaataagttgccaatatgagcttgaactgtttcattg

SEQ ID NO: 479169 - DNA, 1000 bp, Homo Sapiens; identical to SEQ ID NO: 161493

SEQ ID NO: 479170 - DNA, 1000 bp, Homo Sapiens
gatggggaaaggctctttaatgtaccctttgtgtttgtaacagaaaggaaacagaacagaaaacaaaccatcgaattgaaaccagcactttcctgcaggttaatgagacatcctcgcaaacactagaaaaagcaggtcacacctcggtgaggatcccatctacccacacacatccctctttaaaggccctgtaataatgaatctgcttttgtgagtgagcagacatgccccaccccagtcttcctctaggacttttccccctgctgtgagctgatccctgaagctggaggggctgtactttcccacctaaaccattatctcccctccactctcagcgcagggcaagtgccaacctcactccactaccctcagatgtcaggcaggccgtcagcccaggagctaggaatgcaggggtgaaggctgccttttccaaacaggcaaatggaataactctgacaagagttggtgtctggcaaacctagtgacatccagcaaacctagcctgtgggcaagatgagtgtcctgtcctgttgtctggcgactctggtgactctccagtatcagacgaaagaaatatctcccttctgagacaatgtacacctgcctgaactggcctgaaacaagaggtggtaaaatttctccctcggtaacatgtgggtgatgggattctggatgaaattttttctattatcttaactttcagtgcactgattagattgttattacatttaattggggggagaaactggaagaaggctatagaacttttttttttttttgagactgagtctagctctgtcacccagcctggggtgcagtggcgcagtctcggctcactgcaacctctgcctcccatgttcatgcaattctcctgcctcagcctcctgagtagctgggattacaggtgtatgccaccacgcccggctaatttttgtatttttagtagagacgggatttcaccatgttggtcaggctaatctcgaacccctgaccttgtgat

SEQ ID NO: 479171 - DNA, 445 bp, Homo Sapiens; identical to SEQ ID NO: 161494

SEQ ID NO: 479172 - DNA, 1000 bp, Homo Sapiens
cgatagatcacagttttttattcttaatgtcacaagcaggagaaaaatctcacattcatactaaaaattccaactagactcaacaggaatgaagtctctatttgtaatggaaagtcccagcctcccgctgccgtccagtgtgtgtactgtacacatccacactcactctcactcagggttcccggaccggctgtcctgcctgcggaactgaggtaaacaagctcaggtactgacactaggagggtctaccttacataaggtacaggtagaagcttgattgattgctaggcccaggcccacccagaccctccaatcctaacaggtatttaggcttgaggttcactccctcctcagctgcacacgcagccaggtataacactcgccctcagtcacaacggggagggggcaccggttacatctacatcacattatttataaaataagaattacatttcatataacatggccagaaggagctctagtcccccaggaaagctgccggggacagcatttgagcctcttctttgcacaggcataacttaactatacagctaattcctagttaatagcatttatacttaaccacctcaatgaaccaagcttgaaggaatttaaaaggcaatttagcttaaatacaaaaataaatttttgttaaaaaacgtttaaatatttttttcttttaatttagacacacgcattcatacttctcccaaagaggttgggcgtgacagcaaggcgcttgggcctggggtatgtggtttcagaaggacggaaggaaaggatgggctgcagagggccctgtttgggaaaaataggattttaaaaatatggttcattaatttaggttttctaacatctactttgggtgacgtagcctccagtgaggtcagttaagtgggacagaaaccgcagagggaagaggtctttgcttcccctgggcccattctccctggctgccagcccttgaagtcagaacaccatgggaaaattcaggagtcgg

SEQ ID NO: 479173 - DNA, 1000 bp, Homo Sapiens
ctaggggcctacaacaggcaggagctgggcctggtgaagccaacttcgggatgctttgggtgggcccgcagaggccatcagcagcaggcaggagctgggtctagaggggtcatcgttcagtaagggagctttgggccgggagacaccatcggggtgggcgggagctgggtctggagaggccaccgcaaggcacaagctgggcctacagggaccagcatgaggcaggagctgggcttgtggaggctgcccggaggccggcacgaggggggtcgtggaaggccggcacgagtggggtcgtggaaggctgccgcgaggcgagagctgggcctggaaaggccgctgcgaggcaagaggcgggcctggagagctggactggagcaggctttgggccgatgtaggttgccaggagctgggcaggagccgagtcaaaggaggctgtttggaggcaggagctgggcctgtgggcgcagccatgagcaaatagctgggcccggagaggaggccggcaggcagcaactgggccgggggaggccgatttgaggaagttctgggcctggagatgtcgccagaagggaaaagctgcgcctcaagaggccgcggtgaggcaaagccaggcaaaaaaaggccatcgggacacaggagctgggcctgcagaggctgccgaaaggtgggagcatggcctggggaggccacggcgaggcacgagatgagcctctttaagaggccctcggcaggcaggagctgggcttgccaaggctgccgcgaggcaagcggaaacgtggcctggggaggccaatgtgaggccacagctgggccaggagaggccttcatcatggctccggcgttggggacccagactgtgatgagcacatgacagaagtacaaaatgggactgaaacgttctccaggggcttcttgttgcatcagagagagtggggtgagacatcttggctgaggcaaaagctgccttgagggagatggataggtgaggtcaccacat

SEQ ID NO: 479174 - DNA, 1000 bp, Homo Sapiens; identical to SEQ ID NO: 346781

SEQ ID NO: 479175 - DNA, 1000 bp, Homo Sapiens; identical to SEQ ID NO: 161495

SEQ ID NO: 479176 - DNA, 1000 bp, Homo Sapiens; identical to SEQ ID NO: 346782

SEQ ID NO: 479177 - DNA, 1000 bp, Homo Sapiens; identical to SEQ ID NO: 346783

SEQ ID NO: 479178 - DNA, 1000 bp, Homo Sapiens
gtagatctaaactttgatctgtattttggataatcaaataaatataaagctttttgccccactttgggagggattttttttttctagaacaaaatgaaaccttcaacatattcttccactgaaaaagccaaagttccatttcagacatgaaggtgaagggcccttggagctgtagcaccagaagaaggaggaagaatgcgggtgatggctttgtttggagtcatcaggctctacaacctatcatttggtttctcactagtagctttttaaaattcccaaacagtcttagtattcttgttgttaatgttactattaaaataagttcctatggagtaaaagagaaaaattaagctgttaataaaatgtcttcaaacctcttctcagaaaacaaagcagcaggttcatcgtacacgtaccagtctcaatcccacagaaacgcttggttcctttcatccctatgctgtctatacagtttaatctctacctttaaaaaagagacgaatgcagtcattttgttagcttaggtttgtgttttgtttttgtgaagtgctgctggcttttggccaaaatacatatatttcaactgaacccaagtgttcagacaattgccagcccagtgaaaggctcatgagctgtcacacgacgtatggcatcttctaaattgcaacttgctccctcccttgggcaggctgcccgagagttgctccttcctcttccaaacacccactcagttgatttccttttggtcttgcttccacaggaagcggatacttggcaaatctgcgaggcgaggccgatcagctgtggaagttctgcacggtgctctgtttctgggagagccggaggagctcctcgcggattgctttgatgagagaggccgaggagtggccaggctggaggtcttccgtggagctggtggggtaacccagcccagggccctgcagtccccggtgggggaggttcccggaaggagctgagggctccctgcctgaagtccttg

SEQ ID NO: 479179 - DNA, 1000 bp, Homo Sapiens; identical to SEQ ID NO: 346784

SEQ ID NO: 479180 - DNA, 1000 bp, Homo Sapiens; identical to SEQ ID NO: 346785

SEQ ID NO: 479181 - DNA, 1000 bp, Homo Sapiens
gcaagatacaagactatttttaatgggaaatccaagaaaaaaacctgaaatgccatatttatcacaaccttagatagtcactgtaagtcaaggttcctcgccctctccattcaaagcaaagcatcactgtccatgaaaggcacccctcagtgacaggaggtgcacctccccacgtccgtttagttacaaacaggagcccacattttcttaatttctataattagtgttagcattgcctacatttgagaatgtttgatgatgatcaaagagagtatggaaacagatttggcaacacttctacggttacgaccgtgaacagttttcactgaagcttacttagtgtcacaggtcccgccatgttcctgtgaaggtcactaggttttcaggaataattgtcctgtttagtgcatttcccaagaaaatccaagttaggagaatgttcctgatttactactttaaatgccaaattaaccttaactagatacgtttaaataaagctatagggactatgttttaaataacaattgtcctaccctactggaaaatagtgttaattattattcagttctatttccatcgtgtgtcagctcgggtgcgagttcgctgggttatgtaggagccatcagacttaagcagccacagacaagacaaaaaagaagcacccaagtaattaagtgacattaactcactaacttttaatcagagtttaggtggggagggggcatggaaagcccttccccttagctttggtaaattttcctaaatttaagaattgtttcctgctgaagagtcaggagaatgatttaaacacataatgtgctttttaagcaactaagtaacaatatggcaaagagttttgggtccgggggggttggggggggggatttgtagcatcctacccacttgattgtcaccaaagacaatgagaatctctttttagaaactggtgtagaccataccctgacatttttaatcattaaagtcagattccattgaatgc

SEQ ID NO: 479182 - DNA, 990 bp, Homo Sapiens
ctagtgcttctctgcttggctgaccttcagggcactgatgacaccattgatgttctcttcggggacaagtgcatgatcaaacttgaaagtactgatgtagtaggctgggatgtctgcagcagccaagggctctgagatctgggccacgatgccacactcatcaaaccccaggggctgtcctccaatccggaccatcttccagagctctccggatgcgcttgtgaacagcaagttactaggaaacctctgctgcgtctgcacgtccatcaccagggagatgtagccctcgatgagggagaaggagaagaagcggatgtggccgcagtcatccccagtggccatggggtccttcactccattggagtagaacatgacatccatgaggagtgtggcaacagcaggcagcgtgtcagggtccaggctggtgacacagaacctgttgctcgggctggacagtgggtggatgactggcctctggaccagcttgggcttcacgaagccattggtgatgccgaggttctcggctgccacggtctcgccattgacgacccgcaggatggtgaactctgatgacaatgtgtgggtgacaaagggcaggtcccgctcgcgcaccaggatgaagtctgtctgatacgtggacagcatgaacacggatatgttctggtcagccagtggggcgatgactgacttggcgatcttggtcacgccgatgggctgggagctggagaagctgccaccgccggacaccacgttcagggccagccaggtggcatctgccacactcaggtgctccgaggagggcagctctaggaatccttcctcatcgacaatgatagtgtaatcctctggcgtctcagtcagactgaagaacttgcacctggtcttggaggacaggaaggcaagtttgatcaggccgtaggtgaacagcgggatactctccttggcgacgctggcaacttgcagccggtgctccaggatgtggagttccat

SEQ ID NO: 479183 - DNA, 1000 bp, Homo Sapiens; identical to SEQ ID NO: 161496

SEQ ID NO: 479184 - DNA, 1000 bp, Homo Sapiens; identical to SEQ ID NO: 346789

SEQ ID NO: 479185 - DNA, 1000 bp, Homo Sapiens
ctgtaatcccagcactttcggaggccgaggcaggcagatcacctgagatcgggagttcaagaccagcctggccaacatggtgaaaccccatctctactaaaaatacaaaaaataatttgccaggcatggtggcaggcacctgtaatcccagctaacatttttactttttttatagaaacaatttatccctatcgtcctgcctcagcctcacaaagtgctgggattacaggtgtgagccaccacacccagccgtatcttgaattctttaaagccatactgaaatgagaattcttagccaaccactccaagtaaaagatcagctttctcatctctgtttccactgtatcttgtaccatacccataataacatcacatatgttagacaataataatgtatcttatgttagtggagtactttcatccatgatgagactatgttcttcagttcagggactgcactacattcatctttgtaacccccacacctagtagagtacctgatacatggcaggtacacaataagttcctgatgaataagtgagcaggcagtaagaacttgaccaatgattctgtagttatgcaactttgaggcagaatcacttatccagtttgttagtatagatttctgaaggactagaacatagtccttggatttggatcagagaaagaaagaaaaatatccttgagatgggccaccatctagaaagggcaaacccaggtgggatgggtgccttcatgggttgggaagacaccagacatccccagaccttgcccatgaaatatgttgaccaagatagggtcacttcccaggcttttcaattgaagtaatttcttagctcattgaaaggattccgtttctctctcaccttattagcctcagctttttttccccaaggacatccatctttttattagacaagctctataaactcaagttggcctcaaaacaatcaaaccacttattcatgaagacaggggaacatgggatacagagatgtaa

SEQ ID NO: 479186 - DNA, 1000 bp, Homo Sapiens; identical to SEQ ID NO: 161497

SEQ ID NO: 479187 - DNA, 1000 bp, Homo Sapiens; identical to SEQ ID NO: 346791

SEQ ID NO: 479188 - DNA, 1000 bp, Homo Sapiens; identical to SEQ ID NO: 346792

SEQ ID NO: 479189 - DNA, 1000 bp, Homo Sapiens; identical to SEQ ID NO: 346794

SEQ ID NO: 479190 - DNA, 1000 bp, Homo Sapiens; identical to SEQ ID NO: 346795

SEQ ID NO: 479191 - DNA, 1000 bp, Homo Sapiens; identical to SEQ ID NO: 346796

SEQ ID NO: 479192 - DNA, 1000 bp, Homo Sapiens; identical to SEQ ID NO: 346797

SEQ ID NO: 479193 - DNA, 1000 bp, Homo Sapiens
ttttttttttttttctgagatgaagtcttgttctgtggcccaggctggagtgcagtggcacaatcacagctcactgcagcctcgacctactgggctcaagcaatcctcctgcctgagcctcccaagtagctggaaccacaggtatgcgccaccacacccagctaatgttttaattttttgtagagatggggtctcatcatgttgctcaggctggtctcagattcctgggctcaaacaatcctcccacttgccatttgcaagccctgtggtcttggataagtcacttaatcattcagcaccccggtttcctcatttggaacatggtaaaaagaatactggccctgtgaagttgcaattttaagtaacagtgtttaaatgtgctttctgaacgtttgctcacactggtcgcagtgtcaccgagtgacaagtatgaggccaggaaaggccagcgaagtgtcctgtctgcccagctcagggctgcagcagaggaactgcacccagcttggactcctctgcctcctctgctccaaaaggcccgcctgtgcgcctccctctccttcctgcaaaggagcatgcttctctcaggctgcaccacaccttgccctcccgacgtgggctgcagaagccatgggaccaagaagcaaatcgataccaagaagcacagccgcatgcctgatgggaactgatcccagcaaacgagtgagccagcaggggctttctcgcagtccccagggtgttccgggagaatgcgtcagagtatctgtcccggacaccggtggttttcgggtttccctccatgactaagactctcaatggagtacggcggcaaaaagaggaaaagcaccaactcatgttttctgaatcagcccgccagctgcagaactttgggctccagccagatctatggaacaagaatctgcatctgaacgccatctccaaaggactcctaggcatttgagcttgagaagcgcgggctccctccccactctcatcgtggctc

SEQ ID NO: 479194 - DNA, 1000 bp, Homo Sapiens
ttattcatttattttatttatttgctgcttctgaacattgatgcttcgtgtctcttgcgggggtggggcattaggaggcctcttggcgaccgcggggggagggagcacgaagtccaggggcggcgggagctctgggtcgtccaagggtggtggctgtggcggcaggaagtagtctggcagggaggggaagcccctgccgcctgtgttcttggccttggaggggcgtggcggggctgctgctggtatccctggacctctgcaccagaggaggcggggcaggctggacttcgatgtttcagcatgtgtttgggccttttccagaacagcactgacagaatgtgcagcctggggcatctgtccattgggcttggtgatgccttttataggtcgttgatttctcggctccttagaaaggatcccgccaaggatggccgcctctccacaccggggctgtttctccttcaagtgaattgctgcccagcccacaccagaaggtcttccgctcctctccttgtggctggcattgggggacagcatgttctgggcacctctgctcccgtatatcgcggcctgcatcttcacagtctgcatgctggtagacgtcagagccacaggctggctctgtgaaccctttcggggtcttctggtgccgctgtcaggacactcactggctcccaaattcgattgggcagcctccaaagcagtggggtcctgcgctactaccacctccacttcgtggatctcagagctgcaggaaagcttcacccaccgcaccctgagctttgggcgtctcctggtgctgctgtcaggtccctcactggctcccaaattcaactgggcaggttccatagcagtggagtctggcgctagggccaccaccacctcgtggatctcaaagctgcaggacagcttcaccctccgcattctgagcagaccccacttgcaactggcagcaggggcagcgtgttctgggtgcctctgctcctgtatatcgcagcct

SEQ ID NO: 479195 - DNA, 567 bp, Homo Sapiens
aacaaacatggcacatgtatacatatgtaacaaacctgcacattgtgaacatataccgtagaacttaaagtatactactactactactactaataaaaactgaaattacctcaacaaaaggcaatgccaggtagttacaaacatgtactacccaatcctgcctgaaggtgggagtcttcagttatgtaatggtccatgtcctgaaggagcaatgaagtataaacaacactgcaccctgttaccaggcatctgacatctgttcactcgcgattctgcatttaggtagtcctcaaatttactatcaatataattgatagcaggctgccagcaattactattatccactgcatctccaaatcctggggtatcaactattgtaagcagcaactgaacaccaccttctttgattaaaactttggattgttccatctctaaggaagcataataaaagttacaacacatgctttgtgtgtattaatattattccagcttatcatcaattaaaaataccaatatctagacctgtacaggttttttaattctctgagaaggacctggatactctgg

SEQ ID NO: 479196 - DNA, 1000 bp, Homo Sapiens; identical to SEQ ID NO: 346798

SEQ ID NO: 479197 - DNA, 1000 bp, Homo Sapiens; identical to SEQ ID NO: 346799

SEQ ID NO: 479198 - DNA, 1000 bp, Homo Sapiens
ctacacgcactcatcggggcagccgtactgcagaagcacgttgatgcactcctggctggaggcctgccgggcgtaggtcagcgctgtgttcccgtgggcatctcgggccatgacgtccaccctgtaccagatcaggagctgcgccaggaccacattccccttgcggcaggccagatggagcgccgtgcagccgtctccctccccacaggtctcgttcacctcctcacgggagccatgtgccagcagcaggatggctgtctgcaggtcctcatcagcggtggcccgcagcaggtgctggcccagggacagctcagtgcagggtagtggggccagaaagagcttcttctcatatttggaacggatccaccgttccttctcttccctcgtggactttactgagggttttgtctgcccctggctgctcccttcccagatgctgttggctaggtcattgccaatagatgacataaccttcctgagctcaactggccagtcatccagctccagagatcgcacacgggaaaggcgggtgccaagactgcagtggattcctgagcattcaatacacatgaggactcccaagttcaaactggcccacttaggattctgggtctcacagtccacacagtgggcattcccacgcatgttttggatcgactgcagggccatggcctcgctctggctggtcagctgggacttgcttttactgctctcgcatgactgcaggctggccacgatctggctctggatggcttggacccaggcatcccgctcctcatatgtcgtggcttcaaagtgccacgtttggccagtggcagacacaatcataaagttgttggtgcttttcttctttaggtgtttctttttattggcatgaggagaagggggcaggttgagcttggggctggtggtgctggagatactggggctgaagcatatggagtcacccagcccggtgtccatgtccttggataggccattgcttttagagctggagatg

SEQ ID NO: 479199 - DNA, 1000 bp, Homo Sapiens; identical to SEQ ID NO: 161498

SEQ ID NO: 479200 - DNA, 475 bp, Homo Sapiens; identical to SEQ ID NO: 346801

SEQ ID NO: 479201 - DNA, 1000 bp, Homo Sapiens; identical to SEQ ID NO: 346802

SEQ ID NO: 479202 - DNA, 1000 bp, Homo Sapiens
aggaaaagaaatcaatatatcaaaaggatatctgcaaacttgcatgtttattgcagcactatgcacaatagctaagatacggaatcagcctaagtgtccatcaatggtagaataaagaacatgtggtatatatacacaatggaatactgtttagccataaaaagaatgaaatcatgtcatttgcagcaacatggatggaactggagattatcattattttttttcatcacaaataggactttttatttgccactattataagtctgaactttaaacagattcttggactggtcattcatatccatcagctcattcgactttagcacctgtcttgtccccagtggcttttccagaactactgccttcaccatgaagctccatgagttttcccaattcaaacttgagcttcttcagcatttttacttttctaacaaagacatcgtggagaaggtaaatagattggcaagccttttctatgtcttttccaatgctgtctagaatcaatttattgaccacttctttcaagtcatttgtctgcacctcttgggtcatgatttccatcatcttctggatttggcggatctgttggtgctgagcataagaggtcttccgtatctgattgttgctttttttagtaaaaccaatacagaacagacaaagcaagtaaccatgagtagtcttaacatcaacgtgagcttcaatcattgtactttcttcttggctccctttttgctgccttttgtaaggtgcttgttcttgccaaccaccgtggtgctgctcagagagccacaaggcccgcctgaatgaacggggactagtatgcgccggggacacggcgcctgcccgtgccgcccgtgccccttcttctccccgagtggctgacagcatcttgctaggcagctcatcaccgacatggacagcaagcaactcctttctccgaattccccgggcatcccctgctaccacctcgctgctttccgatgtggcttccttgatacgt

SEQ ID NO: 479203 - DNA, 987 bp, Homo Sapiens
gagacattttccccatggtcttggggattaacattaggctccttgctgcttatgcaaatttctgcagccagcttgaatttctccttaaaaaaaatgggtttttcttttctactgcatcatcaggctgcagattttccacatttatgctcttgtttcccttttaaaacagaatgtttttaacagcacccaagtcaccttttgaatgctttgctgcttagaaatttattccaccagataccctaagtcatctctctcaagctctaagttccacaaatctctagggcaagggtgaaatgctgccagtctccttgctaaaacataacaagggtcacctttacttcagttcccaacaaggtcttcatctccatctgagaccacctcagcctggaccttattgttcatatcactatcagtatttttgtcaatgccattcacagtctctaggaggttccaaactttcctacattttcctatcttcttctgagccctccagattatttcaacacccagttccaaagttgcttccacattttcgggtatcttttcagcaatgccccactctactggtactattagtccattttcatgctgctgataaagacatacctgagactttgcaatagtcaactgaaccatcttcttggagtactcatgaagatggaagtctacatggagaatacaggatgaatccactctgtctcctgcagtgaagtctgtttgaaggatgtatttggctgtcttctggacaggccattctcttcatctgagacaggatatctgctgatgttaagttggcctggtggtcagtgtcacagtattcatgtctgagagtctctgtttcctctgaaaaagccaagccagctgccgctgggtatactcttcttcttcaccaggacgagagggatgagagacccacgccccaggcaaccccgctctcaggcctcctccagaacagaccccagggtacgctacaactcacacgctcac

SEQ ID NO: 479204 - DNA, 1000 bp, Homo Sapiens
taaatggggacaaaaatatctgctttattattaccacttacttatagaggtgatttacagatttaatgagaatatatcaaagtactttataactcacaaaaatataaacttatataatgctatctactttgtattgagcatattctaaattctgggactagtactagaaactttacatatatagtgttacctcttaattctcaacacaaccccacagttgttataattacatttaatgtataaatgacttcagagaaacacaaaaaagactgggtgatttgttaaaggtccagctagaaaagggcagtcagaattcaacccaatattacttccatacagaggtttttactttttcctttctactcagagctaacacaacagcattatttaacgtccttaagaatggtggggaggaatcactgaataacctgctttgacaaaaacaccctgataaaatctatgcttgtattttagaacccctgggtttcacgcattgtttttatagtttttacacattaagtgtaaggtgaaaagtgatagattttaagaaccaagaatatggtatgccatcccacccaaacttataaacaaatcacaaataacatgaaatagaaaaaagccataaagacttcctttgcttttggaaaacagctgagaaacaacaaaattcttttcagaagtacagacaaaatttgtttttgtagtgtagctaatatgccctccttaggcattaagacacttttctgtttgtaaccttaatgcagccgtatttttactctttataaaaatcaagtctctcaataaaaacagtatcttactcactaatcattaaattgcatcactaaaaatgtagttatacacaccaatttctgacctcttagaatattctgcacaatcagttttaatcactggaatgaataactgctcaaaaaagcagtacagcttcaatttcatgatgatttggtagtcaatattcctgttttccagtaaaagggagatt

SEQ ID NO: 479205 - DNA, 1000 bp, Homo Sapiens; identical to SEQ ID NO: 346804

SEQ ID NO: 479206 - DNA, 1000 bp, Homo Sapiens
ttactgttttttcaagtcttcaagcacatcttgctttgtgattttggcccatgcattggggattttacctttacctgcaaattttttctgatatttttcttctagatttgatctgaagtgagagacaaaccatttccagtatagctggatggaggtatctggggtgatgctccacatggcataatcccctcctgcttgtcgatagttcttaaatgggaaattcctgccatccctcaaaaccaacaaacaatcacttgcaaccaaactagtacagcaatcaatgacaaaatcatctgtttcataccattcctccccattgacagcctgaggacggtggaagggaacactatggtctccttcatgtgtaggaattgtgtttgtacaaattgctccacagctgggacactgtttccagcagccacagagatgttcagagagcattttctcaattttagaaaccattgcttctataggcttacttgaataattctgttctattttcttcattgtgagatccaaagctgcactcatggcttctttaagaaattcagtatgttttatctcctggtgttcaatgcttatcaagtcccttcgtggaaagatcaagttgcaccccaggcaatcacagaataaatccaaccactcagaagcagtgctgcttttatctttagctactgatgtggattcatggatggcagagaggatggtattcttgatatcaattaagcttttttcaaaaaaagtcttcattttttcacctccattgtctgaacaatatcttttaatatgatttttgatgtaactcctaaaaaacgattttgaattatgaaggtattcccagtaattatcaaagttttcttcttctgccagagagaagagaatgtgtttctccaggttagtcctgtttccattgaacgcagggcaggtagctcgcatgtcccccgcaattttaaaggtcatgtcctcccatatagtagtggagactgcaggagtgagctta

SEQ ID NO: 479207 - DNA, 1000 bp, Homo Sapiens
tatacttttagtgtttttaccacatttaatagtaacacaataaatgagttttaataacattagaatgcaattcaagacataaaacagaacctatttgtcctgtttgataaggcacaaggaagagggctttatgggataaaggggttcccacagcagataaacacatttctgatttgtctctggtcagagatgaatacagcaaaagataggcctgagaggaggtgagaaggagcaattagggatggtgtatataggggagctttgattaacatcaacgaagctcacagttctagcttcacaatccaggaataatcctacatggttggtaggtcttgggacatactgcagtgtaactggggaggtggtaaagagactgcactgaatgtcgttcttaacaatcccaagactaaagagtccctcctctccatatatattgccattctgattcttccctttccagtacttattacaaacaccgaaagcccaattccaagagtcccccacatggacctcccagtaatacttgccagaggtgaaagtctgagcaccccatgcaagaaaacttgtaggtgttgcagtgatatggggcgcattttgacggtcacatccaatacaaatgcttctcaaatctccacatcagaagatatgactgttggcttcattataatgcagagtaatatccactcagaattagatgagcctgtccctcagtccagtgatgggccctgcactgagctctagattcagaggctggggcatgtgcagcagcacggactcacttctgtgtaatatgtctccaaaaccctgaaggaagcgaccttggcattttcttctgtcttcccataggatgctgttctttgagatctcaataaagatggcatctggttccctgcccagaagcagaaattctcccactagacccaggcgcctcatggccatcagcagacctctcaccgtcatgccctcacagaagtaggccaccacccgggccttgggcaag

SEQ ID NO: 479208 - DNA, 1000 bp, Homo Sapiens; identical to SEQ ID NO: 161499

SEQ ID NO: 479209 - DNA, 839 bp, Homo Sapiens; identical to SEQ ID NO: 161500

SEQ ID NO: 479210 - DNA, 1000 bp, Homo Sapiens
cccacccaaatctcatgtttaattgtaatccccggtgttggaggtggggcctagtgcaaggtgcttggatactgcggatggtttctaatggtttggcaccacccccctagtgctgtctcgtgataaagagttctcacgagatctggctgttgtaaagtgtgcggcaccttccccttcactttctctctctcctgccagccatgtgaagacgtgcttgcttcctctttgccttctgcaatgattgtaagtttcctgaggcctcccagccatgcttcctgtacaatctgcagaactgtgagtcaattaaacctcttttccttgtaaatgacccagtctcaggtagttctttataggagtgcaagaatggactaatacagagacattttaaggggcagattggggatgggaaaggaaaacagtctctcctttggtccctgggactggcttctcctggctttctatgcatttgtaacacagattggctgtttctggtggggtttccctccaagcagccctggcttgtgggtggctgtctataggagccatgatgttttcagcgacctttcctccagttcagcaccagtgtccccaggggctcctgggagaagcccccagggggccgtctggacatcggctcaggtgctgctagcaagcaccaggttccaggcagcttagatggtctctttgaggggagatgctctcagctgctgaagagaaatttcttcactcttctcttctacatgtttcttggaagagccttctttgaccttcccagatggggtggctgccgggcggagaggctcctcacttctcagacggggcagctgccgggcggaggggctcctcacttctcagacggggtggttgccaggcagagggtctcctcacttcttagacggggcggccgggcagagacgctcctcacctcccagacggggtcgcggccgggcagaggcgctcctcacatcccagatggggtggcggggcagaggcgctcccc

SEQ ID NO: 479211 - DNA, 534 bp, Homo Sapiens
gggttttttcttttttttttttttttttttttttgtgagccaaagatttatttcttcatttcttgcatttgaaatactcttcgatgacatccttggcctgagactccttgccatagtccttaactactacacaactgtaaccaaccactttatggggtttcccctctctgtcaattttacagaggcctacccattctcctagtttcttgttgtcatcaaccttaattaggttgatttggtgttcagcacaaagggcctccaccaacttgacatacataggctcatcacagttggatgcaagcacacaaagatgggcttggcgcttgtctaagactttggcagcttcgcgaattccacgtgctaggccatcgtggatgagggcggtcttcagcacctcttgtaaagcagtattaacctccattacacctccagcagcaatgccttcctcggccatggcagtgggttacgggtgaacctgaatcttgaacgcacccaagcctccgcctccgcgcgactcggcggcaggagggaaag

SEQ ID NO: 479212 - DNA, 1000 bp, Homo Sapiens; identical to SEQ ID NO: 346808

SEQ ID NO: 479213 - DNA, 451 bp, Homo Sapiens; identical to SEQ ID NO: 346809

SEQ ID NO: 479214 - DNA, 1000 bp, Homo Sapiens; identical to SEQ ID NO: 346810

SEQ ID NO: 479215 - DNA, 1000 bp, Homo Sapiens
attaattaaaataatttaattaacaaaagtacacattcaaggtggttatcccattcataaccacatagtaattacattccatgaagttacaatgagctcacaggctctcgcacatagtgtcttaggacagtatttgcctcatatgtgggaggtcacaataaatcatcgtgaaaccaacttttcatgtacaaccaaagcaaaagaaaggcctcagaggggaagagaaggaggaaggaggaaaaccatagataagagaacctttagaaacatcaaaaaaactcacagatccattatcataatccagaaacaccccaactcgacccagaggcctttgcacatactgaattaaaggtggagagttggtggagagactatagtgattgctcctctttgaggaaattaaaaaaaatctttcatcagaatcaataacgaaattggcatctgcagtcctggaatctcgacagactcccagaatccagttggaggagagggtcacatccacctcccagtaatgcttgccggaggtgaatgcttgcgctccccacacagcaaagctgtccactccctggggatccgtgggagcactgagatggtcatctccaaatatcacatatctcacatcctcagaaaggcttatatagcaaggaatcatttccgtgctcagagcactatccactctgaagttgttgagcatgtctaggactccagttatgcaccatgaagtgagctctgggttcactggctggggcttttgcatctgtgccaaatcagtccttgctgatacatttctcacatcctggagcagcaccacgtcaggcatgtggcatgtctcccacagctctctgtacatgtctttcatcctttctaaatgttgggtcattctcacttgactgtcttgtagttgttggaaaagctcttctgcttctctttccagtgcctgcagatgccgttgctcctcctcatcgagaaatataggcatcttttgatattgaatagtgat

SEQ ID NO: 479216 - DNA, 933 bp, Homo Sapiens
tcaattgccaggaaagaggtagaaatatcttgtcatggacactcgttctatggtgggcatttggactgttgcctccggactttcaaatgcttgctgaaccttccaaaatacttcctctaggtggcagcgccaggaatatctctggaagcatgcgatgagttgtgtgatgaagatggagccccttgtgctgtctctcctggacacgttatctatgatgatacagatgggtatgccttgggctatgaccttcactattttttgtttacatttttgttttgaggatttttttttaataaaagcatagattccccccaggatgccatgagacatgagcaccaagaacgtgctgtcggaggacttgtgcttggtcttctctttgtgcttctcatgtgccagtttcattttcagctcagctctttcacaggtagcttctcgtactttgaaggcactgcattcatgtctctccaaggttgtctccttctggtagtccagtccaacccctgtgttatctccccacggaggcctggctgtcagattctcttctacatccacactgtaacccagatcctcaagcagcttcttcatctccatgatggcaaagtcagccccatttcttggaggcagatggtcaaactctttattgcatatgatgagaaccaggcgtatgcggtcctttctctcctttattggatagatcttttcagctctttctttacatagtctcaggagttattcatgagggcaaagcttgagggcatctgtagattctcttgcctcaggtggtccaaccttttttgagtttaggattagaagaggctcatgattacaacccaactggttgttcttccagtccttcaaaatcttcacagcactgagtgactgatttgaccctaaactctttttccttgcacaatgcaggtgatgcaggtgcat

SEQ ID NO: 479217 - DNA, 1000 bp, Homo Sapiens; identical to SEQ ID NO: 161501

SEQ ID NO: 479218 - DNA, 1000 bp, Homo Sapiens
aaccaacagtacacttttaattaaggacctgtagctgtgcaggatgcaaacagctgggcatcagtgactttcctcctgcccccggtttgtccctgatggtggcagaagatcccagctgaccacggcccctttctctggggtcagagggagaagacaggcgcagtcagcaggggcagctgttgcaggtgggagggatattttcccacaggaacaaaggtctccatgatgatacggggtctctatagtcatgttgagagcctaatggcccttggcataattgctggtgtcggggtagaaggtgtcttggagtttgctcaagtggttgagagggagggaggtgccatagacttggaggaactggcacgaagccaaggatacaaatccaggcagggctatggggcaggatagagagcagggccttctactgaaggagtgactcaggaaggaggaggggaaggtgacaagcccctgggcaggagccctgtggccatgggatcattttaaattaagaccagagagtgagcagtccagggcagctataaccttggctagaaagggcagaggcagatgggcctgctccatctcgcctcttaagaaggtgggcaggacggagatgccacagtggatgccacagctgccacagcctcctgtggagaccaagcgggaggcctggctctcagccatgcaggatggaaagaaagattctattccaggaggggagctgccctggaacgccccaaggacagccaggacccactgttcattcaggattcccgcattttctcctacgggagctaacgcctgtgcctgggtcctggcagcgctctggactccacactctcctcctgggtttcacctttgtaacaggatccctgcagaccacgcccacgacaaacactgtctccagagggcaggacaaaggaagggcacggcgccgggcggtggtgtggttgcccatcaggaagaggccgacttctcccggtgaaacttctgcacagca

SEQ ID NO: 479219 - DNA, 1000 bp, Homo Sapiens; identical to SEQ ID NO: 346811

SEQ ID NO: 479220 - DNA, 1000 bp, Homo Sapiens
aactatgttgaagattatccttcctctctcatactaagaatcataaacctgtcttcactgaattgcacttccttattttaaagggtgattgttctgtcatttccagattgaagacaatcctctatcaacaatttcaaccccttctcctttcatcttgcaaatcaatttttcttgtagcctttttacttcagattccttttcttctagttgttcttttaaagatgtcagttcatctttggttgattcatgctttttttcatactgaagtctctcactgcccatttcactaacttttaacctcaaatcattgatctcctgaatcagcccctctgtgtctctgaacttatcttcataatccaatctgtccttctctacagctgtcagtttcaacttcaagttagatatttcagccatcagatccaacttctgagtttctaaggatgccctacttagaagctcctgctgcagcatttcttctgtggcattcaccttctctctgtgctcttcaagacaaaactccaaatctctaatcttctctccctcatcctccacctggtctgttaacatgcttagctgaagaaggagggattctttatcattttctaaaagtgacagcctttcttgatacacatctccgttcccaggtaggtgtccatttgtctggtttgccaaggcctgagaaaatatttcctggaggcacagatgaaaagcaaagctggtcagaaagcagcagggatcggagggtggtaggacggggactgcttcatgggactgggagtcggggacgcagggagaacagccagcacccctgcagagagcatgtcccgtggctgaactcatttgactttgaaaccattcaattagcatttctactgttgaatctgggaactggcagctcaagtcttctttctcatctgtttccatcatctctaataatccacgcaggtcttccacaaggtgcagggctcacaaacttcccatggatggagaggtgggagat

SEQ ID NO: 479221 - DNA, 691 bp, Homo Sapiens
tttcatttattttatttattatttcaagaaggagtttagctcttgccctccaggctggagtgcagtggcacgatctcggctcactgcaaccttcacctcctgggttcaagtgattctcctgcatcagcctccggagtagctgggattacaggcgcatgccaccacgcccagctacatttcctttattttactttttataatttactagcctgtttgttgataacaagactggcggtgcacaaggttgggtctcggggctcaccgggtatggaccaggtgggagggtctccagcacctggtacaaatctgggcaccaccctcccggtacgtcccttgaaaccatccagggctctttcccttgctccagtaaggaaatcacatcaggctttgtgatagagagacctagtgagaccaggctgctatagttctccatcattacatttctgtataagtccttctgagcagtgtccaggcactcccattcctcctgagagaagtctataaacagatcctggaacatgcccaacccctccacgttcatgaatattcctgttgtagccggcaaacttccttcatagaatgggacattcccagtattccatggttacagcctcagctttctctagttccgttcggggccagcctggccaagttactacggactccaaggcgcggcagcagctaattgcgc

SEQ ID NO: 479222 - DNA, 1000 bp, Homo Sapiens
agttattctcacattgtttagtttattctcactttttaaatgattatttttcctcacttataaaataaataccaggcctgttaaaactgggaaggtgatgtcagcattaactgtacatgaaggtcgtatatagttggcatatgtctaaacaagagcaggtcgtgatatgcttgtattggtaagggattgtactgccatcaggacagtcaagtacaatgtctctgagttcatagttttcttctcggcagcaaaggcatgaatgttccaagagtaagatatcataattgtacttggcagtcttttcacattcccctgtgcattttgccatctgaactcttttcttgcaaccactgtagataacagtcacatttacaagggaagatctgcaattattcttacatgtatagcaacatttttttgaatcatagattctgtttgcttctgcacaccaggtttgctttgggcagtcctggactactgcagcaaagcccgtgtctttgcaggagtaggagacacaggggttgctggggtcatcgaatgaagcaccaatctcatagtcagtattgttaaataaacatgttcttggttcacagtatccgatttcacagcaggtgtcattagattggaacttcacaagcttctcgccggttttgcatgtgggtggagaagggcactcctcaggtttacagtctatagtctttgcatcagtacaggtacctctgtggcaattggcagtccatatgtctccaggagatttctcttctcccaatggaccgtgacaaactggagctggtggaagtgaggctagacattctgttttattttcggtttctacttctctggttgccacgacagtggtttctggctgggatacttgtggtcttgttggcactccagctgtaaccaaggtggagcctgtttgcactccagtttcagaagtttctttgactcctgtggaagcagtgactgtggtaggaggtccaggagcagtggttttgtc

SEQ ID NO: 479223 - DNA, 1000 bp, Homo Sapiens; identical to SEQ ID NO: 346815

SEQ ID NO: 479224 - DNA, 1000 bp, Homo Sapiens; identical to SEQ ID NO: 161502

SEQ ID NO: 479225 - DNA, 782 bp, Homo Sapiens
gcatcactcctgggtgtcttctgaggttgcataggattcagtagaggccagtggctgtgctgtcatatcctaagaggcagccacgcagtcttgggtctcttggctgcttcagcaccagaggttggacagcgcccatgcactgaggccctcagtggatgcggcagctgttcttctgttggggaccagtgagtacacgctggggagggctcgcctgtgcttcctcagtggctccacctctgcttctaaaaaaaatgactcattccagcgcagtggattctagagaagaaaatagatgggagcaagtgtccaacacagcaacagttctctttgtttctctaattatttgttctacacagtccagctccacctgtaaatggatttcttctaatttttctactgccggcattgccctttcatctagctccgatttatattcttgtagtttactaagttctaccatattgttttccatatgtgtcttaagatttaatatttcttcttccaacatctttttatcctcctcaagtttttcacattcctgttgtacttttttcatcgataataactcctgttgaagaacttgattgtctttagccaaattgacacattttgaagatacagcttccttctctactgtaagatcatcaaacttatgttttagcttcttaatcagaatattcattttcagttgatctgtttttaagtctccatggcaatcgaagtcttcatttccaaatacacttaacatatttattgtcatttccaggaatttcttatatctg

SEQ ID NO: 479226 - DNA, 1000 bp, Homo Sapiens; identical to SEQ ID NO: 346817

SEQ ID NO: 479227 - DNA, 1000 bp, Homo Sapiens; identical to SEQ ID NO: 161503

SEQ ID NO: 479228 - DNA, 1000 bp, Homo Sapiens; identical to SEQ ID NO: 346819

SEQ ID NO: 479229 - DNA, 1000 bp, Homo Sapiens; identical to SEQ ID NO: 246655

SEQ ID NO: 479230 - DNA, 1000 bp, Homo Sapiens; identical to SEQ ID NO: 346823

SEQ ID NO: 479231 - DNA, 1000 bp, Homo Sapiens
aacaaaatttagaccagaataggttttcatatatcaaaaaaaggaaaggaacacggagagcacagatgagatgtatggaggctctatactatagacccatccttgctctgtgcgggaatcatcacaggaatcgcgcccattcgacttagattaggggcagctaccttagcaggtgggagagtcggactctgaggagtgcgttcaaagtcttcacttggtacttgtttatactgagtcttggaatatccttccatgttggaaggagatatggatcccagggatgaatgattactgcctatgtagcttctggcagtggacgtgtggctctttggaggcggcacatcttccctgctaaccatgaagtgggcattttctgtgagtcagacaatttttgccactcatactgtaatggaagtgaaccttcttttggttcacattttaatttaaagtcacttccaatttcttctgatccatcaacgtaacatcttgtacctgaaggcttaccaagaactaccagctgaatcttcctatttgcaacaccaggagctcttttcactttgcactgatctgtgccaatatctgacagctgaaaattcgttacatttattgatgcatcaccagatttgagatcattactcttaaaatgtactcggcctttcagatctggatagtagtcatcataatttttgtctccagaatataaaataatcacttgatccaccttctgattatcagctggtgatatcagccactcgatgtccagtggtccctggtcttcaggactaagcgtaaatttgcatggcagataggcagtttcccctttggctttttcaatcatctgctcaggagtagtgatactccaacctctgatgaaatccgcgactctgcacaggagcacgaagcgcagcaggagcgccacggtggctgccgtgccgtgggcggcggctgcaggtaggcggctctcgctccaggtcctaggctccccgcgcctggcgcactc

SEQ ID NO: 479232 - DNA, 1000 bp, Homo Sapiens
ttgacgaaaagcagatttttattgaacagaggtataaatgtgtttcattttctaataaatctctttcacaaatcaccttgctgtttcgctcttcttgaatgatcatttttacacaacactgtctgactgttttggcttctgccaaggttagcgtctgttcacaggctgagtctgacttcttcctcccacctcctcctagtctggccttccaaaataatgctcaccattctatcacattgacttcagttttgaaaagaaaagttatcttacaaagtagtatgtataactctgtaatatataaagtgaggcaatgatacaatcagttttaaaaataaccttccatgatgattttcatttgcatccacctgcttattagtaagaatctttttacatgtttactgcacgccccaatttctcttcagtgaaaaacttttgagtatcatcacaccctccaacttctcctctcacctatattgaaaagggtctgctctttatcctaacatctatactaggtaattttcagaatattccttcaatcatcaaacaaatttttgagatccttgcgctagatttcactatcttaatatgaaaaccaataatcacctattaaaatacaatacaggccaggcacagtggctaacacctgtaatcccaacattttgagaggccaaggcaggtgggtcacctgacgtcaggaatttgagaccagcctgaccaatatggtaaaaccccatctctactaaaaatacaaaaatcagccaggtgtggttgcagacgcctgtagtcccagctactcgggaggctgaggcaggagaatagcttgaacccaggaggcgggggttgcagtgagccaagatcgtgacactgcactccagcctggacgatagagcaagactccatctcaaaaaaaaaaaaaaaaaaaaaacaccattaataagtaaataaataggccaggcgtggtggctaatgcctgtaatcccaacattttgataggccaaag

SEQ ID NO: 479233 - DNA, 631 bp, Homo Sapiens; identical to SEQ ID NO: 161504

SEQ ID NO: 479234 - DNA, 1000 bp, Homo Sapiens
gtaattttagtagagatgaggttttaccacattggccaggctgatctcaaactcccgacctcaagtgattctcctgcctcagcctcccaaagtgctgggattataggcatgagccactgcacctggcataaggagcctgttatagcactgtctcttcccctgtgattgggggctccatgcctctagctaggatgatgatgtccagacctgagaggagcccagggctacccacctttaaaagtcagaggcaggaagcaagaaacaggactgccctggggggtgctgtggtcaccagcccccaggctggaagctgcctctggcctggtacctcccctccccagaggctgctgcccgcctcccagcccttcttggatggggtggaggtttccgactccttcacctcgccaagcttctcctgtagctcctttacttgctgctccaactgcagtgtgctcttgttctcattgttcggctcctcgaagacgctctgtggcttggccagctgctgaaggctcttgtgctgctcctgaatcctctcctcctgcttccgaagcctctcttcctgctcccgaatcctctcttcttgtcgctggttcaggagacttatgcgctgattgtttttgacctgggcctggagctctcctgccactctctctagttccttcctcaggtgctgcagctccacctcagagggcactgctgggggctccgggggcaagggttcagccatctggtttttgagtttggacaagctcctctccagcttctctacccgacgcatatcttgctgcttctctttctttaatgtgcaaatctcctgcgacatttttctcatcctctgctgccaccgggccctctctccttttagatgttcagaatactcatctctttctaattggacttgttgaaatgactccttcaactgtgtcagctgcactttcagtagtgcctcctcccgcatggactgctctaacttccactccgtacctgctttactggg

SEQ ID NO: 479235 - DNA, 1000 bp, Homo Sapiens; identical to SEQ ID NO: 346826

SEQ ID NO: 479236 - DNA, 1000 bp, Homo Sapiens
ttcagcttattatacttttattttgatgagcaccaaaatatctttttcttcaaatcaatacatgaggcttttttacttaacaagttatttcctaatttgagacatccgttctcacatatgatcatcttttgcaagttaagtcacctacacttatttatcagctttgagaaatctcctccaaccacagtatttccacgatgaaatgcacattttcatgaaacacacatcttttataaatgtgctgtgatctgcagccataaaatggccatccacagttattgctttgctactgagcccgtctgcaccagcacctcccctgaccatctgttgcccaaacccatgcatcctgcgaaggcatttgttcacattgcttcctgtcagcctccagccttctctccttctgtctagtcacaaccttgtcatgagttctagtgccaggacaactgtagaactatgatctgattccagggcccaaaacgtcatggtaagcttgagacccctgattgccactcttatggaagccccattggccacgctggcatcttgtatttgtggaccacagggtatagagattaaaccatctcattagcaccctcttgtgaatagaaaagagaaccccagagactggagggagaatccagcccagactgagggatgggcaatcctcaaccagcctccccgcagctgggattcgaaatgtagactgaagtatttctagcttccccatcatcaatttcaattttgccaagcttcgaggcaaaaatggacacttttgtctgtccagacacagacacttctccataagcatctttggcaaaaggaacttcaggatcaattttcttcacatatgcatggaattggtttgaaaagagccacacctgtttacccgcaatgcagctaaaaaagagccacatgcaaagaaagagtgggatatagtgaaaataccatgggatctggtatcagtgaccctggagcctaccacggcagagtctgagctggg

SEQ ID NO: 479237 - DNA, 1000 bp, Homo Sapiens; identical to SEQ ID NO: 346827

SEQ ID NO: 479238 - DNA, 1000 bp, Homo Sapiens; identical to SEQ ID NO: 346828

SEQ ID NO: 479239 - DNA, 1000 bp, Homo Sapiens; identical to SEQ ID NO: 346829

SEQ ID NO: 479240 - DNA, 1000 bp, Homo Sapiens; identical to SEQ ID NO: 346830

SEQ ID NO: 479241 - DNA, 1000 bp, Homo Sapiens; identical to SEQ ID NO: 346831

SEQ ID NO: 479242 - DNA, 1000 bp, Homo Sapiens; identical to SEQ ID NO: 346833

SEQ ID NO: 479243 - DNA, 1000 bp, Homo Sapiens
caagtttagaattcctggtttattgggaaaacttcataatgaaaacttcaattgcccttttccatgacttacaaaataataatgtgatatttaaaatgaattgtttttcattatgtaagtggaaatggtaaaaaatagtaataacccatttgatgcatcatatatatgctattcagggaaactcaaatccctgaattctcctgtggcatgttttacatcagacattttaaatctgtttaccaagaaagaccaggattttaactatatgtaggtttctacttacagttgcaatctatcagaagcctgtctatatgattagagcccagatacatctgaagtttagaaaagcaagccatttttctccttaggctgttttagtggcacttttgtgacaggaagggctctcctaatcctttagtacacaacttaaccagatctatcagtcatgataaattagactgatatatctaatctatcagtccatctttcaatccagttactctggttctgaacctataaacacaaaacactacagatttattaatatagcattttccaacaccctaaccctatacagaactttaaaagagaaaatttcatctaaatatttcacacctaagaaagccttactaaccacggcaacaggtttggaccacaaaacaatactttcttagatgatatatagagtcaacatgaagcttagcaagaatgaattattcagggctgggcgcggtggctcacgcctgtaatcccggcactttgggaggctgaggtgggcagatcacgaggtcaggagatcgagaccatcatggctaacacggtaaaaccctgtctctactaaaaatacaaaaaattagccgggcgtggtggtggacgcctgtagtcccagctactcgggaggctgaggcgggaggatagcgtgaacccgagaggcagagcttgcagtgagccgagatcacgccatcacactccagcctgggagacagagtgagactccgtc

SEQ ID NO: 479244 - DNA, 678 bp, Homo Sapiens
gctcagccattcatatcctaagcaacaaaacatcagcaggatgcggaaggtcccgatagtaaaccatctccatcacatccatgtagccatccgtccatcaacctgagtgtcatcacctcccaagggcatctttcgttccagagctggcaccttggaaggcccttggtcactgaaggcagtgatgatggtaacagcagtaaatcatcatttacggctgatgagggaaggccagaaggtagggctcctaggtcctggataagaatgagggtctgggcactcctggggatagctgagtggtaggactcctgggtccccagggtgcaggtccatcttcagtggcattgggcctaggctgggatgctgagttatccactggagcatcagcagtacagtcaggcacagaggcagtggatccatcggaggtggcaggtgtaggatcatcttcctcaggtactcgcatgggcatgtcactgactttacatgctgctgcagctccttggtgagctggccctggtcatgggacaggaactgtggggtcaggacaatagagagcttcaccatttgcagaatgagaacaggggctcatgatgagtgccaacctcagttttcttctgtgtgaaacaggaacaatagtttcattcgtcattcagtttctctcaaggtttcatgagatcatac

SEQ ID NO: 479245 - DNA, 918 bp, Homo Sapiens
ttacgagagggtgtaacctggtgaggcctggatgacctccggaggcaggggcttgtgcctgggctgaggcctcttgggcttgggcgattgttccacctcatccaccctccacctcttgggtttgggtggtttttccgcctcggcctcctgagtagctaagggaggagtcttgagattatcatccactgagggtggaagaggagagggtggaagcgggacaaagagacattccttcagattatcatccaactccttgatattatcatccgctgagggtggaaggggagtgagcagacactcgggaggtgtcttgaggctcagggagttatcagttatagaatgttgttgagttggaggaggtggctggcggcccatcctgttttttaaagtttcagctgtgaggtagggccagtagggcaatcctgaagaatgacgatgctccgctgccgccattctgacccagttgcaaagagcctttcttgcagaaggggggattttgcatttgtggtagtcctctgcccgccgccgcaactcttgcgcacgttgaaacattttctgttttctggcggtcttcctctttccattgattttgtcatgacggttgattttcgttgtcaccttcctcttacggattttagctctaacttttgtttccacatgcctccgtagagtaatgacgtctttcaggccaattttatttcctcgaaaggaagaaactcttttctttgtgtgcatacaaatggacctcagccctttctgtctactgcggttggacctccaggctctctgctgtacatccgtggatccatcatgtccatttcgagaccagaagatagtcttcaggagagacacaggggtgggctgatggctgataaatcccagcaggagccaaatgaggagccaaaagcgcagccgcat

SEQ ID NO: 479246 - DNA, 1000 bp, Homo Sapiens; identical to SEQ ID NO: 346836

SEQ ID NO: 479247 - DNA, 864 bp, Homo Sapiens
aacaagaatgtgagtgtagccatgaagaacatgggcatgtctgtgcttccctcatcattctgcctgcttccacttcccctcacacttccgcttccacttttgtcttttctgttgcttcttctgcaggtgcagaggaaggacttgctgacatctgctggtggccgcctgtaatggtggagtcttccaattctgtgaagcaagcatcagagtgtccctttgtataactcctgaggatttcttcacatcctctgggtcctcctcctctccgttgtaactggacagctcctgtagtagatccttcatcagaactcccaaccctaatgcacagcaccttcctctatacaaatggcacagttccttccaggcactagagtcaacggtcacatttcttgaccgggttaaaaacagatgggagacagtggttgaggcgatggtcccaaaataaagccatgtgaacggctgggacatcctcagaagaagtttcctgtgccacgtgctcatcgtgatactggtagccaaagcccttttataaggctttgccatgctgtcagtgctatatgattgttcaattaataaatctggaaagatgtgcagaaacttaacagttgttacttccagaggcagaagctggcaggctgggatggcctctatgaaggtggatggccccaataagcatgagtgtgaattaactggctggcctcgttgaggacggctatggacatctgggctggctctcatgtggatgagaagagaacaacttggctggcttagatgaggaccactgtgaacacctttgcaggcctggatgaagacagctttgaagctctgagctgggcacaatgaagacacatatgaacaggtcat

SEQ ID NO: 479248 - DNA, 1000 bp, Homo Sapiens; identical to SEQ ID NO: 346838

SEQ ID NO: 479249 - DNA, 1000 bp, Homo Sapiens
tttgtgatttacaaaacaaacatgataaaagaagtaaagatgtcagtgagaccgtgcacgtaagggtgcatgtaaaaacttcctcttgaatttctccctgttgccacccacaccaaccccaggcctggagtctgctggcccaagctgatgctgcaatctgtgaaggtgaatccagagtctttgcaggaggggctcagtgaaccgctgggctgtacaatttttccccctcagactccaccagtgaacttcacataggacttaattaacaacaaatgcagcagtgactccaggatgtcaatccataggtttatgagtgaaaatgaggtgggttacataaattgttttgagagtattttccttgcttgtagagtcaataccaaggttggcatcaatatagggttaaacagtgattttctgggaagatgtccttgtagaagtgatttttataaggtcatggtggcttctatcaaaggttgtggttaagcagaatccattcatggtcgttcttgttatcaggagtatgtgcatgggaaacctccttcatggtcattcctagttccatttgtcagggttttaacacaagtggatctattttgattctgacaactttcacagcctctttctaacactactggtgaggaaggtgactcactctgtggtactttgcacagcacaggataaatttcacatccacatcccattttgaccacacaagctcatcctcttcactactgttggccacttgcattcccaggtgagtctccacatgacacactggagggtgctgagcaatgggagagaggaaagtcctatcagcctctcccatatggctgcaggagccacagcctgagccccacctcagctgcagggaatgggcttgagacctcgagctttggcagcaagaaccacatccccactttacaggaagcacaaacagtgcctctggggatgactctgatcagtgggttctgtgcgccccccgcagctgatttcccccaag

SEQ ID NO: 479250 - DNA, 1000 bp, Homo Sapiens
tacacaccatgacaacttttattgccctcaagagaaactccagtccacctgctccacccaccctcctgcgggaccaaagaaaacacccagagggcaaaacaaaaaagggctcaaaccaacaggaagtcagccccaccgcaagccaaactacaactaactcgtgtcctccacgctcaggcgtggaagccagggctgtgccaggcctggccaggccaagcaggataacagcaaatgcattctgaacgtgtagcaatcaggtaccctgtaatgtgcttggagagtgtggacaagggccaagatgacgagctatgagctgtggaagggaatgggggaagtgaagggcacaaacagaagtactggagggagaggctgggctctcaggaagcagcaggcacgtgccaggtggaagccagctgcaggccagggaggaaggaggcccttactctttcttcttgtccatgggaccaactactgtagcctgcagctttgcgtgctcctactgcaagcggtcgtactccttggtgaggccctcagactgcttccgcatggccagaacctggttttcagctttctctagtttttgcttagtgctggccagctcatcctttagcttctgcagctcagccttcaggctcctgttctcttcctccaacttcacctcagcattcccgacatccaacttgcctccgtcaacagcagtcaccttcttgagctggtcattctccgtgtacttcttggccgcctcactagcactctccatctgctttttaaaggcttcattggaggccaacagtgtggcctgctgcaagatgagagtcaccaggcatctgccctcttgccaaggcagctgagcgagaagccgccaacctggtgctggcagcgtgagggaaaaggtggagcccaggagctgtcctctgccactgtgcccaacggccaccctcagctctgggaggggctggaagcaggagcctgggggctgggaagagcctcgatacagcat

SEQ ID NO: 479251 - DNA, 1000 bp, Homo Sapiens; identical to SEQ ID NO: 346842

SEQ ID NO: 479252 - DNA, 840 bp, Homo Sapiens
ttttattcctccctttattgccaaaattaaggcagtaaaaacaggcaccaaaggaatgagttaagatagatttagaagaggacaagtggaagccaggcagggcagaattctaagataagggtcaagatcctcaccctcctcctcagcggtggccctgggatgtgatgcgatgtcactcccatggttatggcacattacatggcaaagacgatttccgcagatgcggagatacaggctcttctgatggtcttcaaggggaaaaagccatgttgtggagacagccaccaaaatggacctgcctcctggattccgtggcgaacaggctgtgagagtgtcccttctggttctgctcacaggcttaaagaatgacttttgtagttcttgacagatgaaagggcttttctcagagactgtagcaggaagacagagcaggtgtgggggttccttagaaggggagggctgggggggcaagttgcatgacacaccctgcccctggcagtgtctttgactgcaaggcgtggataaagccggagatttttcgatggagcagaggccagctgggtggttgcactgactcgtgataaccctggtggcagtgctggaggccggtgaggtggtgaagggcatggcgcttcggacatgggcccttcctacgtgcaggacctcctggggtgcagaggctaatttcatcttgtatggatgatgttcctcttcctccgtcaccagataccagattttatcttcagatctggctcccataagagtcatgtcatctgcgctgtttttgattttgttctgagcttcccactgtgccctatggctggtgtttccccagtccat

SEQ ID NO: 479253 - DNA, 1000 bp, Homo Sapiens
ctacaagtcccagcatgcccggccgccctgacccagcccccgccgccgcttaaaggctccgggagccgcagccgtcgggtcgccgcggctttcgctttgctgccgcggcgaggcatggatagagcagcgctgcgcgcggcggcgatgggagagaagaaggagggcggtggcgggggggatgcggcggccgcggagggaggcgcaggggccgcggccagccgggcgctgcagcagtgcgggcagctccagaagctcatcgacatctccatcggcagcctgcgcgggctgcgcaccaagtgcgctgtgtccaacgacctcacccagcaggagatacggaccctggaggtaagtgggtcggggaccaggctgggctcgaggagcgggcccggacacctccctccgggccccagtactcctggccgagttgcatccttgagcccgcgtcgccccccttggaggcttcccctccctcctgcactcgctgatgcggcagccggaggacccgggaccagccctcatcttgggcaggatttgtggggcgggtgcgtcgtgggaactgggatggaggctcgaggggcccgtgcggggtgggctgcgcgcggacatcccctttccccccttctccgcccccaccccatttccagtttgcggggccgcaggacttcggcgtctgccgttctgcgttatggcatcaccaccttcagggattggggccctctgcgagtagcgggggcaaagggtgctgctgggtccggaccctgactctgccaggccttgcaccagcccctttacatgggttgactccaaatccttggctgagtagcacgtgcccttgggagggctgctcctttgcaggaagtgcactgaaggctcatgaattatgctcatctccttcagcggcttggagaataatgatttagtgccaggagccggcttatcctggcccagagccagagcttgagagggattgggacgggagccctgggacagctctgatagc

SEQ ID NO: 479254 - DNA, 1000 bp, Homo Sapiens; identical to SEQ ID NO: 346844

SEQ ID NO: 479255 - DNA, 702 bp, Homo Sapiens
ctagacacactgggtatcagggtggctggattttctctttactgttccatagaatgtggcctttcccgtttgtattggagaggggttctcatctttagtaggttctggagattcagctgaagtctcctgttgaactggtaaaggtccagtctcttccgatgactctgtaggcagaggcggggccccatgctggatgtcagaatgttccacatcattaactggccctgagagctgagctgtagcctcctgatggactggcgaagttcccacctctgcagtaggctgtgttgctatggtgagctgctctggatgctggtttggggccgcctgctgggctggagaagagtcagtgtccgtggtaggctctgaagttatgctaatctctacatctgcaggtttaactgtaatgctcggcaaggtataatgagcttgatcctcaccctcttgatatactggaggttggggtacaaattccttaggaggctgagttggggtctcctgcatggttggagaaagttcaatttctgtagtggattctggagtgatgataaaccccaggtccaaaggttgaagtgtgacactggccagtgttgaaagctgagcttgatcctgaccttgtgttggaattgtcacctcataacgaggtggaagttgagctacaacctccgtaggtggttctggaagttgatttgagttctccat

SEQ ID NO: 479256 - DNA, 1000 bp, Homo Sapiens; identical to SEQ ID NO: 161506

SEQ ID NO: 479257 - DNA, 1000 bp, Homo Sapiens; identical to SEQ ID NO: 346846

SEQ ID NO: 479258 - DNA, 1000 bp, Homo Sapiens; identical to SEQ ID NO: 346848

SEQ ID NO: 479259 - DNA, 1000 bp, Homo Sapiens; identical to SEQ ID NO: 346849

SEQ ID NO: 479260 - DNA, 1000 bp, Homo Sapiens
  misc_feature (527)..(528): n is a, c, g, or t
  misc_feature (530)..(530): n is a, c, g, or t
  misc_feature (532)..(532): n is a, c, g, or t
  misc_feature (538)..(538): n is a, c, g, or t
  misc_feature (540)..(541): n is a, c, g, or t
  misc_feature (929)..(929): n is a, c, g, or t
  misc_feature (935)..(935): n is a, c, g, or t
agacagagtctcgctctgttgcccaggctggaatgcagtggcccaattgcaactcactgtaagctccgcctcccgggttcatgccattctcctgcctcagcctcctgagtagctgggattacaggtggacgctaccacgtccggctaatttttgtatttttagtacagacggggcttcatcatcttggccaggctgatttcgatctcctgacatcgtgatctgcctgcctccccctcccaaagtgctgggattacaggcgtgagccaccacgcctggccaaggcctgctcctcttatctataccccctacccctgcagctgtgccgggggaaagctgggcagtttccctcctccgagcccctgtacataccatgaattgtgggaccttcagagcttttcacttttcagaaaatagctcctgctggggctacaagatggagtgtgaagagggccttgggccacagggaggcgcctgtggactagggggagttcatgcaccccttctttccccagaggggctggactcnngntngagtantnngggggtgggggctcctacacttcgacacaggcagcgggagggttttctccccattccctctgcactcccaacttgagctatactttttaagaaagtgattcaccctgcctttgcccccttccccagaacagaacacgttgatcgtgggcgatatttttcattgtgccaaaaagttgccatgaccgtcattaaacctgtttaacaccaaataataaggaaaataaaataaaaaattcgggcttggcgcagaaactcactccaaataaattacctaccaaaatatttacataatggtggaaatattccaaaattcaatattttgggatttatacacaaaagataaacaaattagaggccaagaggctgccggaagggaaaaacggggccntggaantggccgacgtgaggaatgagctgggcctaaagaggccactggcaggcaggagctggacctgccga

SEQ ID NO: 479261 - DNA, 1000 bp, Homo Sapiens
tttgtgtgagcaacaaggttgtttatttcacttgggtgcaagtggactgagtccacaaagagagtcagcaaagggagatggggtggagcagctttataggatttgggtaggtggtggaaaattacagttaaaggtagttatctcttgcagacagggcaggggtcacaaggtgcaggatggggagatcatgagactcattgtccaggggaggaatgtcacaaggccagttgattagttggggtggggcaggaacaaatcaccatggtggaatgtcatcagtgaaggcaggaactggctgtttcatttttttggtggttcttcagttgctccaggccacctggacgaatacctcaataagacaaaaaattagaatcaaaatcgttagtattacagtcacagatatcaccaagattagtttgttgttatagccatatcctggaacttctttcgtgagctcactcgacttctgctctttctgttcactctgggcttctgtgctttcattaatatagttcttagttttccactggtctgtatcccattctgccttggacgcctttacttcctgctgctcactgagaagcctcatcaggaggcctgtcctggagatgagcttggcacaggtcacttgcacataggtctcggagcagtccgtcttcaaggtccagataacatgagaaatgaagcttctcacatcgttgttggggatgacggactgtagttgatgggttagcggaatttcaaactgatcactcccaaagactgacaagttgatgccactgctgtctgaggctgcctccggctcagtagtcagctcaatgctcatgtgcttcttctgggcttgtaacaccttcatgaacactctttctggattccctacagatgcttcttcacgacaatgtgtggtgtttgtcagacatgcactgttgcaatgcagcttgactgtcttgcagacagcctcaatgctatttttaaattggcagaggcagcaggccatatg

SEQ ID NO: 479262 - DNA, 982 bp, Homo Sapiens; identical to SEQ ID NO: 346850

SEQ ID NO: 479263 - DNA, 1000 bp, Homo Sapiens; identical to SEQ ID NO: 346851

SEQ ID NO: 479264 - DNA, 1000 bp, Homo Sapiens
ttagtgttgcgctagctctcttccgaggcggaatctacgcattcccacagacgtgtctcctttgccagattcgctcagttcgaatggtgggaagaatggaacaggcacacggccccagggaggagtgcgatggagccagtgaacaatgagggtctcatcatcatacccctccgccaagcctgcttcccacagcacctgaacgtcacctccttcctctctcttatttactattttaaatacccattgtttgggggcgtctgcggaggtggtatgaacttcagaaccccgaggcccatcggactcaaacaccactgagtgtgcccgcatgtgggccctgaggtggccgggctggtggaagctctttccgcactcgatgcagacgaactctcctggccgggcctgcgtccggagtgtccctctgtgctccaacccagggccgctgacaccccatccctggtagagggtcgcaaagtcctttggaatgtacgtcttaaagatgttgaggatgtccaggcgcttctcatgcccctcggccaccggctcctgtttgatggagtgtaggacgggggggcgcccagccacgccgggctgggcctgcaaggccgcgtcgcccctggaccccgcagcacaggtggccagagtcctcagctcctgggctgccttcgaggggggctcgcggggaggtagaggaggagcgcccccttcgccctttgcaggaggtggaccctgaggctgagcactgaatttggctttcagggagtccggggcactgtgcttatttgtgggggcaaagccagcccccgctggggggaccccaaacttctccacaggcttgctattggccgagggctgcgcgccagcccgggcgatgacggtgggcgtaggggtggcgctcctgctgaagcccccgccacccggggcaggcaccggtttggagctagcctcctgcctgggcttggccaggggcccctgtgtggccgcgccatgtggctcctggccg

SEQ ID NO: 479265 - DNA, 1000 bp, Homo Sapiens; identical to SEQ ID NO: 346852

SEQ ID NO: 479266 - DNA, 1000 bp, Homo Sapiens
tcagaccacgtgcctctgctgacagatccggccagccttctcatcacgtggtgggtctatccacagccccatgcccagaatcatgacacaggcctcgcacccccaaaattcattgcgttccccctgtaaccagtgggagtagccctgaaccttgcgcaggtgttgcacggccctgcggccgatccagtattcacgggcactagtgtcacgactcaggaagtccagatgtgcgctggcatcggcgcagtggccctgcgcctctgcccacgtggtcttcggcacagagaaatagtagcaggagcccccgaagggcagccacgacgtagggcacggctcacaggaaccctcactgttctgcagcctcacggcctccagcgcccggtacagctcggtgctgacgtcctcgcggtccctgccggcttcagccaagccatgggtcacgcgctcacgcagttcccgcagggctctctcctgctccatcagcttcgcctgcgcctccccaagctccgcgctcgtggtctgcagcagcgcctgcgtccccgagcagcagctgtggcaggctcccacctcctcctccagggcacccagcgccgccgtctgcttcgaggcgtttgtcctcagcaggtcctggcagccgagcagcgccgcgcgctccgtggaggctgcggagagaggctcctgcaggcaaggccagggactcggaaatccttcccttgcccggggggtgcggggtcccccgactcgggaccacagagcgggcgggcaggcaggcatatagcgcacaccttggacaataggatactcagaatcacagcccacagtactggcgaccaggacagccatggccaggaagaggggtctcgggctccagtgcacccagcgtccccagtgccctccggggacctcctcgtagctcccgccccagttgctgtacctggtggtgtctatggcggtgcaggcaccgagaccgtagggcaggaactttttggagggcacgccc

SEQ ID NO: 479267 - DNA, 1000 bp, Homo Sapiens
tcaagggcaggtcaggagggaaatgggtggagggggggactggggaggatctgcaccgggtgggaaggagcggccgctcttgctgaaaggtggctgggagaggtcctggtcacagtcggagtcagagtcccaggaggggagtggagggctcaggcactggtgccccttgtggcctcttaggctcgaggccttgggacaggcccccgagcacaaagtgaggctgtctatggagttctgcagcacgtgcacagcagaccatatatcactcagttccttctggaggtcatccttccagcagccactggctccctgcggtatctcttcagtctccggacaggcggctgtctcatgaccctgctgcttcatcttggtcaggattttgcggcatttcacctgcgttttctgcattttctgaatgttcaccaagttctctgagatctcatcctcctgcgcttggagcttctgatagatgaaggtcacctcctcccgcaccagttccagctcctcccacaggaacttcttgctgtcccggatctcctgggccagcagctgcaggcagcgagtggtgcgggcccgctgcatctcctcactgtcacgcagggtcttctccagcccctgaaggccttgggtcagggccccatacagctcctgccggccctgctccatgccccacttgtgctcctccttctctccctggcggcctgtggggctcagcacctcttcaagctgctgaatcttgatttgctgcaagcagctctccttctccaacatggtcactgagtggttcaggaactcgaaagccttggtctgggcctgtaactggctcttgagtgactcaagttcacatcgcaggagcttctgggagtcgggaatcatcacaatggtcttggctttgactttggaagagctggtctccaagggcttcttagctacgttgtgatgcctcttcaaaatgtcctggtcattacagcactgcttctgcaggtctggactgggggag

SEQ ID NO: 479268 - DNA, 848 bp, Homo Sapiens; identical to SEQ ID NO: 346853

SEQ ID NO: 479269 - DNA, 1000 bp, Homo Sapiens
tcactgcagatccgcgctcaggggctccacccgtagccaaagtccatcctccgcgcgcacgatcagctccagcttcctgcggggctccgcgtggtccggcaggacgcggaagcgcagcagcgtgagcgccaggaccaccttcatctcagccatggcgaacgtctggccgatgcagttcccgggggagggggtggggactctgactgtgcccaggacccccatcccggccccatcgcgccgggaacctcgtctgggcactgctgagaagggaataaaagccagaggtgatgtcttctggagattttctgggtcgaagcgaaaggggtcatagaccaggccccgggatggagaaggcggaaggggtagcacctccgggtccggccagactgaagggttgtgatggatcccaaagatgctgatggtgcaagtgttccctttggggatgacccggccatccgggagcaccccgtcctgggggcagcagcggtggatcctggagactggggaatgcagccgcaggctctccttcaggcacatggtcaggaagggcaactgggccaggtcatcccattcaatctctttaggatcaccgttcttcaggagctcttgcacctcctgtcggcagtgctcctggtattctgggtacctcgcgaggttgtacaggacccaggagagaccactggccgaggtgtcatggcccccagacatgaaggtgtcagcctccgctcttatgttctcatctgacaacttctttccattttcatccttggccagcaagagcacgtcaatgaagtccaaagtcttggacttggccttggcctgcaggaagtcatcgacaccctggctagtgagggtgcgacgccgctcctggatgacagcatctgtgaagttgtgcactatgtcacaggccctgcagaagcgtcgcccattgggagtgaggaagtacaagaagtccgtgagcaggaagatgtgctggtgccgtttcagactgagggcatcc

SEQ ID NO: 479270 - DNA, 1000 bp, Homo Sapiens; identical to SEQ ID NO: 346854

SEQ ID NO: 479271 - DNA, 1000 bp, Homo Sapiens; identical to SEQ ID NO: 346856

SEQ ID NO: 479272 - DNA, 1000 bp, Homo Sapiens
ttaacgatagctgagtttttcccattcatgagttttcatccataagcccatcaccttgtcagtgttggaaacttcagaaatgtgatgcaccttcagatggattaaagtcttcacgtttattaaggagtccatgacaatgctacatctgaagctctttccacattccttacaattataaggtctctctcccgtgtggaccctctggtgcaagtcaagattaaacttactaatgtagcccttcccacacttctgacatttatacagttcttcttctctataggctctctgatgtgaatggccctgtgaattcatataaaatctcttcccacatccgtcgcacttgaatgttgtttctccattgtggacccgctgatgtattcctgatctacggctgaaacttttcccacactgctcacatttgaatggtttctctccagtgtggattctctgatgagtttgcagttgtgagttctgactaaatgccttactacacacatcacacttatagcgtttctctcccatgtgaactttctgatgaagacaaagagctgagctataacagaatctcttcctgtactcattacatgtatgggatatctttcctgagtgtaattgttgatgaagatcaaggatggagacatcactgaagaattttttacacttcccatgctcagaaggtgtctctcctatgtgaattatagatagtcctgcgtcaacctgggaggggacatcaccttgtgtggagaactgagagctacttatggagtcttgaggtctagttaactcacttgcagtttgttcccagatttgctggcaagaccactcttcatgtggtcctgtttctggaacagactccaactcagtttggatcttgcctcctgaattcccttctctttgggttgctgtctccatgatccaaaacttttcttctctttggaagtgaaaagtatctcggtgggaaagttgatgccccactgatagcaggtttctgaagttctcc

SEQ ID NO: 479273 - DNA, 1000 bp, Homo Sapiens
ttaatcaaatttccctataccatgaattgcctgatggtgaataagtgttgaccggtcactaaaggctttgccacactcattacacttgtaaggtttctctccagtatgaattatcctatgtcttttaaggtgtgatttgcgactgaaaactttgtcacatgcttcacatttgtaaggtttctctccagtatgaattctatgatgacgtgaaaggtgtgattgttcattaaaagcctttccacattcattacacttgtaaggtttctctgcagtgtgaattctaatatgtcttgccaggtatgaattacgcacgaaagccttgtcacaaaccgtacatttgtaagatttctctccagtatgaagtctacgatggtatacaagggatgaccagtgacggaaggtattgccacagtcgttacacttgtaaggtttctcaccactatgaagtctacgatggcatagaagggttgccttctgactgaacgtcttgctgcactcactacacttgtaaggtttctcaccactatgaattctacgatggcatacaagggatgacctgttactgaaggtcttgctgcactcattacacttgtaaggtttcattccactgtgaattctagtatgttttgccacataggaacgacacacgaaagccttgtcacaaaccttacatttgtaagatttctctccaccatgaagtctacgatgccatacaagtgatgacttgtaactgaaggtcttcccacactcattacacttgtaagttttttctccagtgtgaattcttgtatgtcgtgccagctgtgaattccacgtgaaagctgtgtcacaaacctgacatctgtatggtttctctccagtatgaattctcttatgtgactcaagagctgatttctgaccaaaaactttgtcacatgcttcacatttgtaaggtttctctccagtatgaagtctacgatgacgtgaaagatgtgattgttgattaaaagctttcccacat

SEQ ID NO: 479274 - DNA, 582 bp, Homo Sapiens
tcacccatactgtaccctttcaaagagtcctaaaaacagctcttcacctactcttccaagacaagtaaaaatgtctatttccaaagctgggctaatgtccttttgcttgtgtctgaataaggcaccaattttaagataaaaatcttcaacatgagactggaaaaaagggtatgggatcatcaccggacctttggcttttacagctcgagctgacaaagttgatttatcaagttgtaaatcttcacctgttgaattcataagttcatgtaaggagaaacatgtaaggatggcatgactcgccggcagccctgggattgtccacggtacccccatgatgaacagtaactccactgtgtaaacgcccatgaacctaagattacaagacttttccagtttagacataccatattttctttcagacaattcttcagtttgtttacgtagatcagcgatacgatgattccatttctcagagttgaactccctcattttccgttccccagcattggcaggttctgggactggtggctgtggtggctcgttggtctttgtctcaaggtcaccaacatcgatgtagaacat

SEQ ID NO: 479275 - DNA, 1000 bp, Homo Sapiens
ctacccactgaaggagccagtctgcttccacctagtcagcagctccagggagcgcatctccctccaggaagggcaggaggccaagaggagtgcgttgttctcccctgctgcaacgttctcactccacaatcctggggcaggtaggggaggcccagctgagtttggatcataatcccaggtcagctcctttctgcccactctttcagcgcaggcgtgtcctgctgtggaacacactctgggattcctgtgtgggtctgtacccatcctgtacccgtcaggacccccgggccctgactcttgatgttgttcttgctcctcttgttgatcttgttgttcccacagtgaggtccagtccagagagtatgcaagcacgaccacgtcaacaggccctgaagtcacaggttcacacagcacgttttctgctccatcacgtgtatggggcagggggcagcagagctgggggagaagagataaaggaattatgtcaaacagggactgtcttgtctgccccaagggcctttcctcatctataaagcagatttttcttgtagagcaccacgagaggcgggttctctgtggccagcaggcggcgctgcaggagaggagatgcccaggccaggcggccggcgcacgcgggttctctgtggccagcaggcggcgctgcaggagaggagatgcccaggcctggcggccggcgcacgcgggttctctgtggccagcaggcggcgctgcaggagaggagatgcccaggcctggcggcacacgcgggttctctgtggccagcaggcggcgctgcaggagaggagatgcccaggcctggcggccggcgcacgcgggttctctgtggccagcaggcggcgctgcaggagaggagatgcccaggcctggcggccggcgcacgcgggttctctgtggccagcaggcggcgctgcaggagaggagatgcccaggcctggcggccggcgcacgcgggttctctgtggccagcaggcggcgctgc

SEQ ID NO: 479276 - DNA, 1000 bp, Homo Sapiens; identical to SEQ ID NO: 346857

SEQ ID NO: 479277 - DNA, 519 bp, Homo Sapiens
taaaacaaatatttaaaaaatttaatgaataaacactggggtctacagtagtatttgaaggacagctcacaaacaggtttggtttttgaaggttagaactggtggtctagagaattcatttcattccagagagagaaagagaggaatttcttgggttccttcaggaatgcgtctagctttgcctcatctttgtttgaactatggatacggcagaagaaaacatgaggatttcacagatttaaggtgcaaaaagtcactgggttctctaagaagtctgggattctttctgtagtatggaaacaaattattcatgcacaaggtcctcttgctgttcctttcgccatcaagagcttcaacacctggacacattccgcaaagtttcccggcattcggcgcgctccgcggggcagaggtcgcggtgtcctcaggctgtggcgccggcctacaacccccacgccgggcccgggccccgtgattatatttgggccccgtgtgattatatttgacaggtttaaacat

SEQ ID NO: 479278 - DNA, 1000 bp, Homo Sapiens; identical to SEQ ID NO: 346858

SEQ ID NO: 479279 - DNA, 633 bp, Homo Sapiens
tcacacatactccccacagttgccaatgatcaccttctgccttggcttcccatccttgcctggtcctgtgtgtttgaagataaagttttcatcatcaaatttcttcttgtagatggacttacccctggtgccaccgtggtttgtgaaatcactgccctggcaaatgaactgggggataatgcggtggaagctgcttcccttgaagccgagtcctgtggtcatgggcacgacgtcggaacgcaggagggtttggatgcagccagccggcttgttcccaatcttgatgtccatgtacacccagaacacaactccagtgagtaggctggagcaagtgctgatgaggaaggccttgggccctgacagggctcctggctttctgctttgggaagtctcaaccaccttcctctttatcctcttcccagcaaacttctccacccagtcttcatctgaccaaactggtctggaaaagccttccttaactctcattggtttggccaaattgacagaaattgtccacccaaagagctcagattcattctctgccaactcaaattcaacaaaagagaatccttggtgcttttctctccggatggggcggtcattccccagtctggtttcaacatcaccgtccat

SEQ ID NO: 479280 - DNA, 1000 bp, Homo Sapiens; identical to SEQ ID NO: 161509

SEQ ID NO: 479281 - DNA, 1000 bp, Homo Sapiens; identical to SEQ ID NO: 346860

SEQ ID NO: 479282 - DNA, 1000 bp, Homo Sapiens; identical to SEQ ID NO: 346861

SEQ ID NO: 479283 - DNA, 1000 bp, Homo Sapiens
ttttttttttttctcattaaacttttttaatgggtctcaaaattctgtgacaaatttttggtcaagttgtttccatttaaaaagtactgattttaaaaactaataacttaaaactgctgcatgcgaaaaagaaaaccaaagtggtccacaaaacattctcctttccttctgaaggttttatgttgcattattatcattaaccagtcttttactactaaacttaaatggccaattgaaacaaacagttctgagaccgttcttccaccactgattaagagtggggtggcaggtattagggataatattcatttagccttctgagctttctgggcagacttggtgaccttgccagctccagcagccttcttgtccactgctttgatgacacccaccgcaagtgtctgtctcatatcatgaacagtaaagcgacccaaaggtggatagtctgagaagctctcaacacacatgggcttgccaggaaccatatcagcaatggcagcatcaccagacttcaagaatttagggccatcttccagctttttaccagaacggcgatcaatcttttccttcagctcagcaaacttgcatgcaatgtgagctgtgtggcaatccaatacaggtgcatagccagagcttatttggcccggatggttcaggataatcacctgagcagtgaagccagctgcttccattggtgggtcatttttgctgtcaccagcaacgttgccacgatgaacatccttgacagacacattcttgacattgaagcccatattgtccccaggaagagcttcattcaaagcttcatggtgcatttcgacagattttacttctgttgtaacgctgactggagcaaaggtgaccaccataccaggtttgagaataccagtctccactcggccaacaagaacagtaccaataccaccaattttgtagacatcctggagaggcaggcgcaagggcttgtcagttggacgagttggtggtaggatgcagtcca

SEQ ID NO: 479284 - DNA, 956 bp, Homo Sapiens
ggcctctcctaccattttcttcatcaaagctgctgtgatgacgttctagcttttctcacaggcagttgttgatgaaaagggtctccttcaggtgctgccactggctctggatctcatctttggctgtttccacagccgaggggccttcctgtgcatcaaagaggaaggcattgctgctgggaagctggtgggagtcatggcagctggaatgagtcaaatactgttcatctagtgagtactccaggacttcatccatttcttcctcctggacttccctcttgagccagtgtgattttcttcaagtctgtccctgttgtgcttcctcagatgttgttgggggtaattattttttttcttctcagtttgttagtgagcattggggttgattctgtggcaagttttctgacaaggatctctgtcagctggcttccttgtaccatttgctcacagaatctctgtctctggtagtaggcaatgtcagtgttcctgagaaggccctcaaaagacttgactgtgttcttcacatgctgggtgaaaaggtagcagacacctctcccttcctgtatcttctgttgtaagtgggtcagttcttcagcctgagcctgaattaagggatcatgtatccctttacacgcaaggtcacttgcgtcacgcgcatccaggagccatcctagccctaacacacagctgcgactctccggtccgaccagaggtcccagacttactcccacggcacgggaactctttcgtggcgaagcagcaggtggcgaagcagcagcccctgcgccaacgcccctcagcggagcaacccgctgtcggagccggcgggagaagtgacttatgcctgtcccttctttctctcctgtccccgcccctcgtctcccgcaatgaagcgagtatttaatctgtgtccttcttggctgaaagttcacactcggaattccagagcagtccat

SEQ ID NO: 479285 - DNA, 1000 bp, Homo Sapiens
tgataggcaaaaggttttaattgtatagattaaaattaactttggacaaaaattaaaactcaggcagagaatgttttcttctttttgcaacagcagacactagtaaaaacaaaggcacagtaaaaattgagacccaaaatttgcagcgtagagatatgaatataataatagacacaggcagggaggattaataaatgataaaatgtttagaggatgatcattagaatacaggatatttatactcttgaaaaccgctttcccaagtacttcattataagtaaggtgtctctaaaagggacagatctcctagacccctccttaaccaagtaaccagtcctgatatcataatggtgatggacaaactagaccttctctgcccgcagatgggctgaggttggaaactcacagcattgtctctgcagtgttcccggcaaaacgtttaggctgaatttaatcatgaagacattttcagacaacttcagaatgtagatcattgagccagacagctgacctgtcctctataaacaagtccatgtcaccaccatccatgacaacaacaaaaagatgaggaaatatttggggttcaaaataactaaagaaatgcagctacattatctttttactttttttgaacccaaaatatctcttctcctttttgttgtgtgatttgtggtgataaggactatgtgaaggagacaggtcagttgtcctgctcagtgttctacattctgcagttgtctggtgattacctcctatgaaactcaggctaagcgttttctgcaagaacatggcattgttcatattctgcaccggcagagtcctgggtgacatgctgtctcctgccagcggctcctgactcctgttctctacaggatggaattgagaggagcagggctaaggcctcccaatgctgtttgtccatctagctgtggtcttcctaagtactgacaccaattggaggctgaaggactgtggcttctctaaccaaaggagcctagcg

SEQ ID NO: 479286 - DNA, 528 bp, Homo Sapiens
gctgtgatgaggacatgtttatttctaaaaagcctgcagcacaatctatctcttctcccaaaaatcgtatgtatgacagatttttatgttactgctgctacacgaagaaaattgagcctaatatgttcggtcttccaggccaaagcaaaggattgattttagaaggaacttgtcctgcatggcctccatccagccatcaggcagggctccagctctcatccagggtgtggccgccgcagctgcttcttcctcctcggccgctgctgcccagctcccggctggctccgggcgccgtctttcccggctcggggtctgccgtggggactgaggggttcgcgtcgcgtccccggaccggtaaggcgtgtagtgagcccggcgggacgcgcgacagcagcagccaaagtcgcatcggcggcggcagcaggacccgctgtctgtgcccttcatggatttcctgggcctggccaccccagtcctagctacggttcctgcttgttttcctggtgtcttccgggactgccagggcgc

SEQ ID NO: 479287 - DNA, 1000 bp, Homo Sapiens
tgataggcaaaaggttttaattgtatagattaaaattaactttggacaaaaattaaaactcaggcagagaatgtcttctttttgcaacagcagacactagtaaaaacaaaggcacagtaaaaattgagaccccaaatttgcagtgtagagatatgaatataataatagacacaggcagggaggattaataaatgataaaatgtttagaggatgatcattagaatacaggatatttatactcttgaaaaccactttcccaagtacttcattgtaagtaaggtgtctctaaaagggacagatctcctagacccctccttaaccaagtaaccagtcctgatatcataatggtgatggacaaactagaccttctctgcccgcagatgggctgaggttggaaactcacagcattgtctctgcagtgttcctggcaaaacgtttaggctgaatttaatcatgaagacattttcagacaacttcagaatgtagatcattgagccagacagctgacctgtcttctataaacaagtccatgtcaccaccatccatgacaacaacaaaaagatgaggaaatatttggggttcaaaataactaaagaaatgcagctacattatctttttactttttttgaacccaaaatatctcttctcctttttgttgtgtgatttgtggtgatatggactatgtgaaggagacaggtcagttgtcctgctcagtgttctacattctgcagttgtctggtgattacctcctatgaaactcaggctaagcgttttctgcaagaacatggcattgttcatattctgcaccggcagagtcctgggtgacatgctgtctcctgccagcggctcctgactcctgttctctacaggatggaattgagaggagcagggctaaggcctcccaatgctgtttgtccatctagctgtggtcttcctaagtactgacaccaattggaggctgaaggactgtggcttctctaaccaaaggagtctagcgggt

SEQ ID NO: 479288 - DNA, 1000 bp, Homo Sapiens
ggaaatgaaatgtttttattaattcacatcagtacccaccaaaaccaatcagcataatcaaatattataacactgaatgtaaaaaacaatccaaaagtccagagtgataggcaaaaggttttaattgtatagattaaaattaactttggacaaaaattaaaactcaggcagagaatgttttcttctttttgcaacagcagacactagtaaaaacaaaggcacagtaaaaattgagacccaaaatttgcagcgtagagatatgtatataataatagacacaggcagggaggattaataaatgataaaatgtttagaggatgatcattagaatacaggatatttatactcttgaaaaccgctttcccaagtacttcattataagtaaggtgtctctaaaagggacagatctcctagacccctccttaaccaagtaaccagtcctgatatcataatggtgatggacaaactagaccttctctgcccgcagatgggctgaggttggaaactcacagcattgtctctgcagtgttcccagcaaaaagtttaggctgaatttaatcatgaagacattttcagacaacttcagaatgtagatcattgagccagagagctgacctgtcctctataaacaagtccatgtcaccaccatcaatgacaacaacaaaaagatgaggaaatatttggggttcaaaataactaaagaaatgcagctaattatctttttactttttttcaacccaaaatatctcttctcctttttgttgtgtgatttgtggtgatatggactatgtgaaggagacaggtcagttgtcctgctcagtgttctacattctgcagttgtctggtgattacctcctatgaaactcaggctaagcgttttctgcaagaacatggcattgctcatattctgcaccggcagagtcctgggtgacatgctgtctcctgccagcggctcctgactcctgttctctacaggatggaattgagaggagcagggcta

SEQ ID NO: 479289 - DNA, 1000 bp, Homo Sapiens
tcatcttgcgctcgtagcggaagggcctggagatggcccagtagcgggccacgctgatgacctgctgacgcacaggttcaggatggaggcggtggagcacatgatgtcgaaggccacccagacgtcgcagaacgcttcaaagggccagtaaccggccacctcggcgactgccttccaggacatgaccagcagcgccacgaagaggtctgacacaggtagagacacgatgaagacgttggtcatcttggcgcgcaggtggcggctccgcacgatggctgcggacaccagcacgttgcccagcaaggtccagatgatgagtagggccagcaggcaggcggtgaccacctgcacgggccccagtggcggtgcccccgccgagccccccacggcattcccctgcgccagctgctggtacagcgctaactgccccgggtacgcggtgccgttgctccttggcggcagcatttcgggctgggccgcagagtcggtttgtgcgcgatcccaactacagccctgcgacccccaggcagccccatcgggcaccccgaggatgcgccccctcagccaagggaccctcgagccccagagggcgctcaccatgagctgcgccgggtcccggagcgcgcggggacttctcttgcttcctgaagcgcctctggctcggtggccgtggtgcgcccctccagtcgcgctcggcgcgccagagtgtagtggtgatcccgcaggtcccaggagcgccccagcgccagaccctagccccgggccggggaaaattcttcccgggaagaccgaagggtgcttggcgtagccctggagccctagccctagccacgctcgactatcatccatatcaccatcccttgaatgttctgattggatgtctggaggggtctgaaggatggccacgctattctgatttataatcttcaatttcagttttggttttgacagttttcttcttggaactgtaactgtgaggctctgtaactgagtcttccct

SEQ ID NO: 479290 - DNA, 1000 bp, Homo Sapiens
tttttttttttttttttttttttcatgggaaatgaagcgacatttattgaaacttgtattagtcaagcaacttaatgctaggctaagttgcagtgagtaataatccctaaccccagtgacagtgcagaaaaagaagggtttcatatgtggagtgtgatgcatgtcaatgggagtttcctccacctggtgactcaggtatccaggcacattcatctctgcgggtctgccatcttgacacgaggtcattgcagaaggagagagggtgtagagtcatgccagttcttaggtgctcctgacaaggagatctgcagcactctgctcacattcctgttttccagaactcagccagtacccagtgcaactgccaaagagtcttaattgttgatgaggtcttggagcctcccttctgctcccagaggcttttcttgctcatgtctccagccacaatatccttgcaggacggagtcttggccgcagactgagcctgtacctcacccgtctcccaccaactcttggtactggatgcagccatgctgggcagctctatggaggcctggcgggctagcttgggggtctggccagcagtcctttcacagctggggagtggagtctgggcctgaggtctcctgtgcgcctctgggcgcctgcgcccgcgagactctgcaacagggtcaccatctggggatgtctgatagatctgggacatgcgatcgaaaggactctccttctcctcatcgttgtccacctcccggtccccggggggaacggcgttgggcatcatgtggatgtaggcagctgcgatttccttgtggaagaccgtgtcttggttgtaggagatgagctcattgctgatgttcatcgtctccaccggcgtgcgggagcagacgtggctgcaccccagcagctgggcaaacacgcaggggaagccggccggagggcctttggggtgtccactgcagaaagggaccatgcagttaaggatgaagaagggcagccagca

SEQ ID NO: 479291 - DNA, 1000 bp, Homo Sapiens
ttagtctgtttcttccatgcatgatgtgtcgttgtctccttcaaggggtgacatttcttcagcagtatcatcagcagtagggtcattttcatcaatacccacaccaagtttgatcatcctgtagatcctgttagcatgtgtctggggatcttccagaccaaagccggaagacaaaagagcagttttgtaaagcaagacgaccagatcctgcacagacttgtacttatctgcctctgccttttgccttaaggtctcaataatggaatggtcagggtttatctccaggtgtttctttgctgccatgtaacccattgttgagttgtctcttaggacttgagctttcatgattctttccatgtttgctgtccagccatatatgtcatcaattggcttgatcatatagttcacttctaagccatgtttccgaagacattccacaaatttagctacctggtccttggtctcacctgtgatgtaatagatatgtttctagttttccttcattctggtgcagtagtccttgagagaaaccatctcatcaccagaagcagatgtgtagtatcttaacagctctgaaaacttcttccaatgttgagagtcttcatatatttcaagctttacgcttttagagaactgctcatagaatttcttgtagttctctttatcttctgccagtttggtaaagagttctaagcattttttgaccaaatttttcctgataacttccaaaattttgtcctcattagtaatatcatcaggatttctggtccagatgggctttgttttgttgagtttttcttgatcgatgtacttttccttaatcttcttattctttttgtcaccatccttcttttcttcttcttcttcatcagaaccaacatcttcaatttcaggtttgtcttcggactctttctcttctttttcattttcttcttctttatcttccttttcttcagcttcatcatctctgacttctttatcatgttctgtgaatgatccc

SEQ ID NO: 479292 - DNA, 1000 bp, Homo Sapiens
tcacccacccacttgctgttctcgttgatgctgatgcctgcggagagcctccaggcagatgtctcctcccaccatgtcgatggccacattcaccccgccctcgcccaccagcttccttactgcatccttcaggctgccctgactgtagttcacgctggactgcgcacccctctgcatcgccagcttgcacttctcgtcacttccagcagcagctatattaccaggtgtgaagggaagatggggcctttcctgatattgatcacggcagatcaaaatatcaccaaagttaactccacagaaatggacatcaactctgacctgtgttaaaccaataacttgcacatacaaagtcgtgtgcaaatcagaattctctgtttctaaggcaacagctctcgtgaggcccgacggggcgggggccacctcttcaatggtcaggggcttcttcagctctgcgcaaatcgcagcgcggtagtgccggccgctgccctgtccggctctcctgcaacacaaaacaagggaagggtcagtcgggcagccccgccgggagcaccctgggactgccttgcggggctcagggaggagtcggggttgcacctgcagacccacgcccgagggaggcactgcctgcagagcacggccgccaaggccaagcccagcgaggggcgagggggagtggccagagcgcggcaggaagagccggacagcgccgcccagccccgggagagcggaagggcggcccgcgaggcctcctggcgacgcgccctggcagccacgacccaaccccggcggggcagctccggtccagtgcgcccggcttctacggccgccgagaccaaacgaccgcgcgagctccctgttgggcctctctggaggtggagccggctggtggcgccttggctcactagagggcaccatggaacaatgttttttctggctgcgggcttcctgttcctgccaacccaccagggatgcggtgcccacatagttctgggctacagct

SEQ ID NO: 479293 - DNA, 1000 bp, Homo Sapiens; identical to SEQ ID NO: 346864

SEQ ID NO: 479294 - DNA, 1000 bp, Homo Sapiens
tcaccccgagggccccggcttttcttccacatgttcagggcctccagaaagtgctctgcagcctcccagtgagccccaggttatagcctcccagtgagccctgcagctgatgcccaggttatagcgggactggatatagccaggctggagctcaagggcctggcagtatgaagttactgcttcttcactctggttttccttccacagcaaatagtcattgggatgaacactgaaggtagctgtgaagcagttcatggccttgtcgtattctccactcaggttgaaaaggacctgcaagccacactgcacatcagggtccatggatgtagggtccagttgcacagttgctaggaagagctctttcatttcaagaaacagggagtcagacaacagagatcccaagatatgcttgctggcgcccagtcctgccccgccagccccttcttcagcaggtgtcaccagatagccacaggctggtgtgtggcagggtttcacaggcctgtcactgcagaggctcattggtaaagcctggttggtacccagatacggccaagcttccatgtgcttaggatcctgctgcatagctgcctcaaaaagcagcacagcatttgggagggccctctcctgaagtcgctgcagcccttctttgaaaggctgagggtgatcacgcagggggttctcctcctccaacgggtaccccttatcataggaagctgatgcgaggtcatcatagccagaaagccaggggtgagtgtcagcatcccgttttgccttctcctccaactctgtctgcaactctacagctgacttggcgcgttcaaactccatccacagcatctccagctgcaagtcactctgggcccagttctcagacaaggccaagtcggccacaccaggggctctctggggagcctggaggaagtttgactcttcagtctgctgcatctcagccaggagttcatccatcttgaaggtattgaggtctgagcagtggttaaag

SEQ ID NO: 479295 - DNA, 1000 bp, Homo Sapiens; identical to SEQ ID NO: 346866

SEQ ID NO: 479296 - DNA, 786 bp, Homo Sapiens
ctaagaaggcaaggcagccatggaaacagaaacaggtctaaagagtggggtgaggcactggggcagaaggctcttcaggggactgtggggtccccatgaggtggcgagagggggggcatcggaaaacacccagcaggaagaggtgctagagctgagtcttggaagcaggtaagttttcccagttcctaggccaggcaaggcaccccaggcagaggagctgggcctcccgtgacaccacagggcgggcttgggctcaaacacagggtgctggggcaggaggaacatctcagggaggggaggatcatggagggctgtcctccctggccatgctaaggaatctgtaccaggacccaaagggaaccgggaagccaatggggctgtcactgactttacatgctgctgcagctccttagtcagctggtccttgtcatgggacagaaactgtggggtcaggacaatcaatgccttcaccacttccccttgaatcgggtctgggctgctcaccgtggctgactctgccaccactgggtggtccaccaaagcacgctgcacctctgtagcccaatgccgtactatgtttgttctgtgacatcctgtgccagaggcattgatagtgtcatgactcctccccaggaaccagatgtagccctcttcatccacagttgctctgtccccggtgtcgcagacgtccccacattccacttcggctgtgttctctgggttaccctgggcaaattttgccatctctctgagtctattttcattacacgtaggcacacgatgcat

SEQ ID NO: 479297 - DNA, 1000 bp, Homo Sapiens
ctatggggttggttttgggtagacaggctgagcctgccccatggaactgtaggggcttacgaaggcatttcgtttggggaaggagctcatccaggaggactgggatctctggttatatgtgacttctgacctctgggcatggaggtctctctccagaggcccaggcctggacacgaagggagagaggcctccattgtcccacaggggccgaaatgcagacggtgcatccccggtgccctggggaacccttctctgatcatcaggattctcttggactccggggtccttgtcctgctcaggcatccctgccctgctgtccttcagggccctcaacacgatcttctctggacacgagtctggggatagccgggtgttgtgggctccaaagggttgactccttgctcctgggccccacagagagtccttgtgctcagtgcactggctgtgctgcaagatatcctggaattcgaagcacacagtgctggcttgctgtggtaccccctgggccggaactggagtgaggggcacagagtgcccaggtaaccgctcctgggaacagtggggaactgtcagatgctcgaactttcgagagctgggctctgagcgtcctcgtggagctgccaactcggccaaaggagaagcgagcagtttcttctgttgccgggcaacacgccttttaaacctgagcgagtgggtgcgcatgcaaagaacgggcgcgagtgacagagcgactgaaatggtttcctggaagacggcccggttgcatctctcaaacgggaccagattggaagggagaccagctgctttgggcaaccgaggctgcttctgggtgaactcccaaactagatggtgccgagagccctggacctggcagctgggctggacatcacatggctcccgcagtgcgcttttgcaccagagtgccaccttcttctccaggtccaggtcttcagcagtgaccccagaccccagctgtaagggaggtggcagcatcagaggc

SEQ ID NO: 479298 - DNA, 1000 bp, Homo Sapiens
ctaggtggggcaatggaagaggttgccagttcggagccacctcaagagctccagccacagcagctgccgctcccgacgggcacccttcacgaggctgcagggagggccccattcacccagcgggaagctgatctggtcacacatgcctagcagctgtccaaagtacagtaggatgcaagcgcagctcctccatcccatgggaggggaccccagctccccagagctccccagccacccacagcaggggcagagctgaagcctgcaggggtccagcctctcaggcagggatgtgagcatggtactgcgcagtgcgaagcgcactgtgtcctcattgtgggaggccaccatcaccttggccttggcgttgtgcttcagctcctccagcacgtagtccaggcacctgtggtacatggtgttggtggcctcgtacatggggttgatggggtcctcatatccgatctctgctgcacaggctcgctcctgggccaggtatgcgccccgcaccggcttggccccaaaacaccagccctcacggtgagccagctccatgtccagggtcacattgtcataggcatccttgaggtagcactggtatgtgttgaagatgagcagcttctccacattgaacttccgctgcatctccagcgtcaggcgactgatggccggctggaagtaggtctgctcggcatccaccatcagccgcacgcccatctctgtggctttcttgggcaggacatccatccgctgtagcatcctcgtcatctgtagctcctcctcctcagcaaaccgggacagcaggggctccagctgtcctgtctggacaagcagcacagagccccggaacctccaacgcagccagtgcactgccctacgcgggcccacccaatcgtcaaacagaagggctccacccagagcaggaagagggcccaggaggaagacccctggctgtccattggggactaccaggtgcttggacagcttggtcctgctgtcgatgagg

SEQ ID NO: 479299 - DNA, 1000 bp, Homo Sapiens
ctagtaatgggccacttctcccagggccacagttttctctcctatcaaatggaacatgttagcactgcttcgccatctctggtagctgggaggagcaggtttttgggtgaaggtgaaagagccggagttggggatgtgtgtggctggggggtacaggtgcgaccactttgcagtccactcctgtgagtagggcattcctgaggtgttggcggtgccgtagtattgccaatgcatctcgttcatcaactcactcttctccttcatcaacactttgttggggtgcacagccagccaagtgcccgcacgagggaaggagtggccatcgtccagtgagatggtgaaggggacgtggccgctctcatagagcaggggcgacacgaagtgcacttgcccggaggagtccacatggccgagggtctggatgctctcactggtgtctgtggggctggacatcttgaagtgccgcaccacaaagtccttgccgcccatcatggagactgagtagggcaatatctccaggcagaagtcctggaaatccaagcagcaggtaccaaggccggagcacgtcgggtggcaggaacatggcctgtccagggcgccacagcgcatggagcagctctcttgggcataggccaccacgttgatatggtagaaagtcacagggcccgtggggatgggatgaatcttagcatagaccatctggctgttgccctgactgatgggcttcagcttctcaggactgtttccagaggggagaaagtcccttaacccacaacggtgctcagggtacctctgcaggtgagtgtcctgtaagtggatgctcaggcgctgagccacggagagcctgtctcctggccccaggctggcgagggcattcatcccaggcccagggctgaggttgctccctacagcactgggtgcaggtgtccatcctcctgtaggtgaggctccgggtggttcgtctgagacagttcccaggaactggaggagggagagctgc

SEQ ID NO: 479300 - DNA, 992 bp, Homo Sapiens
gatgtttatactgctttattcataattgcaaaacttggaggcaaccaggatatccttcattgggcgaatgataaaatgtggcatatccaggcaatggaatattattcaatgttggctttaggcaagcaaggcagccccaggtgccagggggtgatgaggtcaccacggagaccatggtggtggtagcggcagaggtggcagcagggttggtggcaggcatggggaggtcaaccggtcccacaagaggttgggttctggtttcttctgtcttggcttctttctcgtcttcttggtgtcaaggtgagcagtgagggctctctctctcggaaaggtggcccaactagccctcggcctggctgcactgggctcagacccccgcccagggcccagcacggggagaggttgatcctcgccccgggagtagaggtgcacgcggtggatgctctgcttcagctgctccacctgctcgtgcatctccagggcgcccatgctgttgcaatggttcagctccgcctgcacaacacagaagaacttcgcccgggtagtgacagttcccgcccagccggtcccatgccccgcggccgcatccggaaaaaagagagcccgcgctgttccaattgtaccaccctctccgccagcgacgggttgcggacggggctgcggaagaggaggcgcagcgcgcgcccagtgtaggtgtccgcctgcctctccaagtcctcctcggagatctgctggcaggtcttgctctgcgggacctcgctgtcgaacttgtctaggatctctacgagcgagcgcggctggagagcccgggtggcccttcagctccagacccacatccaaatgaccactggggacgattcttgggcatctcatgctgaacatgtccacattcacgcacagcttcttctccctgaaagctacttttcttacccctctcccctcctacttggtcagccactgaccccagccactaacaagggggtgcaccctgg

SEQ ID NO: 479301 - DNA, 1000 bp, Homo Sapiens; identical to SEQ ID NO: 346869

SEQ ID NO: 479302 - DNA, 1000 bp, Homo Sapiens
tcacacggtgacctcggtcttgctattggtccttaggtaccgggacccgcggcccgcgctgccgtaaaggccggggagctgcgggttgaaggtctcaggcatcttcacactgaactggcgccgggccgcgtgcccgggtcgccggggtaccggcggggcccaggggcaggcgtccagcggcgcaggcaagtccggggatggtcgcggagcccgcgccgggggttgccgcggggacggctcgagggcggggaaacgctgacagaagtcccgcggggcggcctctgcggccttgagcgcggcggccttgaacgtggcgtacttggcgtagtctggctgcagcgtcaggctgccgccgccgcggctcggtccgatgccccggttcactccgccctcgctgtcacctctccgtagtcctctccccgaggccgttcggtgagaacctgggggaccgttctccgggcgaggctgcgagccaagcctgtcttcgccgcagcctccagcgcctggaacagggcctggctccgagtcacgcgcagcggcggcggcagccagcccggggggtgccaccctcatgaacggctcgcccggaggcgacgctcgagccaggcgcggagtcctgggacctgcgctgttgtggggggagccccgggggaggccgtcccccatctgcacctggacacagccacccaggggtgggcccagggtgggaggcagtggctcctgggggcccggctgcttcagaagctctgtcagcgccctggtcactgtgcgccgcgcgcgcgggctgtgcgccctctccagtcccaggcgcgccccgatgccggccagcaccagcagcgctgcgacgccgcacacagcgtagacggccgtatggctgcgctcgcggccggggtcccggggcgctgcggtgtcgcgggcgcgggcgggcggccggcctgtctggacccaggccggcgtgtcgtagttggaacagcggctctggtcgaggcgccgcggcccg

SEQ ID NO: 479303 - DNA, 940 bp, Homo Sapiens; identical to SEQ ID NO: 346870

SEQ ID NO: 479304 - DNA, 1000 bp, Homo Sapiens; identical to SEQ ID NO: 346871

SEQ ID NO: 479305 - DNA, 1000 bp, Homo Sapiens
ctaccactccttctctacctcctcaaactctgagccagcagatttgtgcttggctgctggatctccatggtcctctccaactaatgtgtaagatggagtagttgcaattattttaaacttcaatttagtatcaactggccttttaacataaacacttactttgtcaaatgatgagaaatagtgtaatcttctgcatctcgtccacacgtctttagtgaagacatcaatattttgcttaagaaggatattgacaatacctggtgagtcatagtgtatagcaatcatgagggctgacaatatagaaaggaagtaaatgaaaagcagccgcttccttctcactcctctgtgctttctgatgtgctgcgctttgccttgcaacaatcctcctccgtctccccggattaacttgtccagtgcttcaatatttgcaccatggaaatgcagtttttctgccagtgaggtgctctcactatacacagcataatggagagcagtgttgcggtagatatccttaaggtttggattggtgccatgttccagcagaataacagtgcaagcctcttcctggcaatggacagcctgtatcaaaggcgttctattttctttgtcacagatatcaatctggcattttctgctaaccaggagagtgaccactttcacctggtcactggcacaggccaaatgtagagcagttctatgctgcttgttcagggcgtctaggtctccactcctgcgcgccaggcagcgctccacccccgcggcgtcgcccttgacagctgccctgtggatcttctgcagttcggagtcccggattcggtatccgaacccgtgtagacatgttctatggagccctgggccgtctggcccctgcggctcccaaagccgaataacttcacagtggtgacttctcagacccccaacctccggccgaaatccctgatccaaccccaaatccgcgatcaacccccaatccgcgatcccaaatctgtgatctactcca

SEQ ID NO: 479306 - DNA, 1000 bp, Homo Sapiens; identical to SEQ ID NO: 346872

SEQ ID NO: 479307 - DNA, 1000 bp, Homo Sapiens; identical to SEQ ID NO: 346873

SEQ ID NO: 479308 - DNA, 1000 bp, Homo Sapiens; identical to SEQ ID NO: 346874

SEQ ID NO: 479309 - DNA, 1000 bp, Homo Sapiens; identical to SEQ ID NO: 346875

SEQ ID NO: 479310 - DNA, 1000 bp, Homo Sapiens; identical to SEQ ID NO: 346876

SEQ ID NO: 479311 - DNA, 1000 bp, Homo Sapiens; identical to SEQ ID NO: 346877

SEQ ID NO: 479312 - DNA, 1000 bp, Homo Sapiens
ttttcataaaggtctatttcattattggtgggtagcgcatttaacagttaaatacatttaaataatgtataggtgactgcaggactgcagcattggtaactagataaccaattcaactagaaaccagctaacaaagaactgtctaaatacttaaaatacagctcttgttgagatcatcctttgttttgatcatcttcttgggggaaaaaagcctgctgctggtcacaatggaaatatattaaggccaaatcttctgatatccattcccaaaggtttctttcagctggattaagcctccaactccagggcgagcccaaccttgtggcctccagcattaatgctcttcccgtctaccagagcagagagtgtaagcttcacaccaggcctcagagtctgagtatagcctactccaattaagctagagttgttgacttttgcagaaatggaagcagtgggatccaactgatatttagctgcaatgccaaaacgagtgcagttggtacctgatgtccaagcaaggtttactgaagtgtcaagatcttcacaaactttctgataaattgatcctccaaattctgtcccatcattgacattagtgtgtagctggaagtccccagtcctgtagcccactgcaaagttattccttgtcagctttgatttggcactgtcaaaggtcatctggtagccagcaagccagccctcataaccaaagacagctgaaccatggattgcaggtccagcaaaatcaaagtcaacatcacaaccaaggtttatacactccctcttgtaagacttgattttaccacttttctttcctgtgtttggtgagaaggtagtatcaaatgtcagtttcaaaccttgacaaatctggtcttcaattgcgatttctgttcccagagtgttatcagtgttccacttttctgtgaaagtcagaccatactcacaccacttgtatttggtctccagggtcccagtaactttaccagtgtctgtattagat

SEQ ID NO: 479313 - DNA, 1000 bp, Homo Sapiens; identical to SEQ ID NO: 346878

SEQ ID NO: 479314 - DNA, 982 bp, Homo Sapiens
ccttcaagacacaagatggcgctttaagccttgttgttaagaaagaggactacaaacgcttgagtttcttccctctgctcgctctcagacgtggcttgcgaggggatttgtggggtccacctctccacagcttggtgggtgggttccgtcctcctcctcggacagggcaggaccagcagccaatcactccttccttgcaggatggagtcttggccgcagactgagcctgtacttcacccgtctcccaccaactcttggtactggacgcagccatgctgggcagctctatggaggcctggcgggctagcttgggggtctggccagcagtctgggcttccaatgggtccagggccctcactccagctccacagaccccctccaccaagccatgggggggcgtggcttggaagcacacattggcacagagaccccagaagcccgtgtgcacacgtttccttaggtccacccacacgggaacccttgacatccacgtgcatgtgcagacaggcttgggaacaaggggaccacgtccccctccagggatcccttcagggtgctgcagcctcactttagtgaggcaaacattgactgtttgccttgccatggccccgacaacggcggtgccggccctggcacgaggcccaggtgtgtactctgggaacatcatccatgcagagctgggcccctggaggatcactctgactgagctctccctggctaggggcagtcccaggctccacttcggggcctggcccccagccagggacaccagtatgcacagaaccctgaaggatgcctcgttctgagtggagctccccaagctcaggtctgttcctgtcggcctcgtccactgccaaccacccccgactcgggacactggcccttcttctccttcctccacagacctccccacctctacctcccagtccccactgagggcctgacaatgcccatcttcggcccagcactcccagctacccat

SEQ ID NO: 479315 - DNA, 1000 bp, Homo Sapiens; identical to SEQ ID NO: 346880

SEQ ID NO: 479316 - DNA, 1000 bp, Homo Sapiens; identical to SEQ ID NO: 346881

SEQ ID NO: 479317 - DNA, 1000 bp, Homo Sapiens
tcacttccagaagagcacattccagaaaagtagtcagcaagggcagaggcccagggacagcagtgggaagagcagggcgccttaggtgtggtgctccagcgcaccctgggccagtgctgccaggaagagctgccagcccttggccagtgacagtggtgcctcctgcagctcccgccacaggaatgggctgccaaggagcgtggctgctgggcttgtcaacaccagcagggcagcacagagggtccagggcccaaaggctcggcggcacagcggcagcaccatagtggcggccagcaggaagtccagtcagaagttggtgagggcgatgcagcccagctgcagtattaggtagatcagggctaccagcttcagagccatccagcccctgtctgggacctgtgtgcttaccatcctgtgctggggggcggggacactagggtcagggacccccctgagctcctcaaggcccactccggcctcatgcagctgcatccacagttgcagagccttgaaaccaaggaccaggagcaagaagctggtggcgggcatgtagaggccgatggagacgaagcgggacagagtggggagcaggtagaggaagaacagctggtgcgggtgttccaggaggtggttgagcttgcagaacatgccctccaaagccttgcccgctgccaccaggtcatacttgtactggcggaagctactgatgcgacgcagggttagggcctccacatggtagtgcaggaagaggccacgggaagcctgccacaaaatcatgagcagcagtgtttgcaggccctgcagcagttcgtccaacaatgtccagtcctggggctgcagcttaccctgaagcgtgcacagcaggcccactttctggcagaaggtctggaagagattgagcaggtcaaggttgggcagttttccctgaatctctgtgagctgggaccagtcctgcccttccctgggacacacgctctgtggaagtggagccggggccacc

SEQ ID NO: 479318 - DNA, 1000 bp, Homo Sapiens; identical to SEQ ID NO: 346885

SEQ ID NO: 479319 - DNA, 636 bp, Homo Sapiens
tcttttaacttaattttatttttagcttttattttaggttcggtgttacacaggaaaactcatctcatgggggtttgttgtacagattatttcatcacccgggtattaagcccagtacccaaaagttatcttttctgctcctctccctcctcccaacttccaccctcaagtaggcctcggtgtctgctgttcccctctttgtgtccacgtgttctcatcatttagctcccacttataactgaggatatgtggtatttggttttccgttccaagagtttctcttaggctgaggtggggtgattcggcacttcccagtaggtgactccagatgacagccaacagccagcttgctcctgttctctttcgcaggcagagctggctcttaattttcatgcatttattctttagccacttgagacgcctggctggagggatgggtaagagatttggcatcttggtgcctccaagcctcccgtccagcatggtccaggttaacaaacacctgtaaagcgtccgtctctgccggccctgacggacagggtgagcaccccggtgcatcctccctcctaagaggattaagcggggtgtttggaaaacagagctgcatccctggagggaaggtgccacagagacatc

SEQ ID NO: 479320 - DNA, 1000 bp, Homo Sapiens; identical to SEQ ID NO: 346887

SEQ ID NO: 479321 - DNA, 714 bp, Homo Sapiens
actttcaagaacagaaactaaaataacctgttataccattagtcacaaatacagtcctcgagtttttttgcccatacacaagagtatttgtctaaaacatgtattctttgtagcagctagcccctgccaccaccgtgcttggctgagttcacaaatctgttgtaacctgtggctttcctgtcacttctctggctctcctctcctgctaagctttgtgtcctaattaaaatattctgccatgcctcagtcagtcatgatttcaatcacttcattttttccacactgttcaggataatctcttgggtgatgttcttcagtgtcttctttaaagcccccaacaaatatcttcttcatagttaagtgggcacctggtctttgagaatctcctgagacagctgtctttgtctccacaactcttccatccaccttgtgtggccttgcattcatggctgcatccacctcctccacagtggcacatgtgacaaatccacagcccctggagcgcttggtgtttggatctctcattaccacacagcccgtgagcattccgtgttgctcaaaatggcccctcaggctctcattggttgtttcaaagctcaagccttcaatgaagagcttcctcagctgttcgggctctttaggagactctgacttagacatgacgccagggagaagagaaactttaacgatacttcttcggcggcgtccatgatt

SEQ ID NO: 479322 - DNA, 1000 bp, Homo Sapiens
tctctttgctgctatcagttttgaaattttacatggcgttttgacttctgtgatgtgctccagtcagttgaagtaatgggtcttttactggtctgcctgattaccgaaaattatcaacttgacctcacactgaccttgttagcactgttaaaaaattcattcgccttctttaaccaggtattcctttccaccatgagttgaccaaattcttcttgaagctgactgagtttctggtgagagagctggaggtgttctttctccacgtagtcctttgacagcagaattctcagtgcctcactcttcagcttctcaacagcagaattccattcctttgcttttattatcagttcctcttgcttatgaattcgatcctcattgtctgaaagtgatgaacctagactttgttcctgtaaatttcttatagttttctgaaaccaacaagtaacctggttttcttgttggtcccactgacatatctgcagaacttgactcaattcttgccactgttgcttcaagtacttgtctagttgtcttctcctgtcttgtagaagttcaagaaggcggtcaaccttcagacagctgctatgagctccctgagtcaactcaggattcacattaggtccttcacacttgaatttttctatgaagtcagtgagttgttgacttttgtttaaaagggctaaagaccgttccaagagttctttagtatgatgttcatgaagctgaagaagtgattttaaggactcagcactctcaaactcatgagtattctggaggaaatcttcagcttggtctattttaatagcaaactctaaggcattttcaaaaaattcagaagtcaacctaaggagctctgttcttctttcaagcatggacaccagagctgcccatgcttcacccagagtctcggccatggcatcatagacctgactctgatccttgttctcttcagctgtcttgtctgcttcctgcaagagttcccatacccgatcttccaaag

SEQ ID NO: 479323 - DNA, 519 bp, Homo Sapiens
tcactggtaactttccttttccacaaaagtaacaacaaagaagaaaaacaccatgaaatcctgtgagcaggcataaggaaagtttttgaaaactcctgagttgaagtaattgcctccccagctgcacccgatgagcccatgcttggcattggttagcgactccttaaatcctttcgagacctttatccataagaaaataagaggaaattttatttcaaagtagcatgaagtgatatgccaactcacttgaacagcatgactattttctggttctgttttgtagttacttttcacgtggaggccccatctcttacgggagagctccggctggcatttggcaggagcccttctgggacaaagcttccagaggaaggagcaggcagcaatctttgctgttctgcagcatccgttggtgatatccaggccaacagcgtctggaatagacccccagcaaactccagcagacctggcaggatcctcctgaaggctgactgccagtccaccccccaactcaatcat

SEQ ID NO: 479324 - DNA, 1000 bp, Homo Sapiens
gagggtcagagagcagctttattaagcaagctggtggagggctgtgggtcccaccacccccgggctcggcgccagggcggaaggtccgggggtgccgttcaggccacgtcgacgcgagcgaagctctggtccatgcccaggctgttctccacgtacacctcgtacttgccgctgtcctgaggcgtggcccggcgaatggtcagcgtcgtggtggtgctgccgatctcgaagaacaccctgtcatcctcctcgatgtcctccccgtccttggtccagcctacgtcgggcgcaggctctcccaggatctccgcagtcagcgtcacggtggtgcctttgcgcgccttagtgttgtcgggtcccttttgaatcttcgtcgggactagcggaaggaaaggggagcgaaaccccgtgaaggacccggagatgaggcagggcatcacctcaccggctaatacccggcattggctggcgcggcgatgcgccccaggccgtgcccagagctgggctggcggggaccctgtagcttccacgaggatgcgcgccgagtcggagcactggccgaaggggttggtgacgttgatgctgtactggcccaggtctgccagctcgccgtcgcgcaccaccagtgccaccacgtcagggtcctcgaagacgtagcggtacttgggaccgtcacgtagctccttgccgtccttactccagcggatgaatgggtccgggaaagccgaaatgcggcaagtgagcttggccgcgctgccttcgatcagcaccacgtccttcagcggctccagcacccgcggcggccccttctcgcgcagctccttccgggacctgtggccccggtaagaggcctggatacgaatggccgcactctggacctgtgggtcattgatgtccagggtacatccaggagctggggccacagccactggctttttggcaggagctgctttagacataagagatccagcttcctgctggggcagcttttcaatcaggt

SEQ ID NO: 479325 - DNA, 1000 bp, Homo Sapiens
tggaaaatagtgggttttaatgagcttcacttaaagcccttcaaactgaagacatcacattcactattagcatggagtaaaacatttattttcaaatgtcatagaaacaatatttataagtcctcttctccacctcttgtgtggtgatttactgatttctctctttctttccttctttttcttcagcttgcttcccatccagtcatcctttttcacaaacattccctggggcatcttgctgtcttctgcagagaaacgctggctgcgtgtgcgtggtcttctccttcctctccatggtggtgctgctcttcaccggcctcatcttcgtcaaccactacggcggcgggggaacccccggaggcggggcgccccctggcgaggcaccggccaccgggtcgccctcgccctcgcccgtggggcccatctgcctgtcggtggccagcatcctggcactcttctcggtcgttgtcacctgggtcatctgctggctcaagtatcggcccgagggtgcggccgcgggctcgacggggggcagcggcggcggcggcggcccgagggcacgggctgcggcgggcggcgcgcggaggagcgacacatagccgggccacgccgcggaaccggcgcctgcacctccagccccgcgtggcgggagaagagggggcctctggctcggtgcgctcgagcttctgcaccctctccctgctgcccccgggctctcctggactcacactctctcccaactcggccactgaggagcctcggttttctgtccctcgggcttctgtcgcccctcgcccttcgcgctgggccagagagggaaactgaacaggaagggatgttggtggggggggggggtctcttttgcctggactgtgcaaaattgacctccgcgttatgcaccaccctcgtcctcgtcagaatgtgcggccatccctccctagagcacaaagatctgcagagacgaagcaaggggagggggagccccaccgccccgcctgaa

SEQ ID NO: 479326 - DNA, 747 bp, Homo Sapiens
taatgtgtacagggtcaagccctgagatttgttttattaagccaaaacctgcacacctgccaatcctgaaatcctttgagttccctttcatggctccttgaggacatagattctattctagagtaatcatctaggagtggttttttttttcccttggagatgggatctggctctgttgcccaggctggagtgaagtggcatattcacggctcactgcaggctcaacctccctggctcaagctgtatctctcacctcagtctcctaagtagctggtaccacaggaatatgccatcatacctgtgagtgagaacatgcggtgtctgtttttttgtccttgcgatagtttgctgagaatgatggtttccagcttcatccatgtccctgagagcaaagagagagccacgttgcactgtgggctgctgaccagattccacaatactccagcctgggtgacagagaaagactccatatagttatctgatttttcaataaagttgccagtggaatccaaagacgaaaggaaagtatttttagcaagtgatgctgaaataattggatatctgtattgtggcctcatctctcatcactgccctttctggggtctgtttcagcaaaatgaagcttatgacagtcaagcgagcctcttccctccttccgtcctggatctcagggtctctactttccagtccattcttccttcacacctaaagggatcttctccccctcttcctggactacttgtagat

SEQ ID NO: 479327 - DNA, 1000 bp, Homo Sapiens
aaggtcagcttccaggaggctggcctcaggcggagtctgggtcagagggaggagcagcagcagggtgggactggggcgttctacatctcattcaggtcaatcagagtctggtccagcatcctttgtgtacagaggtgctcctctttggtgcgtttcagtttatcttccaagtcatcaattgtcttttccagcttggctaccgatctctcagcaaactcagcactggtctctgccttttcttcagcagcactcagacacttcaggttctggtccatcagtctaatctgctcatccatctcttggcaacgggactctcccagctcagctcgttcctccgtgccttccaagtctccttcaatgatcaccaacttatgagccacctcttcatacttcctatctgcctcttctgcaatgtgcttagcttcttggagttagatttcctggagttccatcttttcttcatcttttaaggcccgattttcaacaaccttcatacctctctcactctcatcagcagctttttccgcttcttccagcttttgcaaggcagtggccaggtactcctgagcatggtccagctcttcttcaaccagctggatcctacggttcaaggaggccacctcagcctcagcctcttcccgggcctgcctttctccctcaacttctcgctggaggtgctcagctcgctcctctgcatcatctgcctgctgctgcagaacctggatcttgcacttcactgcctcgatggtggtgatctcagccacagtgcccacccagctactgctcgtgctctggttcctgcctccctttttgaagcttttatgaatctcaattaaatcgggatactccttcaggttaatcctgctgaacaggactgacagaactgaacaatcaaacaccttctccaggtggcagagaacctgatacacaactctctgtataggaatcgagtttatacgggcttcttgagaatatcttttcacgtggcctttttgaagaa

SEQ ID NO: 479328 - DNA, 1000 bp, Homo Sapiens; identical to SEQ ID NO: 346888

SEQ ID NO: 479329 - DNA, 1000 bp, Homo Sapiens
gtggccagtgtgggcagagttccgggtgggcctcctcctccatgtggccactgctactctgacactgtccacacattgtctagatctgtgctccatttgcccctgagaggaagggcctgtggtggccgctcacacgcccaggaggacagcactgaagtgggagccactgcgcactgtgagggagcagccgctggcgttgtccaagaacacggaggtccactgccccatctgcaggtacaggacgccattcacagagatggtgaagagctcactgctgctctccaggcccatgatggcctccagggaggcgttgcgctggcaccgggactggatgcagatgagcaggcgcaggtggtcccgggggcgcggcggccccctcctcggcggctccccgagcgcaggtagtagacgccaagctcgtgcagcgcgcgccgctccaccaacgcgtcccggcgcaggcggcagaggaaagcggcctccacgcgcggcgcccgcggccccggggccaggggcgcggccagcagtgccagcacgtcccccaccacgtcgtcgtcgtcctccccggcggtggccgagaccggggcgaggctcgcagcgaccggcccggcggggccacacgtacagggttcgggctccgcgcgctcccgctgccgcaccgcacctggcacagagcgagcggtggccgcgcgccagggacccctcacccgcccgccgcgtgggtccagccctgaacgacaggtgctctaccccacccacattttccaaagacgctgggggtaaaataagcgattgcagctttactggaagtacaaggaggttcttcagcgcagaaggtgctttcagcagcagctggaactccttcagcagcgcctcgggtgggatgatggggcctggggggccctggggaccgggaggcccagggggccctggcaagccgaacttcagcttcttggccttgcccctgctcctcttcttgccattgacacccttgtcactctgc

SEQ ID NO: 479330 - DNA, 651 bp, Homo Sapiens; identical to SEQ ID NO: 346889

SEQ ID NO: 479331 - DNA, 1000 bp, Homo Sapiens; identical to SEQ ID NO: 161511

SEQ ID NO: 479332 - DNA, 1000 bp, Homo Sapiens; identical to SEQ ID NO: 346892

SEQ ID NO: 479333 - DNA, 1000 bp, Homo Sapiens
ataaatcagcctcccatgttgagagtttggagttagggcagaggagaatgtaatgtatggagaatgtggccttaaaatcctcctttccttcagttttaaaatcaaataaattttatcaaaagagattcaagtttcagtgaactgtcactcaattttaaatttaagggacaaatatatcctatttacctcatctttgatgattttcatgaaaggaaatatgactctcacattagttgctgttcttaaaagctggtagcattgatctacaaaaacttgttttgaaggattagatttaagctgtagtttactccatatgaaaatcaactcccagatacagtacatatccccattctggagctgtggaataagaaaggattcacagagttgcaaggctaacatagttttgccttctttttcagcattacagatgatatcaattccactcttacaatcagttttcaataaatgctcccggaatagctgatcttctacaggtgacataaacagacatgtgaagagtgcttgatggaagtataagtctttactgatttctgggtgatttatacaagatttaataagagccattgcttcgggtatgcgttcacaagcaattaggtatctggcacgtagttcaaagaacagtggattttcagaacttaaatatttgttcactatctcctgagatgctggctgagctttaaggacagcttgcaacactggatcttcccatgggccaccatctctaatgattcgagtcaccagttccagattcacatttccatatctgcggaggtgattctggcattcctggaatgatccaagaatatcctttaagggctcttcataaaactcatctcttccaaagaacagcagcaactcaaagaaactcacagcaaggctactcaaaacatattgtacatgctcacattcatctgggaatgatgcactggctgttgtaaaacaacaaagggcagtctgaagaacctgaagctgtggcaaa

SEQ ID NO: 479334 - DNA, 1000 bp, Homo Sapiens; identical to SEQ ID NO: 346894

SEQ ID NO: 479335 - DNA, 932 bp, Homo Sapiens
catattaccatttgtcctggtgggccttggtcacccgaagttccaacaaatccaggaaagccagcattacccctcttccctcttattccctttgcccccttttctccttgatggcccgggtcaccatcttctccttgtgcaccaggatagccagggaatccatgttcaccctttgttccttttgttcctggatgtccttatccatcagaaccaggaagaccaggttgccctcttggtccttgtcgactctgtgggcctctttctcctacatcaccaatctctcccttcactcctcttggtccagcttttccttttgaaccatttggccctggaggcccaggattcccctgagcacccactaagcctttttgtccagaagttcctggtggtccttgccttcctcttggtccctttaatcctggcagacctcgccttcctattgtcccccaagggccgacatttccagtttctccctgaggtccatcaacattagaacttccctgacgcccacgccttcctttttctcccttagggccttggatatagctattagttccaggatccccaggatctccccttaacccaggctctccacgctctccaggttgtcctggcagtcccgtcaagccccgatttcccctatttcctttttctccagatgaccctgggattccgtgattaccctgttctccatgcaagccatcaactccctcaccagggttgcccttctctcctgaaaatcctcttgctcccagggcatccttcctcacctcggagtccaggaagacctcaggggcctcgttctccttgtgcctgaatgcttctggctgcagcccaggcaatgggggcctgactgcggagggaccatagcagggactcgatgtcctgcaggtctgcatgtaattgtgtacggccgactccacattggtcat

SEQ ID NO: 479336 - DNA, 779 bp, Homo Sapiens
tttgaagttaaacatttttgatgtagtttattaggcagaaagaatatatatgaatagttttagtaaaataaaactttatttagatattttcagtgaaagttgcttagttttgttgagggctggcaaaaataaatgccagtaatctctgacatattctttcagggtaattcttatggccacagttcaaaatacatgtattcaatgaggaaagttgctccaagcatcaatgctttaattttaacatcaagatcaaatggaaactggatcccaaatttctcaccattggttaatattccccttacaaatccagagtactgttttgaaatctttccaataaccatttcctcatccagagtcaataacttttgtaagctacatttcagagccttatgcagagcaagtacatctctacctacattatcataaattgtcatagtaaaagggcttgaaaatccacaaaggtgtcgaaggaagcaattatttctctcttctgcaaaataaattctctgtccttgattgttcaagatttcatacgttttactagtttcaaattttctgaggactcccagaggatcaaaatgttgacacactgttaactgatttatctgatgcaaatactctaatccaagtggacagctggttattgtctctggtgtagacaaccagggtcgtaggtcataaatagccataaactggattatgtaagtgctttttctacccattctggctggcacctccatgaggagtttctctgagagaacttcattcacatcattcat

SEQ ID NO: 479337 - DNA, 1000 bp, Homo Sapiens
cgtgggcgacatttttcattgtgccaaaaagttgccatgaccgtcattaaacctgtttaacaccaaataataaggaaaataaaataaaaaactcgggcttgacgcagaaactcactccaaataaattacctaccaaaacatttacataatggtggaaatattccaaaattcaatattttgggatttatacacaaaagataaacaaattagaggccaagaggctgccggaagggaaaaacggggcctggaatggccgacgtgaggaatgagctgggcctaaagaggccactggcaggcaggagctggacctgccgaagtggccgaaaggcaggagctttggactggggaggccgcagtgaggcgagagctagctgggcgtggagagtccgctgtgaggccgaggccgaggccgggcccgtgcaggccttcgagaggcaggaggccgggcctgcaaaggccgactggagatcaagttctgcgcctgaagaggctgccaaaagtcaaaagcagggcctgcgaaggccgccgagagccatgagctgggctgggctgaaagaggccactgggaggcaggaggagctgggcctggagaggctgactcgaggaagttttgcacctggagaggccgtcgagaggacggagctgggcccagggaggccgacttgctgctcttccaggcccacttccaggccgacttgaggacgacttgggcctgcagaggccgccgggaggctggagctaagcctggagagactgacttcgggacgatttgggcctgcggaggccgccgggaggcccaagctgggcctagaggagcccaccgaccggaggccatttggggcctgcagatgtcatcggagggccaggagctgagcctggagaggccaccgcgaggcctgagctgggcctggggagcttggcttagggaagttgtgggcctaccagggccgctgggagctgggcaggagctgagtccaaagacgttgttgggacctggagt

SEQ ID NO: 479338 - DNA, 1000 bp, Homo Sapiens; identical to SEQ ID NO: 346896

SEQ ID NO: 479339 - DNA, 1000 bp, Homo Sapiens; identical to SEQ ID NO: 346897

SEQ ID NO: 479340 - DNA, 1000 bp, Homo Sapiens; identical to SEQ ID NO: 161512

SEQ ID NO: 479341 - DNA, 679 bp, Homo Sapiens; identical to SEQ ID NO: 346902

SEQ ID NO: 479342 - DNA, 938 bp, Homo Sapiens
ctaatcccttttctccttctttcctgttttagcaaactttcagaaagaaaacaggcaacatcttgtgatgatgaagatcacagttgacacataggccagcaggaacctaatcacatgcaagttgtggtattggaaccaggtgaggtcgtgggctgcaacccgaaggtgcttggctcctttgtgctgcatgacaaactcaatccagaaggctgcttgatccaggggcttaattggcaaatcatggcgaattattgataacttcatagcattctctttgtagacagggtcattaatgactgtcttcagtgcattgagcaaatctgtacttgacatggtcctgatgtccacattgagggccttcatgtgagcaatgttatcaggttgatctgcaaacaaaggaatgcccaccatagggatcccatggtagattgcctcatagatgccactggtttcaccatgagtcataaaagatttagtttttggatgaccaagaaggtcattctgggatatccacttgtacagctgagtattggatgctaaagtatttggtctctttccatccacagaacctaggaagagggtggcaggtgtccctagttctcttctctttctagcagatacctggggtacatgagggagaaagagcatcctcttttcttcttccgtccttgcttccccgagtgctggtaaccttggtatgtgcttatattagctgccagtagacttgtcccaaggtttcttgctcatctggtcagtttcactttctctgctccagcagaccttctttgctcatgtccctgtcctgggcaccacttgtcactgccagttgctacaggattgaatgaagggggatgaatggagaaatgaagacagagacagaaagatctgttttaaaagaaggtgacagggggctccttgtttctagtgaacaagggatc

SEQ ID NO: 479343 - DNA, 866 bp, Homo Sapiens; identical to SEQ ID NO: 346903

SEQ ID NO: 479344 - DNA, 1000 bp, Homo Sapiens; identical to SEQ ID NO: 346904

SEQ ID NO: 479345 - DNA, 919 bp, Homo Sapiens
tttctcattataatattttatgagtacttttctcacaatagtattttatgagtattatttctcacagcagaattcagtagactaaaataggaaacaattaataagtagaccaacaaaattaaatagaaagctaaataatgtctacaggctaaaggaagagacaagagaaaaaattcacaatatgaaaaggtgttcccagcaaaacaattttcatgtgaaatttcccatgaaactttcaaaacttaagagacagtagccaaacaaagttgtcagaaagaatttcataagagttttatcataatatatgaataaaaatgtcttaatattctcttagtggaaaaaatggttatgtgttcttaccaagttgcaaaactaattctgggcctctgtgtctctggtagtactttgattcctggtgagaagtgacagcattctggcagtcctcgcagccctcgctcgctctgggcgcctcctctgcctgggctcccactttgttggcacttgaggagcccttcagcccaccgctgcactgtggaagcccctttctgggctggccaaggccggagccggctccctcagctcgcagggagttgtggagagagaggcgcgagcgggaaccggggctgcccggggcgcttgtgggccagctggggttccgggtgggcgtgggcttggcggaccccgcactcggagcagcggcgggccctgccggccccggcaatgaggggcttaacacccaggccagcggctgcggagggtgtactgggtcccccagcactgccggcccaccggcgctgcgctcgggccttagctgccttcctgaggggcagggctcgggacctgcagcccgccatgcctgagcccccgcccccgccgtggaattgatattccagtcatccagttcattcctggctcccat

SEQ ID NO: 479346 - DNA, 1000 bp, Homo Sapiens; identical to SEQ ID NO: 346907

SEQ ID NO: 479347 - DNA, 1000 bp, Homo Sapiens; identical to SEQ ID NO: 346908

SEQ ID NO: 479348 - DNA, 1000 bp, Homo Sapiens; identical to SEQ ID NO: 346909

SEQ ID NO: 479349 - DNA, 836 bp, Homo Sapiens
ttaaaaaaagattgaacttcaaaaccattttcttacatactcagtagaagttgttataagccaacattttttgtgagctatactattttaaacatctaaagtaaattatttgacatataaaaagacttcttcatttaaaaatatatcttttaaaaataattttacaagtgatggcatctcattttagaagaagaggcatcaatgacagcagttacagtaactcgatgctgaatatgtttttaaataccagatgctgtgttcagcattgtacatacattatcaaattttattctgataatatgctgcatgatgtattaggctgggttctctcagacagaacctacacgtatacatatatatatacacacatgcatatacctacacatacagagagagagagagagatgtacatttattataggaattggatcatgcgattatgcgggccgagaagttccaggataggttgtctgcaagctggagaaccagggaagagagtagagtagctttctccaagtcctgaagcttcagaactagggaaactgatggtataactctcagtcagaggccaaaggcctgagaactcagacagccactttgcaactcctggaatcccaaggccagacagcctggagtttggatgtcccatttttgttttatccatacccctgaccaattggatggtgcccacccgcattgagggtgggtgtccctctattaaatattttaactataattttaactgtgatataggcactgaattcttgttgctaataatctggtaagatccatctgaactatgaagtgagtacctggaggaactcctacattttagg

SEQ ID NO: 479350 - DNA, 721 bp, Homo Sapiens; identical to SEQ ID NO: 161513

SEQ ID NO: 479351 - DNA, 1000 bp, Homo Sapiens
aaatagaatttttcagattattaaaagctgaaggatgcccacgtaagcaaaaaaaaaaaagaaaaaaccaacaaaaataaacccaaacccctcaaacaatttcgaacacgaaacattcttctgatgccggcatccctgcttgcaggtgtgaagggggcaggaatcagcgaggtgtcctgggctgagtccccggagtgggaagaggtggcaggaaggggatctgaggaggagaacaggggtcctggtggtctgtgcttcttcccagacacgggagctgtagaggagacttctgcagcagatgctaggggggccagtaggcccaggcagtcttgggacttgggtctgtgctgctgtgcatccatagtgggtgctttagaaacgggaggcccacccgaagcccctgttgcaagtgaggacaaagtgtgggaaggccgtgagggtctgcagtccgagatggccttgtcctcaacgtgcagtgcactgttgatgcggggcctagaggcctgggatctgggggagccacccctgggggcgagtgtctgccctggtgctgtacctgccttgttttcacagcggtgacccgaagagacagcctgaggtccgtcctcactcactgtgtttgaggaactgtgggccagctggcagtgggatgaggctggccccctcctccgctttacttcctggaggccttccgtagagctgtgggagctggagctggcatttcgtttgaggcaggatctggtccgggaggtctgggatctctggttatatctcacttctgacctctgggcacgtgctgcagctgtggctgaggccaagaaatgtgaggggcctccatccactgcattgagtagcgaccccgacgtggggttcaatgtggaggggggaagggctgctgcggcagctgcaggagccgaggtgccaggccttgttcttctcatgccggcatccctgcttgcagctgtgaaggtggcaggaatcagcgaggtgacctgggctg

SEQ ID NO: 479352 - DNA, 1000 bp, Homo Sapiens
aaatagaatttttcagattattaaaagctgaaggatgcccacgtaagcaaaaaaaaaaaagaaaaaaccaacaaaaataaacccaaacccctcaaacaatttcgaacacgaaacattcttctgatgccggcatccctgcttgcaggtgtgaagggggcaggaatcagcgaggtgtcctgggctgagtccccggagtgggaagaggtggcaggaaggggatctgaggaggagaacaggggtcctggtggtctgtgcttcttcccagacatgggagctgtagaggagacctctgcagcagatgctaggggggccagtaggcccaggcagtcttgggacttgggtctgtcctgctgtgcatccatagtgggtgctttagaaacgggaggcccacccgaagcccctgttgcaagtgaggacaaagtgtgggaaggccgtgagggtctgcagtccgagatggccttgtcctcaacgtgcagtgcagtgttgatgcggggcctagaggcctgggatctgggggagccacccctgggggcaagtgtctgccctggtgctgtacctgccttcttctcacagcgggtgtgacccgaagagacagcctgaggtccgtcctcactcactgtgtttgaggaactgtgggccagctggcagtgggatgaggctggccccctcctccgctttagttgcgggaggccttccgtagagctgtgggagctggagctggcatttccttggaggcaggatctggtccgggaggtctgggatctctggttatatctcacttctgacctctggacacgtgctgcagctgtggctgaggccaagaaatgtgaggggcttccatccactgcattgagtagtgaccccgacgtggggttcaatgtggaggggggaggggctgctgctgcagctgcaggagccgaggtgccaggccttgttcttctcatgccggcatcgctgcttgcagctgtgaagggcgcgggaatcagcgaggtgacctggg

SEQ ID NO: 479353 - DNA, 1000 bp, Homo Sapiens
ttagaaaccttggagtacttttcttagtttatactcgtggtggtttccttttgtctcctttattacatgggactctgacatgtgcccatagctagggtgacagtaggatctacccgatagtagggtggcagtaggatctacccaaaaagcgtcctgctgatacaggaccaaagcatcctgttgttctcgagcacgaaacattcttctgatgccggcatccctgcttgcaggtgtgaagggggcaggaatcagcgaggtgtcctgggctgagtccccggagtgggaagaggtggcaggaaggggatctgaggaggagaacaggggtcctggtggtctgtgcttcttcccagacacgggagctgtagaggagacctctgcagcagatgctaggggggccagtaggcccaggcagtcttgggacttgggtctgtcctgctgtgcatccatagtgggtgctttagaaacgggaggcccacccgaagcccctgttgcaagtgaggacaaagtgtgggaaggccgtgagggtctgcagtccgggatggccttgtcctcaacgtgcagtgcactgttgatgcgctggaatgccgtctctttttccaggtgcaggtcttcagccgtgacccggtaccccagctctaagggaggtggcagcatcaaaggctcccctcgcctgcgtggcagcaggggaatcttgcgtctacggggcctagagtcctgggatctgggggagccacccgttggggcgattgtctgccctggtgctgtatctgcccccttttcacaccgtgtgtgacccgaagagacagcctgaggcctgtcctcactcactgtctttgagtaactgagggtcagctggcagcgggatgaggctggccccctcctctgctttagccccggcaagcctcccgtggagctgtaggagctggagatggcatttcgtttggtgctcgagctcgtccaggatgtctgggatgtgtggttatatctgatttctgagctc

SEQ ID NO: 479354 - DNA, 1000 bp, Homo Sapiens
ttagaaaccttggagtacttttcttagtttatactcgtggtggtttccttttgtctcctttattacatgggactctgacatgtgcccatagctagggtgacagtaggatctacccgatagtagggtggcagtaggatctacccaaaaagcatcctgctgatacaggaccaaagcatcctgttgttctcgagcacgaaacattcttctgatgccggcatccctgcttgcaggtgtgaagggggcaggaatcagcgaggtgtcctgggctgagtccccggagtgggaagaggtggcaggaaggggatctgaggaggagaacaggggtcctggtggtctgtgcttcttcccagacacgggagctgtagaggagacctctgcagcagatgctaggggggccagtaggcccaggcagtcttgggacttgggtctgtcctgctgtgcatccatagtgggtgctttagaaacgggaggcccacccgaagcccctgttgcaagtgaggacaaagtgtgggaaggccgtgagggtctgcagtccgggatggccttgtcctcaacgtgcagtgcactgttgatgcgctggaatgccgtctctttttccaggtgcaggtcttcagccgtgacccggtaccccagctctaagggaggtggcagcatcaaaggctcccctcgcctgcgtggcagcaggggaatcttgcgtctacggggcctagagtcctgggatctgggggagccacccgttggggcgattgtctgccctggtgctgtatctgcccccttttcacaccgtgtgtgacccgaagagacagcctgaggcctgtcctcactcactgtctttgagtaactgagggtcagctggcagcgggatgaggctggccccctcctctgctttagccccggcaagcctcccgtggagctgtaggagctggagatggcatttcgtttggtgttcgagctcgtccaggatgtctgggatgtgtggttatatctgatttctgagctc

SEQ ID NO: 479355 - DNA, 1000 bp, Homo Sapiens
tcagtaccaggcggcggcttcaaagccgaagtgatgtttagatgtaaagtgaaatgttagttggcggatgaggcaaatagtgaggaaagttgatccaatgatgacgtggagtccgtgaaagcctgtggctacaaaaaatgttgagccatagatgccgtcgtcagagatggtaaagggcgtttcgaaatactctgaggcttgtaggagggtaaagtaaacacagagccttattttctggttgaataccacaaaatgctgctgctgccccttgtctgctgcgtaggtggagttggtcacaaaggtcacaggctgggaggggtccaaggctttggtgtgagcaatcaccatcttgaaggagtagccggcagattccaggaaggacgcaggctcgttggccacggaccacatcaccatggcggggtggttcttgtctctgagcaccggttcagcaggacactcatcgatgaccacaatcccataccggtaacatatctgcagcatctcctccgtgtagggatagtggctggtgcagaaggtgttggcgccaagccagcaaagcaggttgaagtccttcaccagcagcggacagtcgaagcccttcccttggatgtccgcatcctcatgcttgacgccgtggaaatagaaaggtttcccgctgatgaggaactggctctcggtgacggccacagtgcggagccccacagggagtgtgtagaagtcaaaggccccagtgacttctgtgcagtcagccacacctacgacagccaaagtgccaggtgtgagcgccccgacagcctgagccccatctggcctgccctcccacgagtacaggtaggcggggtgttcgtgcatcaggtatggccaccagaggttggcacccagcaccttcagctggccctgggtcccagcctggttgtccacgaccttgttttctgcattcaaaagacacacttccaacttgaactggttactgcacttgacggagatctggtaattcacc

SEQ ID NO: 479356 - DNA, 863 bp, Homo Sapiens
ctactggtgccacacagaggtcagaccaggcctgtagcctcgttttttttgcttcgttgccaatacaactacatacatcacccagctgacgggccagtgtggatctgtcacgtggtaatactgacctctaggggctggctttccttcatatagagtctttatcttctcattgagttccagaactgtgatggcattagctgttgccaaatcagtctgtagttttttcactttcttttcatgctttagtttctgggctataagttgctcctgggaagcttttacttcagcttgcaatttctggatgcactggtctttcacaagaaccattttttcatatggtcccccactggcttccttgtggtccacagcctccagtttttcctccagccgggatacttgttcaagcagttttgattttgttccttcagagactgaaagctgttcagataaagctttagccttttcttctgcttctttcaggcaaatctccaaggactcaagttgggccaaggtaaacgccatctgtccagtatccagggacgctttccattgtaaattggaaggggatggattctgaactccaggaagctaattgaagcccttggcagaaatcctaaaggtagtaggtaattggcaccttgtccttttcagtgtagataccgtccatgagagggttacctctagggtgctggttgattagcatccgatactttgttttcttgtggtatatctgactctgaacttccagacgtcatgctgcttctctctgaggtgtcagactctgggaccacagatttcttgctatagcattgtcccatctcaagccagacccactgggatcccctgtccctgggacagacgtc

SEQ ID NO: 479357 - DNA, 1000 bp, Homo Sapiens; identical to SEQ ID NO: 346912

SEQ ID NO: 479358 - DNA, 804 bp, Homo Sapiens; identical to SEQ ID NO: 161515

SEQ ID NO: 479359 - DNA, 1000 bp, Homo Sapiens; identical to SEQ ID NO: 346913

SEQ ID NO: 479360 - DNA, 833 bp, Homo Sapiens
ctatgaggggtctctgtttctactcttccagagcacaccaccacctgcagctgtctcctgcctccagtgcatcagagtctggagcgcgttgcttctctggagggagataaagacacagtggctacctgcctggtgctctgggatgaatttctgcacagatgcaacctctgtgggtggaagccaggatgaagtatatgcatctgtgaagactggccttccatctgttttctgatgcaaccaaaatgcttcagggctcgtcttatctggaggtttgatggctacagacgtgaggggcttccaggtagagctcagacctgagacttctggtcccctgtctggacatctgtatgaagacggagaagcaccagccaacctctccacaaccctcaccaagttctcatggaacatcctctgatggtccctctcggtgctgggttctatgcacccaaacaccacctgttcccccaaaacctcttcctccatgacataggtgagcagtttccagtcccactccactgtcttggcattggctggatgtagccgttgaattttcatgagaagcatgtaggcctcctttaggacatccacagtctcagagccactgagcaagattttctggatgatgtgagccacgatttctcttggtgggtaatgcattcttagtcttcgatgagggatgggttctaatttttgacccttgttcacggtccggcggggcagcgcgccggaggttcgcgacagggcccggcgcagcctccgcgaccggcccgggcgggcgcccccggagctctcagagccgctgtcgtccgagatcacgatgtaatcctccatgg

SEQ ID NO: 479361 - DNA, 719 bp, Homo Sapiens; identical to SEQ ID NO: 346914

SEQ ID NO: 479362 - DNA, 1000 bp, Homo Sapiens; identical to SEQ ID NO: 161516

SEQ ID NO: 479363 - DNA, 1000 bp, Homo Sapiens
tcaccggggcttctttccagtgtggatttgctcatgtaaaatgaggtgtgagctctgcctgaaagcttttccatatgcatcacatttgcagggcttttctccagtgtgggttctttggtgtctcaaaagatgtgagctgttactgaaagctttcccacacacatcacactcatagggcttctctctaccgtggattcgctggtgtccaacaagagctgaactgtatctgaaggcctttccacgcttgtcacattcatatagtttctttccactgtggattttctccagcaaaaccactgcctcctctccattctttggatgatactcatgcatccaggccaggagctcctcgggcagaatggccaggaacagctcaagcaacagcaagtctaacatctgctccttggtgtgaatctcaggccttaaccactcacagcagagcttccagagctggctcaaggcctcacagggcccaggagtctcccaatcggcatctttgaaagacatcttcacttcctgggctctaaggattaattcagggacttctggagcaggtttggagaaaggcagactacaaacactttccctgtttattctgtaacataaacgaaatggcagatcatcagtggacaaccataacgagcctcggactcgggaagatctggctatgttccttaagccatcagggcctgacagatcacaaaaaacttccaatagtcggcggtcacgttggagaaaagggtggtccgcatagaccgaccaggtcggcatctgtgaaccagagtcggacttcgcaacgtctggggaaacgtccggcccgcgtgggggagctgggctccggttggctagggcaaccccgcggtgccagggccgggacacccaccagtctgccccgtgcagtgtctcggacggcgcttccagcgcggggctaagcaaggacggggctcctcccgcccgcacctggctgagctgggggactcgggcggcggcgtcctgctct

SEQ ID NO: 479364 - DNA, 1000 bp, Homo Sapiens
tcagggtggaggtggtggggggagcacacggagagaaggcggtgtcagagctttaggggaacaggacgtggggccagcgccctggggtggtggcaggatgcccctttgaagaccgcaggagccgtggcggtgcagcggccggtggctgtggcccagacacccctcctgccggtggacgatgaggaccggaaagtagagggcgtcgtggtagggcggcggcggcccggcctcctcctcgtcgtcgtcctcgtcgtcccccatgctggcctggctggacagccgcgtctgctccgtggggcagctggcctcgttgacgctcccgctgcggctgcgccacaggcagctgcgccgggagccgtagagacggcccagcgagaagcgggagggcgcgtagccgccgcctgccccgccgcagcgcgtcccgagccccgccaggtccatgagcaccgcctcagagtagctgggcaccagctgctggttggagcggatgtgccactcgagctccgtgctgtctactgtgttgacccgcggcaggcggtgggtgagcgggggcagcagctcatcgctggggctgaggccaccgcctgcgctgctggccgagcccgggccctccaggccaaatagcttctccacgtggtagtgcgcgtaggccgtgcggtactcggccagcactcgcagcggccacgacagcgtgagcagcgccgcggcccagaaggccgacgagcaggcgtaccagggcggccgggccgggtccgggaaggccaccatgaactcacggaagtccacgttcttgaggtgcatgccctcgcgtgcctccatgtagtcgtctaggccctcgttctctgcgaagaagcgcgcgcgctggcacaggtacgcgttctcggcctccacgctggcgaaactgaagcacttggtgaagcgcagccgcgtggccggcgcgccctccagccccaccagcgtcttggacacgtcgcgaacgccgcagcgcgcgtagtcgaac

SEQ ID NO: 479365 - DNA, 1000 bp, Homo Sapiens
ttttttttttttttttttttttttttgagtatcctacatcagttttatttaaaacacaaacaagtatttctctttctgtaagggcaaatggttcaaataatgcggaacacgaaacattgactaataccagtttattttttaaaaaagcaaaagaataaagaatatctacaaaagggacctggaatctgtaagctgattccaaaagcgaaataagtagaaaatccgtggtgaaacctgaacattctacccctgctttggagaagggctatcatacaacattcagtcagctgaagatggattggtagaggtgtgtcgatacataaatttcaagtcatttttgcttgtgcagaatcatcccaatcttaacaagactgaatgggcagtcctgtggctttcttccttttccatattcccaacaaggctacgtgaagttcaactcttgatgagccgcttacaacagcagttccttaggagccaacatgacaggtgggggtcagatttccctatgagaaacaaaactggccacctacagcaaaatatcaaaatgggtaagtccttccttcctcttcctcctgattatatacaacatatctcctttcaagactattatttccatcatgcttattccttcacaaatctaaaccttgaggtgatatgaaggaaaccaacatcaagaaaagaaaactcaattcagaaatgaagaaaactggcaggtatacaatatacccccagagcatctcaatatccctggcacagtacaattcagtgtactgctacagcccatagataaatattggcagcttgaataagctcattttttccctcaggtggttaaaggccaccacataaatactgggcaacaggggtttgttgggagaattagaaataaaaaattaaccatattttgtccctgtgttaattcaatgccagcaaggaggcaagtactgaagaagaaaagggacaattttcatactaaaaaagaattcctctaatcatgtca

SEQ ID NO: 479366 - DNA, 1000 bp, Homo Sapiens
ctagaggccacttgctctcaacaccagggtgctcaatggcccgtcctggtactctgctctacactggttgtaggaaggaattgcgttgttctctcctgctgcaacgttctcactccacaatcctggggcagggaggggaggcccagctgagtttggatcataatcccaggtcagctcctttctgcccactctttcagcgcaggcgtgtcctgctgtggaacacactctgggattcctgtgtgggtctgtacccatcctgtacccgtcaggacccccgggccctgactcttgatgttgttcttgctcctcttgttgatcttgttgttcccacagtgaggtccagtccagagagtatgcaagcacgaccacgtcaacaggccctgaagtcacaggttcacacagcacgttttctgctccatcacgtgtatggggcagggggcagcagagctgggggagaagagataaaggaattatgtcaaacagggactgtcttgtctgccccaagggcctttcctcatctataaagcagatttttcttgtagagcacgacgagagtgtctgaacctgatggagtctaaatgcagtgagcgggtgccagccttccctggagctctgcagaggcaaggagggggtggatggaaagacgggagtccctccccttaggtgagggggggaactagggcccggggagatgcccaggcctggcggccggcgcacgcgggttctctgtggccagcaggcggcgctgcaggagaggagatgcccaggccaggcggccggcgcacgcgggttctctgtggccagcaggcggcgctgcaggagaggagatgcccaggcctggcggccggcgcacgcgggttctctgtggccagcaggcggcgctgcaggagaggagatgcccaggcctggcggccggcgcacgcgggttctctgtggccagcaggcggcgctgcaggagaggagatgcccaggcctggcggccggcgcacgcgggttctct

SEQ ID NO: 479367 - DNA, 1000 bp, Homo Sapiens; identical to SEQ ID NO: 346917

SEQ ID NO: 479368 - DNA, 744 bp, Homo Sapiens; identical to SEQ ID NO: 161517

SEQ ID NO: 479369 - DNA, 1000 bp, Homo Sapiens; identical to SEQ ID NO: 346919

SEQ ID NO: 479370 - DNA, 1000 bp, Homo Sapiens
attgtatttctgcattttaatttatttttcgtttctgtttctcacttaccaacacatgtgtaaaatgtagcaggtgtgttagtaaaggagaagcagctggggggagaggggcaggaattaagcagccacatgtgaagagtcaggtcaagcaggaagtgactgggggcagaggtggcgggcagcctcctccctgccccaccttcccacaaggcaccagcaactgctgcagctcacaacccctgccccagacgacttggtgaacgtggtaaagagcattgctcccaaacgtcgtctcagatattctttccccagccccagcaatggcacagtgtctgaggacgattcgatgccttggtcagtttctacatagtgcaaacaagtttgcttcctccccgaatttctccttgcgatcattttcaccaggatcgaagattttccacgtgtgtctcaccacgtcttgattccctggtgggtgtccagtcctcggccagtgtcattaatcgtctcgccactgggggtttttcctcgttcgtagtaagtccagttttcccggagggaaaacctttggcagacccctcaaagggcagacaaacgtgtcccgtgtgctgtttcagccccggtccacttctcttttggcggatggatttttctggcggtgaaatctgtgaacctggtattttctcagggaatccggaagatgatgatgatgatgatggtggaagccttttactccagggatattccaggacgcctccagcgcccatgaacccgggtcaaggagcttttcaggtggaggcgggtggggggtcccctcccggccaggcagccccgatcacggccctcacagcgccttgtctgcgggcgcagtggctgtagcggcctgctccgcgcgggctgggccaccgagggccgccggccgcgaggcgcgcagcaggccgaggcccctggagcggcccgcgccgtgcagctggcgctcgtggcggcggatctgcaccttgtg

SEQ ID NO: 479371 - DNA, 1000 bp, Homo Sapiens; identical to SEQ ID NO: 346920

SEQ ID NO: 479372 - DNA, 1000 bp, Homo Sapiens
aaaagtcccaccagtttagtaacaaaaaccccaaaagtgaaaactgagggggcagaggaagagaccccgggtattgctgttgctacgaggtcggggggcagctattgtcctgtggcagccaccgtttgcctgggtcggggaccctcatttcttctggggtgtgctcagcttctgcatgccccagatcttgtccaggaggccagagacgaaggcctctgtgggtgtgtaacagtcaaccagcagctccttgaccctggcagcccaggcatcgtcagtctccatgtccaggagctcatccacatcaatctccagttctgggatctactcttcctggcagtcgcagaggcacgtgagctgctccaggatccactcctctaggttgaggcgcttccgtagctccttgccgtcatacttgacggtgaccttcccttggcgcctcactgggctgtctcctgcggccccagaggggctctgaaagtagacgcgtggtcctgggccgccactgcccggcccgggggccagggccgccaacgcagcgcccccgcgcggtgccgctgtccgccttggcggccgccgggaccacgagcacgcgtcgggccgttccctgcgccgccgccttcgggaggccggccggctggctctggttaggtccccggctcctctccatgctgctcggcggcgagggcagcggcgggggcacccgggggcagctgcagcatgcggagcccccgggcagggcctggccgcgccccgctccctccccgccgatccgcctgccctttgtccccgtgaccgccaccccttctgtagtctccattcaggtatgattggcccgattatagctcgtgtcctgaaaaggacataggaggcttttttctccaactcgtaagaactgatgaagtgtcccccgcccgcgctggccacctccgggtggaccctaggattccgtagccgccccctagccccgcgcctgtgggtcccttctccgtggggcctctgg

SEQ ID NO: 479373 - DNA, 1000 bp, Homo Sapiens; identical to SEQ ID NO: 346921

SEQ ID NO: 479374 - DNA, 874 bp, Homo Sapiens
cttccagcatgggcgttatggccaccatgaacatgtcacagcgctgcagagattttgtttatggccagttttggggccagtttatgtccagatttgggggcctattccccagcatatcccccttcttgtttttgcagggcaataaaagcaaaggcagctttatcacggtgagctacttctcgcaggagtcaggatctgcatctgcagaagcaatggtgatcaccgctctcatagctatcattaaattactcattgtgactggttgtcccgctttcctcaggttttcttccaccatctgtgacagcttcttgatctttccccaagtaggtggctgtgttcgacgggtgttgctcgtgacagttggggtcctcctcagcatcagtcttgacatggctgcaactggggggtcctcaggattctcccagaatctcttccacagcatctggctcatgataaggttttaggtgtcttgatggtatctaaatcagctgctggttctggcctgcggcggtgggtcgtagggtccctggcttgtggagagaggttggcgctgttccttggctccgctccccaaagggcaaagcgccaggaagtcgggctcccggcggtctccaggctctagcccacccgcgcccaggccgcacccaccgcgtcccctccgcccccacacagggtgtggagcgtcccgaccgggcgtcagcgggcagggccatgcagctcctgtggacgcccagaagcgcggagccccttcccactagggcctggagaccactctaaactggctcggcggccctgggactcgggctccggctcccgtggtctaacccctcctgggggctgtgtcctcgccggacgccaggtcgctggagacctc

SEQ ID NO: 479375 - DNA, 1000 bp, Homo Sapiens
ctacccctttccagccagcaacacacaggaactggcggggaggtcgcggttaccaggctccactctgagaagactgcccagctccaggcactgtacagcccttgtgacgtgacagaaggcccgcccctgtgacgtcaccgaaggcgccccccaagatgtcgcaaaggcccgcccctcacgcagagccaatcggaactccaggtgctgggtcttccaggagagcgcctgcgcgggagggtgaccacaggcggccgggcgggatgtcctgtccgccgtcttcagcccagccgccaccacccataagctgaaatctttgttggtgacaggaaatatgtcgatagcatagggtttcactgttgcctcccacacagggccttcaccatctctgtcatctggagaatttgttcccatcaggaatctcccacctggcagtgggaccatgctagtagcctgtccatttccacggtggcagtcgcctcctccacacatgcgcatgctgctccaccaccgcccctcacccaacggttcagcgggggaaactgacggacacgaggtgtaggactggccataccacctgcaaggctgataaccgtagcccttagccaccatgccttccagctctctcaactcccttgcctctagtttactcctcttcccatttcctacaactttgtagggggagcattttagcaaagctttcagagaagacattccagctcgcatgatctcatcaaccaagagaatgttggtggcaatcagtgctgtgttcaggtccacacccacgagctgacctgattctgaatgttctgcttaaattttaactaatgtttcctgaaggtcaaaaccagaattctgagcaagaaccttgggaataacgagcaacgcatcagcaaatgcttggactccaagctgtgccttgccctttacactgagcttatatttattcagggcttctgccattgccacttccacagcaccagcacccggaaccacacagcca

SEQ ID NO: 479376 - DNA, 1000 bp, Homo Sapiens
tcaattcaacctttcagagaagattccagctcgcatgatctcatcaaccaagagaatgttggtggcaaccagtgctgtgttcaggtccacacccacgagctgacctgattctgaatgttctgcttaaattttaactaatgtttcctgaaggtcaaaaccagaattctgcgcaagaaccttgggaataacgagcaacacatcagcaaatgcttggactccaagctgtgccttgccctttacactgagcttatatttattcagggcttctgccattgccacttccacggcaccagcaccggaaccacacagctgcatctttgatctaagtgtgggcttatttggtcctttgatcaataatgtgacagaacgagggttgttacacttctcaataaaggtgaacttctccctttgtgtagaagaaacatgattttcaaaaacacgatgtgtgcaaagagagaagagggacaatgtatactcatatacaagtcctgcatgtctcaagcagtcaggacttaggtcctcaaaagaattcagggccaccccaccacaagcaagagtcagcacgttacaaatgaggatatatgcatcctccacccttttcttcctatcaagatgctctgttaagacatctgcaagttcagcatgaactttagtacaaagagatgccctggccacatctttaagtgtttccttgtccatctctctgcttactttgacttcatcaccagttatatcatcctgggctgttgctacctttgctattaaggaagctgttgggtgttgaatttgcccgtccccgcagagattgtgcagagtcctcagggtgtctggaagcccaagaaggcggggaacgccgcacactagagccgcttttttctccatggagacggcatcgacgcaggaagaaatggacgcaacggtggggatctttatggtccctttgggccccaggttggtcctcagcacgtcctgcagaccccgcgccccgctaatgttgaac

SEQ ID NO: 479377 - DNA, 1000 bp, Homo Sapiens
ggagatggagtttcactctttgttgttcaggctggagtgcagtggcctgatctctgctcactgcaacttctgcctcctaggttcaagcgattctcctgcctcagcctttcaagtagctgagattacaggcgcctaccaccacgcccagttaatttttgtatttttagtacagacagtgtttcaccatgttggccaggctggtcttgaactcttgacctcaggtgatctgcccgccttggcctcccaaagtgctgggattacaggtgtaagccactacgcctggccaagcccacatttctaatcacaacgtaagctgcctctgagctccacggagaaggaagaagttgtctgataaaagaatctttttattgcttctgtgcctctgttacattttagaatgttttcgacaatctcaatttgcataccgctttttagaaatgtggctactacaaaaagcatctttgtactggatgcgagaatacaaaaattagcccacgtaggggtgcgtggctgtagtcccaactactcgaaaagctgaggcagaaaaatggcttgagcccgagaggttgagactgctgtgggctgggctggccccgccgtggggccgcacggggacggacgcgggtggacgctgggaccgagcccgggcgcccatggctggggctgccatggctgagcggggccacgtgcctccccctcgcgcccgcgcccgcgcccagcacggaggggctgccgtgcgccttcctgcagagcctgcgcaccctgttggacatcctggacgacccgcggggcggctgcgtgcacctgcgccagagccagtcccgctggcggggggccgacacgcgggagctgccccgtgggatgctggagggcctgcgccaggtggcctcggccagtggctgcctgaccttcgagcgctttgtggccgacctgcccacctagctgctgagcgccatcggctgcccccgggaccccacgtgcgccccggcccagcctgggg

SEQ ID NO: 479378 - DNA, 710 bp, Homo Sapiens; identical to SEQ ID NO: 161518

SEQ ID NO: 479379 - DNA, 1000 bp, Homo Sapiens; identical to SEQ ID NO: 346923

SEQ ID NO: 479380 - DNA, 982 bp, Homo Sapiens
tcaggctgtggtgcctccattactaatctcctgcttcctgagtttggggcatgactgctggatccccaagggctttgtagcagggggctcagggctcctaatgggacacagccctgcctgctggtaaaagtagggtggctggagatccatgaacaccatggagccagggaaagctttctggcaggagaagaaagctgccatattaagctcccttttcagcacctggaactgggacagttcccctctcagcgacatcttcccatcccctgttttctcagcttcctctgatatagcccaccctggctgcccaggtcctgtcgcagaccccccactccctatcagccacctccccttgttgtgccacactgggaaaggcccaggccccacctgtgctgaaagggcaatgcgtagggcatgccactcatcctgacggatggtcttcgtgatattgaaagtgaggttcctggggatggttgctgaggagtagtggtatttgatgtacgtacatcgctcaatttctcctttccgaatgagggcggcgatctcggggtcgaagccctgccggtggcacttcctccagaggcccatgttggtggagttgtactgccggctgcactcgtccgcggggctcatggcgaacagctgccggcgattccgggcccggaggagtttgccctcccagcggtccaggcgcgagcggctcgcccggagcggcaagttgttgttattgttgtaaatgaagccggggtcgacccggcgggtgttgaaggccttgcacctgtccctgtgcttcctggcgtccgtctcgtaccagtggtccgagcagatggccacggccagcatgccgagggcgcagagcgctagcgagaggccagtgtagagcagtaaccttccggcagccatgcctccgcttggcggctacaccatgggcatgatccgccgcagcctcgccttccctcgccgcacccggaacaaagcggcg

SEQ ID NO: 479381 - DNA, 911 bp, Homo Sapiens
gtaaatacagatgaagctttatttgctcacccgctgctcacatcctgctgtgtgttctggttcctaacaggccatggactggtacccccatattaaatgataccacaggaaggcaatcaatttgcctttccaggttttcaccattgcgcttcactgtgcctggaatcctcctcccacagatgcacacatggctcattccctgacttccttgaggtctactttcaaagtccagactgaagtaaactgttcaacaaagagtagctggtgtcttcaacaacagcaacaaaactgacatggagtgggatcttgggcaccttcttagagaccttgaaccggtctctgtccccataggtgtcagtgaagtacactccggctacacttgtcaccttgttcccagggaacctggagagcaccttgtcagggccgtgctggctggcccagtaccaggcctggcccccgattaacaagccccctccatgtttcacaaactggatcagcgttgcagtcaaggtgtcattgtaggcattgatacagtaaacccctaggggctctcctggttctggcttgacctgtgcctcaagcccagcatcctgtaggatgtttactagaggtgccagggatggatgcactcccacgggagccccaggacagggacagagccagctcactgcattgaggagaaacggagccaagccagcatgcgacaggtagccctcatgggacacaaccacgaggcggcctcggccgtaggaggaggcagcaatgagcacctggcccttgtcattcaccatcacggggaaggcggcttctccaataagaaggagttcactggggatggggcctctggggacatcccagcatgtcactccatccatgagggcctcaaacgcagcagcagcaatggtcgccat

SEQ ID NO: 479382 - DNA, 1000 bp, Homo Sapiens; identical to SEQ ID NO: 346924

SEQ ID NO: 479383 - DNA, 1000 bp, Homo Sapiens; identical to SEQ ID NO: 346925

SEQ ID NO: 479384 - DNA, 1000 bp, Homo Sapiens
ctgggctcaagcgatcctcccccttcggcctctcaaagtgctgggattattggcttcagccaccatgcccagccaaggaccttgtctcttgtgaagtactccagaacaaaacatcatcctctgcggtcgccacctgtctgggtgccggtctcctccctgcctggccgcggcgcgtcctccccgttctcgcagtcctcgggctgtgcgcttcccccctccagctacagccccagcctcttctcttcgggagggacgtcgtcctcctccctcctgggccggccatccctgcctcggggcttgccagtggcttcggagctgccggaagggctggccatggctcgggggctctgccctgtgtcttccatgatttggaggtggtgggaaacccgaggctgctcaaaactcgtggagaattcctccaggagggtccacagcttcattcttgaagtcagtgagaccaagaacccaccaattctggacacacttatacacttggcactgggaggtttattgtagttctcatagaccagggtttgcatgttgctgtctagagccctgatctgctgcaccatgtccgtctcactatccatcagctgggccagagggcactctctaggaagcttgtctaggtaaacttccgggtcgaagtgcaccccgttcagatcagtggggtccaggggttcggtccccgcggggagtcccaccgcctccacttccgagaggccgttgtaaaacttcagcatcctgtccgccttccaccgacgctccttgagcctccccctcgggcccttctggggagtccccaggtccacaccccgggctaggcccagtgacagctgccgccgccatagctccaacaaattagagatttccacattcttgatgatggttaattgtaacacaatccaactgtgcagctgggaatccaacaggctaaggaaaaaggacaccaaaacgaagaagacacagaggtgaggattcacgatgactgggtagtgca

SEQ ID NO: 479385 - DNA, 1000 bp, Homo Sapiens
aatatgtcatctttttgagaattttattcacttcaaaacacattaaacacacatatgtacaaaggcattccagagcccagttttcgaggctgaggaaagaccccgagagcgcttcgcacagcacgcttcccagcgtccgaaacactgctctcagggcggggcacagcggaagggctgcacctctcagggttccctaacttttcccttattcagtcatctagacagcaaatacacagtaattccccagtttcctattgacgtcccagcggaagtctgactcctgcgcgtcacgcagtttctgaggcaacgaatctctggcacggaagcttttcctggcgcgtttcgggagaaccacgccaactacaacgtccctcaccagaattcaatgaggcagagtccctgcatctgctccctgcctggcctgggctcccacatccacagaagcgccacagccggggagcttcggagtcaccgcacagagtgtgctctctgctctgcgctcctcagtcccacagtcccctccaagtcacgggaactggaggccaaggagcccctgccacctgcagtctcactccaggtcagaatcgctgtcctctgaggaggaggaaacctgaaggtcctcatagaggacgctcggtgggacacgaacacagggagcctcagacttctctgacacatgagggctctgagcgagaaaggctcccggcttctcaggagagtgaaatgagggggccgccaggaggctggagctccagcgtccgttttccagtctccggaagagcactctgagaggctgggccccatcatggccggccgctgagtgatgggacatggtgcaggcctgggcagtaggcaggcaaggtctgctgtgcggaggctgccggtcgacgctgggcacctgggccggtgtcctcctgcccatctggggcgacgtacttggtccaagttcggttgcggctggcggaggttggagattctccggggcccccagctcacctcc

SEQ ID NO: 479386 - DNA, 1000 bp, Homo Sapiens; identical to SEQ ID NO: 346927

SEQ ID NO: 479387 - DNA, 627 bp, Homo Sapiens
acaaagcaatcctccttaataaaggtgacaattgcttcactcaacatttttaataatgcacattaaaaaaaagttcatcttacaaattcttctgcaatccaaacatacaattgcttggagaacaacatttagaaaacaaaagccaatgtaaaaagacagattaaaacaactagaaaagtacaggttttgtttgtatgactcggattttacagttttcttactgcatcatcaatgacagaaatctgttccttcagctggctccattgttctggatttaaagcaataccttttcttcctggtttcatttcgccttcaggatccatccaatattctctagtatcaattagcactttccctttaaaatctccaacgctaacgtacctcattttcccaatctgaaacttgttatcatctctgctgctgccgctctgtttagaagatgacagagctctcgaagtttcacctgtcttttgcttctttacaggtttttctggagcaacttgctttttcctctttaactttttgtcaacctcactgtcaggatcactgccagaagagcttgaagaaacaagttcctttgatttaggcatcgcttagctcagctctagcagtcgaacacctgggtgg

SEQ ID NO: 479388 - DNA, 1000 bp, Homo Sapiens; identical to SEQ ID NO: 346929

SEQ ID NO: 479389 - DNA, 1000 bp, Homo Sapiens
tcacacatcagaggtccgtatgttttcatcatcaaggttgaacataaacggcttctccttggggtgctggggctccgatctgtgccttatccgggagctgggcagcaccccaggaggcgcgccctccccaggacgaggcgtgaacaaggagtcctctgaagtgtctccaggtggaagcagcttctccccagcctgggggacaggtgtccagggctgccaggaggaggccacagagggggctttgcagagggctttcttttcctccaaaggtggccgccccctgcacaggatagagttgggcccacttgaaaggctggagcttccaggtcgggtcaaagaaatggatctagaaaaggacgtttctctggggtggcacttgagggcctggacagctgcgccaatctccttaatccagctgtgcatgtcttctggactgtctgcctgtacgtagaaggtcctggagcttgttattatttcaaacaggttgtccctcattaagagatcaccagacttgaccagacattcatgggtcttcagaacatccttaagaaatatggtgcgcagtggttctcggtcctgctcacacttgaagtagcagatggtaaagtcatcaagtgcaaagaagcgacgtttccagctcttccgcacattcccttgcttcacgcagtaaccactcttaatgaggggaggcccagtggaagcacggcagcctgacgtggggatgtaactctgagaccttcgaaggatggtgtgggacccgggctcactcccttcctgcccatccccaccgttctggctgatgggtgtgtggaccaccacccctccaatgatctccgtcttgtaggccacctgtggcttcttctccagggctggaggagctgctaagctcttgagaacttcagtggtcatgggtaggcccccacctttgggaacggtgatcttgctggcttggttcagggcttcaacccagtccttcatatctttctgatcattggcttga

SEQ ID NO: 479390 - DNA, 387 bp, Homo Sapiens
ctactctgaagcctttgtaggggcctgggcacctttgggagcctgagctggaactgaagctggagctgcagcgtcggccttggtttgatccttgggcttggccttggcctttggccggcacagcctgagcctcttggccatgcaggcatgaccatgcttcccaaggagggccttgatagccttggcacctatgctcatggccttggcattgttggcctgcatcttctttaggcccttcttgtgcctcttggcaaagcgtatgttcctcgggaacttggggtccacctccttaagagatttgtatctttgtcatcggggtttcttcataccatttctgtgccattttcgggactggttgtgtgtggcatgggtcttagacttggccat

SEQ ID NO: 479391 - DNA, 543 bp, Homo Sapiens
tgccttgaaatttctttttcattgcatccttggatgttgcacagatcattttacttttcagaggtgctagttctcatgcctacaaaaaaaaaatcaactcttctgtactggattcttttgtttcaaagcttgcatcatacaaagcacagcgacaatctttttcaggaagcattcccacaaaatgcttgaaaggaccagttatggttacaccaacatctccaaccaagatctctttgccttcttctacaatgatgcacttttcgtctgcaccgagacaaaaaatgacagccttctttcttttcttgatttcttctggtgtggagcatttacgaactttcatgtcataaaaaatgcgacatacttcatcagctacttgcactcctgaggccatcttcgcctctggggttgcagggatgcgggggagggagccggtgggcagtgagtctgcagggcatcctcttcacggcattgctccatctgtgagggcgcccccttctatagaagtaaactgccttgctgagaagaaaaaaataaaatgttata

SEQ ID NO: 479392 - DNA, 1000 bp, Homo Sapiens; identical to SEQ ID NO: 161520

SEQ ID NO: 479393 - DNA, 1000 bp, Homo Sapiens
tcagggccccggggagagggaagcccgggctgagcgccacagaccgtagcggcccagctgccagctgccgcttcgtcgcacgtccgcgcccgccagtgcccgggcttgctctgagcctgccggctcgcggtagggccccaccggggaggcttctgccgcagcttcagcgttcacgctgtcctccgactgtggggggagaagagccggatcccgatcccgggacaggccagagagaagcttggggccagacttcgtggagcggagagtgtcctgtgaggacaccctcggtgaggaccccgaagagatcccagagccctcgagtgactgcaccagcgacagggcccgggagcctgcgcgcgaagcggtcagggatggcatccgggatcccacctttgaagtggccagcgatgggaccctggagtccatgctcgatagcaccaacgaggggacccgggaagcctcgcgcgacgggaccacggacgaggcccggggggccgcgcgcgacggtaccacagacggggtctgggaggccgcgcgcgacgggcttatgggggcggctaatgacccggggcgcgaggtgggctgggagaaggccggccgctcccagagcggcgggcctccggggcccctgcgcagccagccgtgcacacgcgccaggtcccgcgtgtcctcgtgctcgcggtgcagttgctcgcgctgttccagcagctggcgccgcgtgtggtgcagcagctgggtccggcggagcagcagcagcagctcctgccgcaggcgtccgttgtccgctttgatggcctgcgtgtgcgccacaagcgcgcgcaccgcctcccgctccgcgcgccgcgccagtgactgcacgcgctgacgcgcctcgcgctcgaaggccgccttgtcctccaggaagcgccgcttcacgcggtggagcagctgcgtgtgctccacgcgcatatgcagcagctcgcgctccagcgcccggatccgggccagctgctccagctgc

SEQ ID NO: 479394 - DNA, 960 bp, Homo Sapiens; identical to SEQ ID NO: 346931

SEQ ID NO: 479395 - DNA, 1000 bp, Homo Sapiens; identical to SEQ ID NO: 346932

SEQ ID NO: 479396 - DNA, 1000 bp, Homo Sapiens
aaaaagttggtgtatttttattaagattaaagtagaaattgaagcaatcaacatgtctagatagatagtaagtaagtaagtcatgccagtaatgatcatggtttactccaaaagaatgacaccacaattctacatttgtatgcaggaaataatacaacttcaaaatgcataaggtaaaaaaagaacaaaactgaaagaacaactcaagaaattcacaattgaagtggacatctttaacacatattcctggatacttgatagaacaaatagaaaaatgaccagtaagaatacagaaaacataaaaaacatcatggatgaatttaactgatatataaaaaagttaattgtttttcttttctttttttttttttttggtagttgaaagatttaatagagtgaaaacagagctcccataaaatgggaggggacccaaagtgggtagccattgctggcttgaatgcctgagtttatatcctgatcattgtcccgccccttgtgctgtcaggcgatagatgactggctatttctttacctcctgtttttgcctaattagcattttagcaagctctctttactacctgattggtcgggtgtgagctaagttgcaagcctagtggttaaaggtgggtgtagtcaccttcccagctaggcttagggattcttagttggcctaggaaatccagctagtcctgtctctcagtcccccatctcaacagaaaacccaagtgctgttggggaggttggccaacgaccactctaactgcttcctgctgaattggggcgtagtaggtgtcatgcagttgagatttcctcgggaggggtgcctttgatgtcattaatgtgggagctgggctagcaggccggtccagaggtccgcagtagatcttagtcatggactgcatctggggctccatttggagaaccatttgtagttttatagctttgattctggaagagacaaactgaagaagtggtagttggttggtgagaggtcaggtga

SEQ ID NO: 479397 - DNA, 1000 bp, Homo Sapiens; identical to SEQ ID NO: 346934

SEQ ID NO: 479398 - DNA, 1000 bp, Homo Sapiens
cacaggtttattactagcaaaaccctgcggagggggaaaccagcttagtgtcagcgcccactgccacttacaggctggggtaatcatggggctgggagggagggctctggacagtatagcttgctgctcagtagaagatgataaggatgttcctgaagtcaggctgttgggcccttgcccagcaggatgtgataaggatgtttctgcagtcaggtggttaggatgtttctcacagcccgagttcccatggaatgttttactctgaccaggatctgtgcatccttcatgcttccttcctcagtggtgcccaaacagaaacatggggcaattccatgcagggtccatagagggagcagaaagcagctgcaatgaagaaccacggtggggatgaaatctggcccaaaagtgaagctagaagcaggtgctgcttatcactcaccacaacacaggtcataaagcataaccagcacctgaaggcacgtccagggccagaccagctggctgggctgccagcatcctagtagagatcccaggagatcagataagcttgctcagcacaagtgcatcaatgaagtccaaagtcttgaatgtggccctggccttgaggatgtcaacactctggctagtgagggtgcagtgctgctccaggatgatggtgtctaaagttgtgcaccaggtcataggccctgcagaaacatctcccctcaggagtgaggtagtacaggaagtccatgcacaggcagatctgctggtgccattacactatgagggcatggagctccaagatggtggcaacatagtcactagaattcctacagggtaaggttgatgccttagccctcccagaacatgacatgtttctcagaatgtggctgatgtccagggccatctgtggatgtttgctgggggcctcttgctgttctcctttatggtctgcagtgcctacattagcatctgtgcctaggatgtgcgatgggcccctgctcccactgcagggttg

SEQ ID NO: 479399 - DNA, 846 bp, Homo Sapiens; identical to SEQ ID NO: 346935

SEQ ID NO: 479400 - DNA, 1000 bp, Homo Sapiens
tcagactaaacatgcgtctacttcattgaggaactccagattgagacatgctgggattgactccatggttagggaagatggatgaaatggaaacaaaacaggaaacatttgcttggcatctaatagcagttgctgagggccattctgctcttgtagttgtgcctggatcatttgtataaaggccactgttacctgttcttcaaattcattcaggggaggctaaaggtttaaaattttgacaatctgctgggtgctgagagaggcacacagggagcagatggcctctgcatcctcctgggttttcttctttaattgcaggagctgggctgcttggatcagaggttccatggtctgaactactccactctggtgaaggtttcttccccaaagccactcctcaagctgacttatattgtacctgagttgcatgcctgtgctccaagagcagacgtccttccgcaggagcaggtcattaagagtcactgcgttgatcatgtagaagagctgtttgaatacctgcaggatgatctcagggtccaagccctggtcacacatgactgtatgaaaggcattcatctggcggatgatagcttccaggcggtatgagttatccccatctgccatgctggaggagtgcttctgggagccagtgggcttcacaccagatagaccctgaatgctgtcattttccaacatggcagaaactatcatcggctgtaacacaccctcggcaattttaaagagctgctggtagatctgaatggaaaggtcgctcagtacctgacggtattcggtgaggtcaaagttcttaaggcagtgttcgttgtgctttgctgtattctgagtcatgaagccctcatccccgctgtaccgcttcagacagtgaagaaggtggcaggtgttggataacaggaatgacgtcatctcaaagtcatcactgtgcttcttcaggactttcttaatgccgttggtggtggaggtcatcagggagtgcaccttg

SEQ ID NO: 479401 - DNA, 1000 bp, Homo Sapiens
tcatattgacaagaggaagaaagctttgcgactcatgagaatgatgttttcctctctggtacataaggttatgtaggtccaatccattgtgtagaagatcttttctcccttatacagagagtccttgtttgtctttagtctgacaccatgggcgagcctgagttggcccgtggtccacattcctgaccaggtgtctttctcacccactggtttcaacaaagatgttactgggttatagaaggctgggatggaaacaggataccaagttcgcatggagacaatatcgctcatccgcagcttatcctcaaagctatcctggaaagctccttctggagctcagagtgctctcttgatctgcccccttatcccactgacagttcgaatcacagcatcttcaaatttggccacttccaaggcagaattaaacattccagatatacagaccttaataaatgaagtgttcttgaaaattttatatggaaaaccagttagctttaatttcttcacaacttttatggatttatccagatcaaggacaactcctgtggcagctatccgaaaatcaggcattatgccactgacagactgtattgccaagaaaccagttccctgtggagtgatagggtcccaaaaggctgctccacaatggatgtgctgtggcgtatactttagaagcctttgtcttccattgtggtcttcgatataatagagcaggatggtctgaaacctcctccaccctacagaaaatatgattggatcttgggacttgaggattttcttataccagcgatgattcttcagacgcatctgcacgtgtccaacatttccctcactgttgcccaagccacccaggataatggggtaatgggggtcaaagttctgcacaaattcacagggaacattttcaatctcaacacggacatacatcccaggtcgaaaaccctcatactgaactctggcttcatcatcttgatcttcaaattctacgtgattcagctgt

SEQ ID NO: 479402 - DNA, 741 bp, Homo Sapiens
ttatttctgactggattcaggcttggaagcagaaactcacagagaggaaagtctgcatctcttggcaatttgtttctggggcttctctttagcctccttcatgctcttggccaaaagtttagtgtattctgcagcctcttccttatttttcttagtacgctgcttcttcagagcaatacaccgccgattgtgctgcaggacatgtggagtaacaagatgctgaatcttgggtgctttggtcctaggtttcttaccttctttgtttaagggctttcttacaacatactggtggacatcattttctttagagagattgaaaagtttgaggattctgctagctctttggagccccaggcaatgaggcaccgtagtatcagtctgtccaggaatatctttctctcccttttttacaataaccaagttgagaatgctaagattggcatccacaatgcaatcacaaactgattttctttctttctttctccagttctccttggtctgtaagaggaccttactcagtagcaggcggacacggccatgggtcatgacacccttcttcatggggaaaccttgtttgtagttctcaccactgatttgggccacataatccttccattcttcacccagagaatcagcagctacttctgtggccataggcttctcataaaaagtacgaagtttgagttcctcttcaatgagtttccggctgtcagtggctgggaaggagatgctcagcttcat

SEQ ID NO: 479403 - DNA, 1000 bp, Homo Sapiens
tcactggatagtgggtactggggagcctgaggcctggcagggaagttccaggggctgtcccacgatggtggtcacctgtcccaagccttcagccaccaggagctgtgggggcacctgaacctccacggagtactgcaggacggcttccccggcaggactgctggccacacagctgtacaggccactggatgcctcccccgggctctccagcctcagcacactcccgtctgtctccagccgcgactcgttgctctctgccacgggcagcccctcgtggtgccaggagagggtgggggacgggtggcctctggccacgcactccagcgccacaggcctcccagccacagccttcaccacgtatggtcttccaccggcgccctcgatggtaggtgggacataaacatccagcctggtggccttctctgcggcccccacagcattgctggccttgcaggtgtagacgccggcatcggagctctgggccctccccagctgcaactgccgaccgcccctagtgtagaccaccttggtgctggtggggagcagggccccgtccttgaaccaggtgatgtttggggtgggcactcctcgagcctcacacaggagctgcactaggtggtcctccatgacggccacctcgcctgtctcgttggagccccagatagtggggggcgcatgaactcggagctggaagtccctggcctgctgaccagctgggctgaaggccacgcactggtatcgtccctcatcccccacgtgactgccggtgatcctgagaacctggccatcctcctggacctgcaggtgagggcctcccggaaggacaggctgcctgtccttggtccactccacctggggcgtggggacccctgaggtccaacactgcagctccacgtctgcaccggccaatcctagcacctcctgagcggccccggctccaagcacggaaggaggggtgagcacaaggagatggaagtccctctgggcggtgccagcctgg

SEQ ID NO: 479404 - DNA, 1000 bp, Homo Sapiens; identical to SEQ ID NO: 161521

SEQ ID NO: 479405 - DNA, 1000 bp, Homo Sapiens; identical to SEQ ID NO: 346938

SEQ ID NO: 479406 - DNA, 923 bp, Homo Sapiens
ttttggttttttgcttgtttgtttgtttttgttttgttttgttttttttcttttttttttttctgctgacacccagcactttattagtggggaaactcgccttggtctggcagagactgggatggacaggaccggcgcccatctcgagggggtattttctggaagatcaggtgttcctcccttgtaggtttagaggaaacaccctcatagatgaaaaccccccagagagcagcactgcaactgccaagcagccggggtaggaggggcgccctaggcacagctgggcccttgagacagcagggcttcgatgtcaggctcgatgtcaatggtctggaagcggcggctgtacctgcgtaggggcacaccgtcagggcccaccaggaacttctcaaagttctaggcaacatcgttgcgacacaccggagaccaggtgatgagcttggggtcggtcataagcgcagtggcgtcgtcgctgggggctggcagggcctcccgcaggaaggcaaagagagtgtgcgcccccgcaccgttcacctcgcccttctcgaagagcatgaagttgggctcgaacccaccaccaggtcggacgtacttgagggaattcagaatctcttcgttcttggcgttctcctgatgcccaaactggttgcacgggaagccgagcaccaccaggccccggggtccgaggcgccgctgcagctcgttcatctgggtgtagtcccggaccgtggagcctcagagggacgccacattctctataagtagtaccttgcaccgcagggagcccaggctcacaggctccccgccggccagcgggcgcgccgagaaggcatacaccgactgggccgccgccgccgctggccgagcagcacacatggcgcaattgtccaagaagccagcggagcgccccgaacaagcactgt

SEQ ID NO: 479407 - DNA, 1000 bp, Homo Sapiens
agaatatgagaacgactttatttcaaattgctttgaactgcgttgggaagggggcaaatgcagcggaagagaggaagccctggctgaacaggatatggagggaacccgcttggctgcagctccggagctccaaaggtggcagctgttcatcttgtaggaagatgctggctccaacttcaaaggtcctggaacttgtcagtgaggaactgcatggccgctagctgctgtgtaaggtcctcaatttccctctgcagccggatgcaccgaggacagccctgggctcccgggggctgctgctgcctttccggtcttgggggatggacaggtggctgccagtcaccggaggatgcatggcatctgggcaccaggcgtctcaaggtaaaggccgagggctgtgaggttcctagtacttggggagctctgatgttgggatcaccactgctgtattctccacgacgcacggacagagaaatcagctctggcttctgtgtgggaagttgggcccttgggacctcatctctatttgggtcattatcttctctggccgcagcctgggactccctggtcttccttcctgcaggtttcttcccagggctgctgtgcttgggctccttgggtctcacggacttccccaggagccccacgccagacactggcgggaagctagccggatcaggtggaactgctgaaagtctctgcccccaggcaggaaaggctccccgcagggccagttctggtgcaccctctagggatttcttctcctgggccaccttccttcccagagtgccccggggtaggggccctctaacggcagctcctgagcagctgggcctgacccccctctttccccacaccatgctctgcattttcttcaaggaaggcacgtccagctctcccacagccggcctctccacgactggggtgagtctgcggggaggagagatcaggagaggtccctgaacctgaaggtaactctccctgcggtggaaactgcggcgtc

SEQ ID NO: 479408 - DNA, 1000 bp, Homo Sapiens; identical to SEQ ID NO: 346942
  misc_feature (944)..(1000): n is a, c, g, or t

SEQ ID NO: 479409 - DNA, 852 bp, Homo Sapiens; identical to SEQ ID NO: 346944

SEQ ID NO: 479410 - DNA, 939 bp, Homo Sapiens; identical to SEQ ID NO: 346945

SEQ ID NO: 479411 - DNA, 1000 bp, Homo Sapiens
tcagcaaaaagcttcggcctgggctccagttatggttatagttggcttcacaggtgtgcgaactgtcatctgggtgatcacagggtgatgacagggctgctgcatgttgctctggaggtttttcactgcacagtgaactgcctgatcacagcagccctcagccctcttggtgccagcagacacatagccacaactcctctcatcccacaatgcaggtctaactcctccactacagaatgattttccacattcattacatccatagggtttctgtcttatatgagttctgtggtgaacaattagggcccacttctggtgaaaggttttcccacattcattacacccaaaaagtttctcccgtgtgtattcatagggtttctcccctgtgtatgttctatgatgtgcaatgagttttgacttcacacagaatgattttccacattcattacatccatagggtttctgtcttatatgagttctctggtgaacaattagggccaacttctgatggaaggttttcccacattcattacatccaaaaggtttctcccctgtgtgtcttctcagatgttctgtgaaactgtagtagcagcagaaaaattttccacattgaatacatgcataagatttcccatattcataaggtttttctcctgtgtgaattctctgatgtttaatgaggtcggattttgtgtgttctctgattttgagtaagggatgacttttcactgaaggatttctccattcatgacatctgtaaggtctctcccctgtgtgaattctttgatttctaatgaggtctgaattcttatagaaggtcttcccacatccgtgacattcatagggttttccctgtgtgtgttctctgatgtcttgtgtgggctgacttctgggtgaaggtttttccacattcatgacattcataaggtttttcccctggatgtgttctctgttgtaaatgaagggattctgatgttcaaagagaatggattcctcaaag

SEQ ID NO: 479412 - DNA, 1000 bp, Homo Sapiens; identical to SEQ ID NO: 346948

SEQ ID NO: 479413 - DNA, 1000 bp, Homo Sapiens; identical to SEQ ID NO: 346949

SEQ ID NO: 479414 - DNA, 1000 bp, Homo Sapiens
ttactttgtcaaagatgaaaaatagtaattgattttgtcctcgatcactttgttccctcctctcctgccttgcagataagcaaataaatatttttgaaaactcgtgtccactcggttgtatgggggtagccttctgaaaaacaggccatccggtgacagtcctgacgccagtgttactgccaagacacgaaacgccagctgcaacccagacaggagagggcccagagggcggcctaccgcattcaagtcgctgccctcctttgcactaaggaaggagagaggagggaaagataccggtgttttacaagctattgctctggcgttagcggggcactgtggcaccagcctcctctggtcctcagggcagcatgcaagaaagagctgccagtgcgatccattgtttgcagcatcatgctttcctttagctcgatatgcagcaatatccttttcgtatttttctttcagcttcgccgacctcttttcataaggctgcttgtcatctgcagcagtgttattccacatctctcccagcttcttcgcaacatcaccaaaggacaggccaggacgttctcctttgatttttgggccatactcagagaagtacaggaagaaggctgaaggaggcctcttgggcgcattgggatccttgaacttcttttttgtctcccctttgggagggatataggttttcatttctctcttataatgggccttgtccgcctttgccatatcttcaaattttcctctctctgagcacttcttagaaaactctgagaagttgactgaaactctcactttccccggtgctgtctctatggagctcaatgtactgcaatggctcttgcctgggcgcacggggatcaggtggtcaatccagcagtcttgtgaatgctccaggggacctggtgggcagcctagagaggaatccaaaagaagctggcagttcttgctgagggctgggcattgaccttcctgatccccacggtaagctccaaagctg

SEQ ID NO: 479415 - DNA, 1000 bp, Homo Sapiens
tcagaagctttttctactgatgatggaagagcccatctccttgtactccttgctggtgacccacatatccttgaacgtggagagtgagcacaagatggagccacctacccaagctccatagacagaatacggacaggtggccaccttcacataaactgtaggggacaccagctcagatatttctctctgcatccggaatcgcaagccggggcaggagcccgtccctccggacagtagcatgtggccaaagagaaccttctggaggtcggggttgcaggaagtgatgctctggatggccttcgtgtggatgccaggggtgtttttccctatgagttttgactagaagagcacctcggggcagaagaagctctcctgcccaacggtgatctcttggccatcaggcagctgatatttctgttggcatgaaggtgaatcagttttcatcttttccttgtcaaagtccaaagccacatagcagcatttctccttcatgtcccggatgtactctcgatcccctgtgcccaccaataattgcacattgtctttcaacagttgcaggaggtacgaggttaggtcctggcccgctatgtccacctggaaggttgactgatgcaaaggacagccatcagcgatgggcacgaagtgtgtcattccttctccagattcaacagtcatgccgaaggtctggccagaggcgtacagagaaaggactcctcggttagctaaatacagggcaggtatgttgaaaatctcaaacagcacctgtgtgactttctctttgctgggtgttgggttcaaagacggctccgtcaccaacatggggtactgctctggggcgacgtggagcacctggtagaaggagtggtgccaaatcttctccatgttgtcccagttggttgttattgcccgagaaatggggtattgcaggttgagtttccctcattttttctgaacctcctctccaatgaaccagtcttcctcttccatccccaccaataca

SEQ ID NO: 479416 - DNA, 525 bp, Homo Sapiens; identical to SEQ ID NO: 161522

SEQ ID NO: 479417 - DNA, 1000 bp, Homo Sapiens
tcagagccccgagcccggggaggtggcgcgggagcccgcgggcgcggcgggcgcgggcgcgcggcgcgggtcggcgtcctgctcgtagcggtagtggtagccctccatctggtcccggcacgcctcgcgcaggttgcgcatccagcgctggatgccgcggcggtttaggtagagcaccatgaggaagatgaggccgatgagtgccagcaccagcccgaagaacacgtaggaggcttccagctccgggccggcggcctccgcctcctctccgcgagcgtcggcgccgctgtccgcgcagcgaagccgcgccccgtccaggtccagtagcggccggtctagcagcgcccgcggggcggcgcagcgcaggcgccgcgagtcgggcacgcgctccgtggcgttgcgcagccaggccagcagggggcgtgcggcacagccgcagcgcagggggttgtcggcgagcagcaggcgcggcccggggaggccgccatcgcgctccagcgcgcgcagctcgtcggggtccaggccggccagcgcgttgaggcgcacgtccagctgctccaggcgcgccaggcgcagggcggctggcggcagacggctcagcgcgttgcccgctaggcccagcaggcgaagcgccaggctgggcagcccgtcgaaggcgccgtcctccaccacctcgatgtggttgtgcgtgaggcgcagcgcgctcaggagcggcaggcgcacgcccgccgcctggtcgccgtccccgtccccgccggcgaaggcggccgcgcgcagcaccgtcaggttggcgcctacgatggtgaggttgcgcgcgtcgggcggcacgtcccgcggaggctggcggagctcggctcccgacgcgcagcgcagcagcagcttggggccgccgaagcagtagcactggaaggggcagggtgccgcgggctggctcagcgccgccgccacgagcagcagcccctggagccccggctgtcccgcgcgcggggccatcgcggcc

SEQ ID NO: 479418 - DNA, 312 bp, Homo Sapiens
tcagcgcaacctccgggcttctcgctctgactccaaaagggtgagcacgtcgccctcgcgcacggggccttttacattgcggatgatggatcggctcgtgtcgtccatgaattccacgcgcacctgcgtgcactgtccctgagaaccggtcctgcccaggaccttggtgaccctggccagcttgataggctgcacacggctggtgtccatgatggcggcgcggcggcggtcttcacaaactggaagcatcacctttgcaagggcaggttcagtgtcttctttgaaaaagtaattttcttttgtgaataacat

SEQ ID NO: 479419 - DNA, 1000 bp, Homo Sapiens
tcatgccttcagcttcttatgaggtttctgagtcagctcctggctgagacttggcggccgcagggctggctcagtggaccgcaggggagaaaacagggcaaggggttgagcgccatcaggagccattccacagtgaccatggaggagcagagactccaggcaggccaccctgatgcccatcgcccccatgagtagcaggtagcttggtgaggcagcctcccacccccttgcagatgttggaggggtgggccggctggctgcagagcgccaccactgccttgcagccgctgtcgggcactggtggctctcacctcccacgacagcaggtacgtgctgcgctgccagtcgctgagctattgcatccgtagcacttgaactgcagtcacccaggtcctttaaggagattatgctgggtgtcctgggggcagggtaggtctcctgctgcagccggtctactgaggcggggatctgtgtggctctagcctgcccgcagttcttggtcagagtctggctcaagtgctgcttctgttcatcactcagcctctggtaacacacatgggccgggactcccgccaccagctcaaccagataataagtgacaggcagaaatacctggcgtgttcttgcagcagccaacaggtctgaaacgcatgtcagtcccacttgggctggagggggcagggagagggggatgaagccagataagttcaggcaaccgaggagcacctcctgggagccgcctggcccatcagacagagtgtggctgcttccacccgcacccaggggctctcccagacccccgcactgctgggccccacagctcctctctgacatgggtgcctttcccgctggctccaaattgccctcccctcccactgtggtgcacaggccgactccctgctgccgcccagaacctgggtgggggaggccctgagtcacggctcctggtgtgacagccccaggaagcaggccaagagccctgctcatctggatcccgcac

SEQ ID NO: 479420 - DNA, 813 bp, Homo Sapiens; identical to SEQ ID NO: 161523

SEQ ID NO: 479421 - DNA, 1000 bp, Homo Sapiens
tcagttggccgtgccttggttatctgacaggatagaagagaagtgggaggtgaggagtagctcctgggtcctcatgagtattcgaggcaggttcaggtctgagaagccaaggatatccttcctggaagcctgagttaggaggaggaactcactgctggagaaaaagttgaagaggaaggaggacggacatctcagatcatgggaagtgctggcagggtgggagaatgctctaaggctgatgaggggtacagacagttgcagccactgcagagcaatagggggtcggcaggcctggaggaggaggtggggcttcagctggccttgaaggcccacaaggagctctgtgactgtggacatgtttctctggggaaatgggtagctttgaccaagatgcctctgccccttcatgtctctccatgtggaagtggaagcaccatccagttctccctcctccctggcccccgcctctatggctgtgagaatgaaggagctgtggggtcccagccttcgctcagaatgcgtggagaggacacaggggtcctgccagtcctggcatccagaggcagcaatgacaacttggtctttggggctgacatgaggcatcagcacttgctgggaagtagtggcagctggcaggccagccagcagccaccaaaggcacagcttcagcaatggcatcatgctgcctgcctggctgacaaggctcttgttggctgttggggcgccaccctcccgtagtccacgggtgcccccgttcctggtgaggggctctggttgtctcctgaaaggatcatttccctgcccaggatctggccatgggggctcagaaatggaggagagggggccgagggtctctgcctgggtgggcacagaagctatggtctcaggcactcggtggattcgcaggagctgcaggcaggccaccccgatgcccactgcccccataagcagcaggtggtcggccaggaactgctccagcttggtgaggcagcctccctcc

SEQ ID NO: 479422 - DNA, 1000 bp, Homo Sapiens
ctaaaggtacttctctagatgaaattctgggcacttaggagtcagcagtggtatattgagtgcatggctcttgctcacaggtgcttcttttctgtcccatggcaggcagcaccaagagaaggcttctgcaaagccgagagctacttttacccatggatcaagagtaaagtttgcagctacactgtcaggctgtgtttggatgttaggagttagtttagggcatcttcgagcaatttttcttaccaaccaagaggaagggggttcccactgagggcaggaccaggctgcatgcacctgttcaggaatgttctcctcatagtccagcctcaaggtttaggcattctctgtgtgcatggagtccatgacagcctctgcctgggaagctgtccagctgcacacctggaatggagtggtgacctgggagaatgggtggtgctggaccttttctttcatggcatgacaaagtgttttgtgacattcagtctgctgtacttgagcagctccagtggggaatggcttaggaagcaggggctggtgggcttggggttgagtgataggctgtagacctacaaggaggaagtgggcatggatccagtaagagccccacgtggatgcagtgatgctgcccttctggtctttgtctgtaattgcaaagaggtacatgaggtccccttgcatcttgcagttaccaggaagtgggttccagttgctcatgctaggcacttttaggcactgaaagtggcacagccctgagccctcctgcagctcctcagtgcttcgcagccctgggaagtggtttggcatgttgctgtccaggtgcagtgagaagcaggtgcagtgacacatgtcttcatggaccatgagtaccgggtaaatctcctgcacgatctccttaagtgacacctgtagggagaacgccccaacaactctgatgagaaaccacatggctagaagcaaggacttacactttccgcagcccaaagtcctgttttcttcctca

SEQ ID NO: 479423 - DNA, 1000 bp, Homo Sapiens; identical to SEQ ID NO: 346950

SEQ ID NO: 479424 - DNA, 1000 bp, Homo Sapiens
tcagccactgagggggtcttcacggtagtgaatggcacaacgaagtttctccagcatgatttccagagaggagtactggggaagcttgatcatgaacatgcaggtctccacgcggatgtagcgagagtctggggaacctgctgtgccatctgggggggcgatcttcatggggtacgggggcacatgggcagtgtcgggacccccatctttgcaggggcaggtgaacgggatgcgctcctggttgcaggcaaacttgatgaacttgcacagctcctcctgggtgaacatctccagggccccccagaagaactcgatgtgctggtccgtctccatcagccccacttggtacatggtgtgggccttgaggaactcgaggttgatgtaggggaggccgcaggtgcgcagctccatctccagtgggctgagcatggtcagcagctgcagggggatgatggagcccaggccggcccgcacggccgtcacgcactccacattctgcagctcccgcagccgcaggctccggatggctgccgcgtagatgtccttgttctcccacgccacaaggatgtgccggccccggctgcacagctccacctcctcgcccgtcatggtcaggtaggtgaacctgcagcagggcttgttggggctgtcagggctctccgtggccaggtgctgggaggcgatctcagcgcacagggcctccagctcggtctcatcattgatcgagaagccactggcatccgggactctggctctgctattgtcttgcaatggctgccctgagtgacccagggggacaatggcagagaccagagacctggccaggcagtgcctcagtcggccatggagtattctgccggcataggcagaagccgctggcacctccttcacctgaggcccaggagagagcagcttctgccgggcctcaggcacgacgtccactctcgtggccttgaggggcgatgaaggagacgagcctggacactccctgaggacaggg

SEQ ID NO: 479425 - DNA, 1000 bp, Homo Sapiens
tcacattaaagggtactgcttggtgccgtggagcgcagcagccgtattccctcccttccgatctttgccatcacagatcaaagtcctatttgatatctgaggatatgagaaaccctcgaaggcattgtccacatacctggcttgccctgcatgatcgttggctctttctttcctactgggcataataaatctgcaggatcgagtggattcctcaggagcaagctgactgttcccagactcctcattagcagaagagaccccgaattctgccttcttgcttccacgttctttagcccatttaagtgtcgtcttagttttcgagttctccaaatcacagctttgtccagtgctgccaggatgggacctgtcggtcccaagagccagagtgctggctcctccgggggctgctgcttgggctatcctattgggcttccagacaatctctgtcttcatcttcactccagcctccatcttcatcttcactccagccactatcttcatcttcactccagcctccatcttcatcttcactccagccactatcttcatcttcactccagcctccatctttgtccttactccagcgtctatcttcatcctcactccaacccctatcttcatcttctctccagcctccgtcttcatcttcactccagcctctatcttcatcttcagtccagcctccttcttcatcttcactccagcctctatcttcatcttcactcgagcctccatcttcattttcactccagcctccatcttcatctttgctccagcctctatctttatcctcacgccagcctctgtcttcatctgcactccagcttctatcttcatccttactccagcctccatcttcatcttcactccaccatccatcttcactccagcatccatcttcatccttactccagcctctattttcatcttcactccagcctctatcttcatcttcactccagcctctgtcttcatcttcactccagcctccattttaatt

SEQ ID NO: 479426 - DNA, 912 bp, Homo Sapiens
tcagtggaaagcgcggcacacgaagccaggccgggacccacagcccaggttctgcatttggcatttagcagctgcgatgtctccgagaaccccttgattctccaggacatcccctgcaaaagctccatcgctacatgggcagggcacgagaggccacccgacctggatgacgcagcagcctccactcgtctcccgcaccgagtccccgcagagcagcaggtcaacttctaaagcgcgtctcagaccgcctctcccagcctcaatcagcggctgcagcacacggagccaggagtccacatggagcacatctgaacggcccttcccaaagctgcccctgtggcccccgtgagggctcaaaagattgacatcagggtccccataggcatgagacacttgccttctcatgtcacaggtgctcagggtcccattggcatagactcgcagacccttcttggatgtccacatggtctgtacatgagtccagtaggagcctcccttttgctccccgatgcatttcagtgcaggcctggtgtgctgcaccagctgcgtgacagaggaggagacgaggaggaggttcttgggcacaggaggagcggggcagaccccagagtgggagtgtaggatcgtgaatgctgcagagcccacatagtctgatatcccggcggagcaggatctgcttcctggctggtgcagccactgcccagctctcctctgcccctgctccacatgtgtgtcatctgggctgttgctctctgctctccgcttgcctggccccgaggcaaagggcccaggggtcgctggtgaggaggggctgcagctgggctgtctgagcttctcctggcagccggccaggttccacagggagggtagtgccaggaagcccagtgcacagaggggctcatagatgcccat

SEQ ID NO: 479427 - DNA, 372 bp, Homo Sapiens
tcacaggacaggtctcaggtgggtcacaggtcctgagtgggtcacaggtcccgggtgggtcacaggcatcccgggtgggtcacaggtcccgagtgggtcacaggccccgggtgagtcacaggccccgggtgagtcacgggtcccgggtgggtcacgggtcccgggtgggtcacgggccccgggtgggtcacgggtcccgggtgggtcacgggtcccgagtgggtcacgggtcccgggtgggtcacaggcgccccagtgacaggagttcaggatgcgccaccccaaagtagccgaagtctctggcgcagggctccggccaatgcctggcctgcagtgtgggcggcggctgctctcgaggtgcacctgtctcat

SEQ ID NO: 479428 - DNA, 1000 bp, Homo Sapiens; identical to SEQ ID NO: 346952

SEQ ID NO: 479429 - DNA, 1000 bp, Homo Sapiens
tcagtgttcttggaagaacttctcattacttgaggccccagaaatgcaaacactcctccggttttccagcgtgctgtcaaccctggcatcagagctcttcctgccgtgggcactggtaattgacttactttggttatcttccagatttttttttgtcatcgcttttcctgcgcccaattcccatctgtctagcccttctgcctccgctggtctttttcgcgagcctctccccagccgctggtattcgtctgggctgcagccccgcctatctcctggggcgtgaccacctgtccaggccccgcccccgtccaacaggcggagacccgccccctttcccggagacccgccccctttcccggacaccggcttcagcgcccgagcgtgcgcgcgcgtctccgctcgtcgcccggctcggcgtcgggagtgcactctgtgtggccgctgctgcagtgttgttgtggttgtgagaaggcggcggcggcggcggagtagcagccggaccagacgccctagtagctcagtcgctgccctgcgccgggcctggcagggagcggccccggccaggcggctgtcaccctctgaggaggcagcgccaggggaggggcgtcccgggcggccgccgccgccagggggaggcgctgggagtgggagtgggaacgggacctcagcggtcgagctcggccgggaccctaggtgcgggggaggcggggtcccgggctccggctgcctgcccagacctggcggggatgggcccgtgcggctccgggtgtgggacgtatcctgggagcgcccggggttattcccactgactcccgggaggtgggtgtgcgcccttcgccccctgcctggtctgtggggatccatcgttgctggagactggaggtcgggggccatgggagccccggggcgaacggtgcgggcctgggtcttgtggaaaggaggagcgaccgcctgagcgtgcagcaggacatcctcctgacccgtatctttgttaggaggg

SEQ ID NO: 479430 - DNA, 840 bp, Homo Sapiens
ttagcactcaaaaggtgaactggtaaccacgtcaacagcgatggagtaacaataagagatagccaatggaactcctggtctgtagacaacatcatcttcagtgatgtaggatgttatctcgccggtatctgtcctttcataacgagacgttttcttcggtggtttcttcttgttcttcttcgtggactcctctgtggtggcactattgttgtcattgtcctcgtcttcactgtgatcactctcagcataatttttggctcctccaggtggaacaggagccctcaggacagccctgcaccgacacgtacgccagcggtccacagaggatgctctaagtgttaggcacagtgcacggggatgaagataaagagcacggacagccacgtcccgcgcgcaggcccccagcaacacaggccccaagcagggcctccacctgtatggagtgagcagctcagaaggcgaaggccggtgccttgcaatgttcacctcacccgcggcttctggcatggccacggctccttccttttctagtaataaataccagatttggggaaaccaaggcgccgcaatgtgtgttatcgcggacgtctcccgcaccgctcccgcggatcctcggacccagggcccctgcagccgctcctgcccaaggggcgcgaggcggagatctggaggctttggggcacgcagaggagactgagggtgtgggctcagggccgcggtgcggtcttggggcttgaagtgcagacttagggtgaggagtgcgggcttaggatgggggcttgggacacggggtggggacttcggatgtacggtggaggcttggagaggtggggcacacat

SEQ ID NO: 479431 - DNA, 1000 bp, Homo Sapiens
ttaagactgatgctcagcccctttgggcttccctcttctctggtcaccgtgtcttccaacccacttgtccagggccgcctctcgccttggggagcccaaaacaacagccaccaggcctgatagagaagaaacactgcttgaaccaggatgatgaagctgcatccggcaaggacgctctgcacctgcaggcaggagttgtccacgggcccccatgtgcgtgctgatggtggtcgtgttgatgtcgccgatgatgccgagtgcctccttcagcacgtggtacatgcgcagcatctcgtcgcgccactgtgcctgctctgccgactcttccatcagcgttttctggtccccacgtgagtacaggttggacagcagctccgagaagatgaactccttggtgttgttgatcatgacgtgcatgatggtcttgggcatgacaccaaccatgaggtcccacacggtcttgttgacaatggccatgtaggagtccacaaggttctgggtggtttccatttgccgctccagcggggcggggtaggggcagccctttcccaggcggtagcgggggcagtggtgctgttgcccttttaaactgcggcttgacgggagccgcgcctcctgtcggtggagtcggttataaagggagcagccccgcaggccgccacatagctcccgccaagtcctcggtgccccttgccattttccagccgcgctcccacgagggtcacggcggcggggagaggtggagccgcgagagctcggccgggggccccgcctggtggtcgcggccatgacagcggctcgggacaggctccttttccgcgcccctcccgccggaggtgaggggaagatgtccatgtccgggttcaaggccaaaccgaagttactggcttctatcttccaggagaaccaggagccacagccgcggctcacgccccaccgcaacattaaggtgagtcgccgggtggcggctcctagcgcggggctggcttgggggctgctg

SEQ ID NO: 479432 - DNA, 1000 bp, Homo Sapiens
ttagaactggatcacttggccctttctcttatctccttccagttcaaaatgcttgcatctcttaatggccagcatcctcttggatctgcagttaggctcaacacattccagccttagcacaaccttctttgtggtcttagccttcttccagaaaattggctatgtctgcccaccatggctactctgcttccgatcatagcacctctttccctgggcatacaaggaatccttgctcttcttatactgtgtcactttgtgaggctgatgcttgccacacttcttaccgaaggctcttcgggttttaggtacattgaccatctttgcagcacggctgttctgtctgcagcacagggccagccagtcatggagcccctcaaatccattggtgcactgggggccagagggcttgcaggagtggatgagaggtggctcagccttcagtaggccctggtggctgcagtcagatgtcagcacatggcactgggggtgtgggtcacaggaaggccctgtgggcctctggaaggttggcctgtcctgaggattccaggcctgctgcagccagcagacgtggcactgggtggtcttggagatgggcctgcttggctgctcacctcccgcctcagcagcagcgccgctgtgccagccctgagccagagccaagccctccttggacgcggttgcctggtaaccagccctaagtgacggcaaccccagcgggccgctaatgagggggcagcagccaaccacctggccagacccagccgcctcagccagccttagaaaggcttccacgatagtccacctggcctgcccacggtaggaggggagggtgccccagcactgggggaggggacatggtggggcgaggaggagctgggttggcggccccccaaaacctttgaactggggatctgggggaaggtgactcccgatgaaggccaagtcttgaccaaagcgcggggcgggcactgggctggagtcagggctgcgggtagggccc

SEQ ID NO: 479433 - DNA, 1000 bp, Homo Sapiens
ttagatgatgatgtttatctccctgttctcggctgcctggtaaaagaatgacacacaggggttgccgggcaagcctgggtgctcctgggtgtcctgcattacaggaggcagctgcacgatctgctgtgcagtggggttgtcatggggagaaccctccccggccgctcccggtgcaggctcctcgctatcgtccaggctcacttcataaaaatcaccctgctcatcggcagccccaagttcctggggggctggggcccctggagcgggctcatcggcagggttctgggcagcggtgaggaatttgccatgcccctcgtggtcgcccacaaggggcaacaccagctcctgcagctccagcagcttcaccttcatctcctcctccttctgggccagcctgatgatgtcttccttctcctggtgccgcgtgtttggcactgccccctggctctcatattcagtgatgtactctctcatgccgtctgtcgctccagagagctggatgaatccaagctctagtttttccacctgctccttcctgcccaccttctccttcgggaggtccataaagccgctcttcaccttctccatagcctccttgagggcctggtagctctccccacacacaaagtcacccccagtccctggggctggggcctctgcctctggctccgtggcctcccggctctccaggtcctctgggatgtttggcgtgggccgaggcgcctcctcctcctcactgtccagatgttgtcctccatctccttctccagggagagccacgaggcttagctgggtctctagctgttggttctggtggctggcagctggttctgtctccttctcgcccagcctctcctgcagctcctttacttgctgctccaactgcagtgcgctcttgttctcgttattcagatcctcgaagctgcactgtggctcggccagctgcttgtcgagcttgtggttcctccactcctcctgctctcggagcctctcgtcctgc

SEQ ID NO: 479434 - DNA, 1000 bp, Homo Sapiens
ctacgcgagtgcaggttggacagcagctctgagaagatgaactccttggtctgcctgctctgccgactcctccaggagtgtcttctcgttcccacgcgagtacaggttggacagcagctccgagaagatgaactccttgttctgcctactctgccgactcctccaggagtgtcttcttcttcccacgcgagtctcgtcacgccgctgtgcctgctctgccgactcctccacgagtgtcgctgtgcctgctctgccgacccctccacaagtgtctgctctgccgactcctccatgagtgtcttctcgttcccacgcaagtgcagtttggacagcagctctgagaagatgaactccttggtctgcctgctctgccgacgcctccacgagtgtcttctcgttcccacgcgagtgcaggttggacagcagctctgagaagatgaactccttggtctgcctgctctgccgacgcctccacgagtgtcttctcgttcccacgcgagtacaggttggacagcagctctgagaagatgaactccttggtctgcctgctctgccgacgcctccacgagtgtcttctcgttcccacgccagtgcaggttggacagcagctctgagaagcagcatctcgtcgcaccgctgtgcctgctctgccgactcctccacaagtgtctgcaggttccgacgcgagtacaggttggacagcagctccgagaagatgaactccttggtctgcctgctctgccgactcctccaggagtgtcttcttcttcccacgcgagtctcgtcacgccgctgtgcctgctcggccgactcctccatgagtgtcttctcgttcccacgcgagtgcaggttggacagcagctctgagaagatgaactccttggtctgcctactctgccgacgcctccacgagtgtcttctcgttcccacgcgagtacaggttggacagcagctctgagaagatgaactccttggtctgcctgctctgccgacgcctcca

SEQ ID NO: 479435 - DNA, 465 bp, Homo Sapiens
ctatcctgcaggtggagctgaagagccaagaggctgagtctgcagcagcagcgagaccattacctgggtcacctgcagcagtacgtggccgcctatcagcagctggcctctgagaaggaggcactgcccagccgcctgggtcagtagacgcttcactgcctgtggtcctgcgcctacacctgggcctctgtacccgtcagttcccccagtctggttcttattcccctctgcacctaccacgctgatgcactgggccagggagagcgccgtctggatggagatgagctgtgaggagctggtggctgggcggatcaggttgttgtaacaggttttgttcagaaggtcgtccatcagtttctgctcggcatgggccatgcggcagtcccctggggctgctaccccagaggccagctgcttgagtaccccggaagccagtctgtagccccaggctacagctgggtccat

SEQ ID NO: 479436 - DNA, 471 bp, Homo Sapiens
ttagatgatcccaattttgttggcaacatccaacgcatcgtaatcaggagccagtcgaacacatgccttcttctctccatcaggcggaatcagggtggtgacctcggccacatcaccgtcatagagcttcttcacagcctgtttgatctggtgcttgttggctttaacatccacagtgaacaaaagcgtgttgttttcttctgtcctcttcacggccgactccgtggtcagcggaaacttgatgacagcatagtggccaagcttgtttctcctgggggtgctcttccaaggatattcaggccgcctccggcgtcgcagtgtcttgggccgctggaaggtgagtgacgtgcgggtcttcttttttatgtggctgtggacacctttcaacgctgccttcttggcctttaaagccttcgctttggcttcggcttcaggagaggcaggagcttccttctttgctttcagcgccat

SEQ ID NO: 479437 - DNA, 1000 bp, Homo Sapiens
ttaaaaagagcagattctagagatttcactctgtttgcatttctccttccatgcaagttctccttgagtttggctgaccacaagctcatcttcttccaggaagtgagaaaactggtatttgggaatgctcccagtagcacctgctttttccatatctgcactgatacctaattggaagccatccgcgttggagacagtggcgttatttatattgaagctgactcccaaggaaaccaggagggtaggaacaccgccactctggatcacagagatctcattggtcttcttggccagaccaccattgagcatgctggtgtcctggttccacaaaacagggcccatgttcactaaagtggccagaatttccctgggaaatatttgagactctttccatctgcacccacaaatgttgcatgcaaaaggcttctctccagtgtgagtgtgctcatgaatctgaagaaagctaatgggtaagaagttcttcccacaccacgtgcagctgtgttgcttggcctgttggcatggttcatctacactggtgctttcaaaaacatcatcatggcacatggcactggtgctgccattctcatccaccgtcattggctcaggacccataaagtcacaggaattctctggcaggggaaggttgggaatctgactggccaggtccatctgaatatgctgccacaacatcacagcaccggtgaacttctttcggtggcaaatgaggcatttgttggggtcagtggtggtcatgtcgatgtactccaccagctgctgcaatttcagggtctctgaccctggttcaggggtcccactttcttggaagccaccaaccttacacttgtccttgtagaggatcacctcgtctttgggtttaacatccactgaggagatgttcagtggcttccccttccctttcttggatgggtctagtgctacagtggagaaaggactttggaagcacaccaatcccggggccactgggcccgcatctgca

SEQ ID NO: 479438 - DNA, 813 bp, Homo Sapiens
ctagggggagcagcggaagtggaggaagccaggagctggggagatggtgtctatttttgttttctgaaaaggggcgcctaggggcttgcacacaggtggcagctgcagctggggtgggtcacgcactgacatccccgcctgtcttgggaacagcttccagcagccggtccctgaacactcctcctctccctccttggcctcgctgacctcagagttggggacccggaggccggcgtcgatacactgctgcatggggaacttggccttggtggggtccatcttgctgcatttgcgcgtccttcgcattgaagccctgctttctagacgcgcagcttggcgcagccccgcacaggctccgtggaggcttccagctcgtccttgaagctctccatgcaccagcctgaaactgcttttgctgagcgtgtccacgttccaggtcatgctctttttcttgggcatctcctccagcttttgctcccagctcagctcctcgtgtagccactccacctccaccctggcaccctctgacacctccagctccttcagcttcctctggcactcggccatcttgcacttgtactcccagcagcccctgtccagttcctccttctccttctggaactgctccatgagctccacccgggcttggtgctgccagcggaagaggttagcccggtgggtgttgggatgcctctcctcttcatcatcgctcagtgtggccccacacgctgtagtccaacattttgcctctgcgacccagctaactccctgaacagtggttctcagtgaggtagtactgccccctagggccat

SEQ ID NO: 479439 - DNA, 1000 bp, Homo Sapiens
tcactcacgcgacttcgacttccagctgctcagctcgattttctttcccactcgcacccgagttctttccagagcgtcccacctcctccagcccatggagccgtctgctttcataagtggctgtggaaactggtctgaggtcccagacgctgtcactgtgctgctgccctccgctctctccaagcaaagcacaagctgagccgccttggaaagacaaccacggcctggcctgggaatgcgcaagttcagagctttgcagggagtgaccatgggctgtggcttcgtgaaaatgtcacgttcaccagtaccaagaaacaagtgttcacaggtggaacactgctgtccacttttgcttggtgtggactcatcaaacctccagagatcatacagcagtccaaaaagtggggccccagaagagggaaacctcatgtttttagatctgtccataggcttgattcctgcctctcctgctactgccgccacggtcctctgctcctgcagcccccactgggcgccggattccttcttggagtgcggaggtcctgttccttcaggaacgacagacagcttttctccccgtctcctcgtttgctcagccggcaggtgcaggactggagatctgaggtggtcctgcgtctcgaggagccgggcgcccgactgctgcgaggcgagttggtctgcagcctgggcctttgtgcaggacacatcgccgcccttgtcccgcttgctcccccgcctgccacgcaacatgctcaggtgccagatctcgggcattcctggcaagcgtaatgcagtccctgggggggccggcgcggggtgaggtccgggggctgccttattgctgaggtccggccggttggggccctggcggccgctaggcgctctggctgcgcagctcctgggagatgaagcgggcaggcgctccaggtactggctgtagagctggatgtctttgtgcccggcgccctccacccacagcggctccacggcgttggggcag

SEQ ID NO: 479440 - DNA, 1000 bp, Homo Sapiens
tcactgaaactggccctcagcccccttcaaactggacttctggtttcttctttccttctgcccctgaatttggaagagcttcttcctgaggtccttctgccacttcagcttctcctcctcctccttctgcttggctctgaagtgctctttattgtgcaggtgccgctgctccttggccttcttcatcttctgactgtgcaccatactcagagcatccagcagtgtgaggatcttgggcttgttcttaaatggcagggccttctgcaaggcttttggaatgtgcagtgaattaaaatgtttcttttgcctcaggattggcttatacagagagtccttatttgcctttagtctgacaccataggcgagcctgagttggcccgtggtccacattcctgaccaggtgtctttctcacccactggtttcaacaaagatgttactgggttatagaaggctgggatggaaacaggataccaagttcgcatgaagacaatatcgctcatcagcagcttatcctcaaagctggcccggaaagctccttctggagcacagagtgctttcttgatctgcccccttatcccactcaaaaagaatacaactctttcattttccccaaaataatcatgtgagttcatgggcatgctcatcactgctgtcttaataaatgaagtgttcttgaaaattttatatggaaaaccagttagctttaatttcttcacaatttttatggatttatccagatcaaggacaactcctgtggcagctatccgaaaatcaggcattatgccactgacagactgtattgccaagaaaccagttccctgtggagtgacagggtcccaaaaggctgctccgcaatgcatgtgctgtggggtatactttagaagcctttgtcttccattatggtcttcgatataatagagcgggatggtctgaaacctcctccaccctacagaaaatatgattggatctcgggacttgaggattttcttataccagcga

SEQ ID NO: 479441 - DNA, 552 bp, Homo Sapiens
ctatttcaggcagcgctcgaagtaggtggagcctatgtagccatcccgcatggatggctgcacgttctgctccaacagctgccggttgttctgcaggacctctgcggccttcttgttcagtgggtcctcggggttgggctccaagtagagatactgcaggccataaattatggagtttatcgtaaggactggcttccagttctctctgaggatgttgaggcagacgttgccctcgatttcaatgttggggtgatagaccattgtctcacacttcaccttggggggatcatgcgggtaaccctggcccaccttaaaactgaacacaaacttcccactcttgtagaagccctcatcaggacagatgaccaacttgaagttgaggaggtcgtctggatctgagaagctgatatcacacgtcttgggcaggttcagctcgtttatgtccttctggatccgcagctgcgccgccgacgccttcttgctgctgcgcttggtgcctcccgccgactactcctccttcttctgctgcttcagcgagaacagcttgatcat

SEQ ID NO: 479442 - DNA, 921 bp, Homo Sapiens
tcacactgtgagtctctgggggtcagagaccacttggtcatttttagcaccacatgcttggcccaccagggcacctagcacagagtgaatgctgaaggcagagttgctgaaggcagagttgctgagaacagaaatgggatcttgaacctcctttatgcttctgaacaccaccttctctagagttagggccagggccagctctagagtcagcaccagtgacagcaccattgctagagccagcctgggtatgtgactagagtcaagaacaacttcctggaggacgagctgtttgaacccaattctgatcaggtttgggccacatttcttacattcatagggtttttctccagtgtgagtgcttttatgttgttgacaaaaactggaagatctgaaggctttcccacagtctttactgatagggtttctctctggtgtgagttctttgatggtatatccgaaggctttaccacattttttacattcatagggtttttctccagtgtgagttctctcatgatatcaaaggtaagaggaataactgaaaccatgaccacacttcttacatctaaagggtttctctccagtatgagattttcgtgttttggaataactaaaggcttcaccaaattgtctacattcatagtgtttctctccagtatgagtggtttcatggttacaaagataactgaaatatctgaaggccttaccacataccttccatttacagagttttgtcccagtgtgagttattttatgtttctcaaaagaatccaagtggctgaaggctctaccacattgtttacacttacaggctttctgtttggtgtgatttctctgacgtatataaggtacattgggaaaatcaaaggctttttcacatacagtacttttataaggtccatttctagtgtgcaatgccat

SEQ ID NO: 479443 - DNA, 1000 bp, Homo Sapiens
ctagggacccgagtcctccaggccctttggggctgctctgaaagaagggtgagccaggcaagccgggccctcggtgtctgcggacgcggggacagcggcgccatcagcacggccacctacatcacggtgccgtgcgtcgtcttctacctcagtttcaataaatcccacacgaatgttaggatgtgctgaagtctgacgggcgctgcgagggcagcaatatgtgcgcagaccttggtattagcatttggtgacccactttggggccagataactccttgactctgaacacaggtcctgatccaaagttgctgccctggccaggccagaagttctgcaggcctctgacccaggctgaattttttcctcctgcactagctgctgcatggtctcaaattctgtgatcatataggtcaggaggttagcttcttggagcaggaaatattgtttatgggccaagcacagcaccttcagggccaacccagacttgctggccagactcaccaccctcttagccatggctactgcactgccatacacttcattaaagccaaggctggccgtgatggctgcaggtattgggcttctgtcccaggttcttctcttgaagggtttgaggtcctgcagggagctcttgggtgcagggctgagtgggagggtacagtgggaaagggagtagaaaatccaagctggcccttgatggcacacactggggaacccaatccccttggcccagtcagcatatgtgagggtgttttatgtgttcttgtaggccaggctggaggtgctgatggcaacaatcatcaccatgtggcagttacccctgagggagtctgagaaggcaggccagtttgctgtccttgcagggcacatgggtcttgtggccttagtctttgcatcagccagggcattgaggatgttgatgagcgccagcagagagtgattgatgttggcaccctcccgaagctgatccctgttctcctgggtactggatgtcacctca

SEQ ID NO: 479444 - DNA, 1000 bp, Homo Sapiens
tcaccccgaaggcttggcacccgaacatttagagggacagatttctcgctctcctctctcctgtcccgtcccctccgctccaggagtgacattttttccccaagagtggggacacggattgaaggccggagttccagccagaactctggttctgcgcgggccagatggagctgtttccgttgcacagacgacgtccacaacttcccatcgctgggcgtggcgaggaggggctgccccgggctgcgcgccctttacgcccagggacagggcctggggacatctgagggaagtgatccggggggctgccgcccaccgagaggggcaggcttcgacagcgccaccctgccgcacatgcccggcgcctcgccggccctctccaaaggtgtccaggggctgcgccgcgacactttccaccgagcgtctgccagcagctggaccccgctctccaatggccgccgccgccaagtccccggggctcccgcactccgggccgggcgcgaaggtcaccgccctgcaccaccttgggctgcgcgtccatttccaagaggcaggcagtggggagaggggagcgggggcgctgtgttccctttccctctcatcactaacctcccaccttccagcggtttccccccgccacgggcttccttcttcctggaaaatatacttggaagagcagtttggtgattgacagggacagttcggcagctcattgatattttcgcagctaagctgaagtactgtgtaagtactgggtaagactttcaccgccgacttgatggccttcaaccaatgaccagggaacattcgatagatagaaacatagcctggtgtattatctccaaactgatgaacatggaatctgtgctggcgttcagtcaatcctgtaatgcattctgacaccataaatggttcattttccttctgctcaaagtggatggtgccctgcaccgggctctggcccttcaacatgtacatgaccttcatcattatgactccaggg

SEQ ID NO: 479445 - DNA, 1000 bp, Homo Sapiens; identical to SEQ ID NO: 346958

SEQ ID NO: 479446 - DNA, 1000 bp, Homo Sapiens
tcagatggctgccgcatgccgctgcctctccctcctgctcctgtccacctgtgtggctctgttgctgtagccactgctgggtgcccggggagccccgttggagccattgtacccaggggacaataccacaccggagcagatggcccagtacacagctgagctccgtagatacatcaacatgctgaccaagccttgcacagaccccatggaagtgactccacaattgtgtttcccctcaagtcctgactcaatctggtgtgtgcaaatgacctggaagtagaaccaggtcctggggccccaggaggttggtggtcggggttccgaggtgttcagccactggggtttcgtggtggtccatggagggggtttcgtggctttcggtggggaggtgttcgtggcgtttgcaattttcttgtggtttttagatttctttgtgttcttgatcgagcctaaattcagccagctggcggccctggactgctgcggcacctgcagcccctcgcccagggcgccctccggcggcagcagcacccacacgaggccggccacgaccagagcgcatgagcagcgcagagcccgcgtctggagggggcagggcggacagagccgcgggcggtcacgtgaccccacggctggggtcggcgcgatccctgacggtagcttgcgggtgttccgcgccgtgggcagcctgagtccctttatattcctaaggatccatgccccctttcccgctaaagttccacttccagcgcagccttcttttcctccccctgtgtcatgacctctcctgagcgggcccatcctgccctctaggctacagttccagcgctcacgacggagctggaactcaggatggaactcaggatgggactgaaactggagcaggcccaggtgtgcagcgtcccgcagggtctcagccaggtaggggtccctccagcagagctgcttctgccgctgggaaaacttcagcatcagcaggtcacactgcttcaggttggcc

SEQ ID NO: 479447 - DNA, 444 bp, Homo Sapiens
tcaacttggaatggtggtgtcttccagcttctgctgctggctggcaaaactgtagtagttgttggggcccaggacccaccctcacttcttggtgttgtccatcatctgtttgggtgtgttgaggaagaggatccaggtggccttggtgaaaaggattttctcataggccttctcaatgcacccagccatctcatccctgatagtgtcaagcaggatgtggatgaaggtgtagctcttggcagggatgttacccttggccaggaacaccttgttgtagccgccctccatcaggtatggctccagggacacagggcgcttgatgtaggcattggtctgtgtgtccgtggcaggcagccactccaactccatgtggaactcagccacagcacaatatttcttctctatctgtgcaaaagggtaaaattgcactgaaccaatggtcat

SEQ ID NO: 479448 - DNA, 621 bp, Homo Sapiens
ctaagaacattctgtatgggccattgtcttctccagggtgctccttttatgcatggcccagcagttgtagctgctgcgggatctccactgttcaggcatcaggctcaggtagctgctggcctgtttcttgctctgtttgggaggcttagtggtctccacgtcctgggtgatgatgatgccgtctgccttccaggccactgtcacggtgcccaggtagaagtcattcatgagacacactagggtggccttgttagcttggaactcctcagaggagggcgggaacagagtgaccaaacggggagccttgggcttacctaagacagtgggctgggtcttgctgccaaacatgtgcgacagtgaatgatgcttggatcgaaaccctgtcccttcctcactgcccagctgagctgttggggcagctacagccacaggaatactcttgagaaaggagtgtaatacctgtgtcctcggggagggcttggaagaataaagaaggaacctggacaaggacagctcgaggggtccttgcttcgagcagacaccaacaggattcgggaagtccagtgactgacccctggacagcaggcagcaggaatgactccgaacatgctttaaaaccat

SEQ ID NO: 479449 - DNA, 1000 bp, Homo Sapiens; identical to SEQ ID NO: 346961

SEQ ID NO: 479450 - DNA, 315 bp, Homo Sapiens; identical to SEQ ID NO: 346962

SEQ ID NO: 479451 - DNA, 1000 bp, Homo Sapiens
ttaaaagattttgccacggtcttctgatttgtatgatttttttccagtatgaattctcataagtttagtaaggctaaaggactggttaaaggctttcccacattcacattcttgacatttgtagggtatctctccagtatgaactctcttatgtttagtaaagcttaaggaccggtaaaaggctttgcaacattcttcacatttatggattcctctccagtatgaattctcttatgtatagtgaggcctgaagactgcttaaaaagctttgccacatgcttcacatttgtaggttttctctccagtatgatttctcttatgttcattcagttttgaggagtgtttaaagactctgacacattcttcacatttatagggtttctcttcagtatgaattctctgatgtatagtaagctcagaggaccacttaaaagctttgccatattcttcacatttgtacagtttctcttcagtatgaactatcatatgcttagtaaggcttgaggaatagtaaaagcctttgccacattcttcacatttgtaggattcctctccactatgacttatctaatgttcattcagttttgaggatagtttaaagactttgccacattcttcatatctgtagggtttctctccactatgaattatcttatatacattaaggtctaaagacttcttaaaagctttgccacattcttgacatttgtagtgtttctcttcagcatgaactatattattttgaataaggtttgaggaacagtaaaacgctttgccacatttttcacaattgtatggtttctctccagtatgaattgtcttatatatagtaagatttgaagacccacattcttcacatttgtagggtttctcttcagtatgaattctcttttgtatagtaagccccaaagactgcttacaagctttgccacattcttcacatttgcagggtttctctcccatatgaattctcttgtgtatagtaaggtttgaagaccac

SEQ ID NO: 479452 - DNA, 369 bp, Homo Sapiens; identical to SEQ ID NO: 346964

SEQ ID NO: 479453 - DNA, 702 bp, Homo Sapiens
ctatcgatcagactcgtctgctctcagagcgtgcggccgggcttccagcctggcctttaggcgcggtggcggcggtgggacacgcgccaggcgcccagagaaggacatgggacaatggcccagcccgaggacgccagacgccgccgcccgacccggggaaggaagctcctgcagccggtccgggaacccgaggcggggagggaggccagctctggaggtgcgctgccgctttaaaataaaggaccacaaagactgtacagtggggaaaacgcgcctggctaatgcgagtggggacgacttggggagggggttgaggaaggtagggggcacacgagccaacggcggctcacggctccccctctctcccgcctctctccttcctccctccccgccgggctgctccggcagacaaataacagaggaaggcgagtcactcaccgtggtcttgacaggcacgtagagcacttgcttggcgccgccgcctcccccgcggacctcgtccggctggcccagctggaagcccttcgatttgacccagaatttaaatttggcgttgtccgtggagctcgactcggagccattgaggagctggacgatccgttcgtattttttacgggtcaccgtcttggtcttgcctgagtccccgtaagtcctgaggcaccagtcctggaactggcggtacatgtcgcgctcgctctccat

SEQ ID NO: 479454 - DNA, 645 bp, Homo Sapiens; identical to SEQ ID NO: 346966

SEQ ID NO: 479455 - DNA, 1000 bp, Homo Sapiens; identical to SEQ ID NO: 346967

SEQ ID NO: 479456 - DNA, 1000 bp, Homo Sapiens
tcaccaccaccccaggtctggagcgcccggagtccgcgactgctgggggtggaggcagctctggcccggtgctgccaggtccctgcccctgctccgagccactggcgcgggctgggtcccaccccggtgtcccgtgtggtctcgcagctcctcccctgctggggccccgctgaccagaggggcaccggagacctcgctggcatgaggggccgtctggctggacccccgccaccttgggtccgagctggctggtccagcaccacgttttttactttcttctaattttcttttctttttgtctccacatggctggtagcttatcatgattgtgccttccatcatcatctgtgctttaatctttggagcaatctttcggagttcttgatctctttcaaaaccttttggaatatgtttaagccttgctgggaaataccagaagcagacattagtgaactcaggctctgcatcaaacacaagcttaaagttatcttttttctttaaaaccttatagaagtattttgcaagttccatatatttgttgatttgttcctcaaagccaagggttccctttgctttccacattaaccactgcttgaagatatcaacatgtcggccacactgaatagttttatccgccgtgtcaaagtcaacattgtagagtttacctgactggaaaagatattcagcttgcatctgattacatgcatctagaaggccctgcaggctttgagcatctgccattttgtggatgggatattgctgccatgcagccaacttagcaggagctgaagcagagataatgttaacagttccagtcagcagagctgataatgcactttcaataccactgagtttataggaatagtttctggatagcagcagtccacctccccaagctgcatccacatgcatccagagtttgtgcttctcacaaatatcagcgatgtcagggagagggtcgaaggctccgtacactgtgcttccggctgtggcacagaca

SEQ ID NO: 479457 - DNA, 1000 bp, Homo Sapiens
ttattccacaccgggacagagggtcgtggtggagggtcgttccacgccgggacggagggtcgtggtggagggtcgttccacgccgggacggagggtcgtggtggagggtcgttccacgccgggacggagggtcgtggtggagggtcgtggtggagggttgttccacactgttggcacaccaacatgcatgctgggggtaggagccctgggtggaatgcttggcatgggcttgctcccaagaagtctgcctcggaagcaccgagagaggagagaggggtctatttggatttttctatcaaatgaattcattaaaaatagcatgtaggtgaacttatccgcttctgtgtcttcaaactcctggtagtacctgtccatgaaacgtctctgtagtagctggaactcctcatccatgatagcgtcctccaaatatcccaccacaacctcaaattctgccatgccccgcagtgtcacgtggcttagagagcggtcgtcacgtgacccggaagtgatggtcacgtgaaggggaaatggctgtctctgcccaggtaccctcctagatccacggagtccacactgaggccttggcgcccaggccattgccagggcagcttcctcttctagctgctcaggccataaatctctagactgccaggctccaaactcatggggaatgtcctgcaccccagcagcaagtccagttttgcagaattgttttgaggcagcagcaaacagcagcacaggacagaaaagccttttatccgccttcatcccggagatgaaatgaagcatggtctgtggaggaatacgctgcgtggcccggcgattggagtgtccaagaagaatgacttggtgattcatgacatgagtctggtggggtgaagtcctagcatgcgagaaggtgtgaacagggagacacagcatcgcgagggtggtgttccgacagcgcagtcctgaaccaggttgaggcgggagccggctggctggtttgcttctctccagg

SEQ ID NO: 479458 - DNA, 1000 bp, Homo Sapiens
tcagagcttctgtccggtgtcacccactatgtggaccaagcagacagcatcctccctgcgttccaaggccttcctccagggtgaactttctggcaccacataggctgttggtttaagccttttctccagtgtgattttttttttatatttaatgaggttggacttgtggctaaataatttcctacattcactacactcataaggtctttttctagtatggactctcaggtgttgaacaagtatagatttaacgctgaaggctttcccacattcgagcctttcaccagtgtgaactctctgatgtgcagtaaggccagagatttggctaaaaaccttcccacattcagtgcacttataaggcctttctccagtgtggattctccaatgccgagcaagtgtgattttgcagctgaagcatttcccacattcactacacttataaggctttgccccagtgtgaattctatttgctgcactccagtgtggactttctccagtgtggactctctggtgctgaatgagtgtgtgtttgctgctataggctttcccacattcactgcatctgtaagccctttctccagtgtgaaggtttttatgcctaacaaggtgggtgcttctgctgtaggcttttccacattcactgcacccataaggcctctctccagcgtgaactttcttgtgttgaacaagatgggagctttttctgtaggctttcccacattcgctgcacccgtaaggctttaaacccatgtgaactctctggtgtacagtaaggctagagttatgactgaagaatttcccacattcactgcatttgtaaggtctttctctgctgtggactctctggtgctcacaaagcctatttctgtggctaaaggctttcccacattcactgcacctgtgatacccttctccaatgtgaaaggcctccttgcactcagtatttctgggtgaattctgggtctggtactggagaaggcctgacctgggcaggaggtcc

SEQ ID NO: 479459 - DNA, 1000 bp, Homo Sapiens
ttacagcggatgggtgcatgcgggcggtgacccgagctcgcgcgggctgcggaaccctccactcaccaacgccggcgccgccatgggcccagggggctgggtgaggccgtgagagtcggcgaggaagccggtcctgcgggctcggccgaccccgggctccggctctgggctgcgagggacctcagtccccgccgtcgtgtaaaatgcacacaaggttcgcggcgccgcctctgcgcgccgtgaggacacagggctgtcgccaaggccccaggaagggttttgcagacgcttgtgggggtgggatcgcggttgctgttgaaagggtttaatttgctgcacagacttttctttagtgtgaactcgatgcatattgagagtggaggcctgtctaaagaattccccatattctctacacccataaggcctttccccagtgtggactctctgttgctgatgctggagaaagcctgctgtggctagaaagtccccatcctcctggtgaggaacaagtccatatttgcagctgaaggttttcccacattcacagaactcataagccctttccccaatttggactctttggtgtttgacaagtaagggtttgtatttgatagctttcacatatgtgatacactcataaagcccttctccactgtggactctttggtgctgtgacaattcttttacagaaaatcttggctgagaagatgcttcctcatctttcacttcatgccaataccctaaaagcaaagacatgccagtgaagtgcacgtggactttggtgagaaggggcactgacatcacaaatgtgtatctgccacttaatagggccaggacccctctgagccgcatgtccccactaagaagcacccatagctcttccccctgctcccagctgagaatagtacctggataatgcaagaactgtgtatgatccataagcacttttgtggccacaggaaccacactggctttcagaaacggcttcatcacccatgag

SEQ ID NO: 479460 - DNA, 837 bp, Homo Sapiens; identical to SEQ ID NO: 346971

SEQ ID NO: 479461 - DNA, 672 bp, Homo Sapiens; identical to SEQ ID NO: 346972

SEQ ID NO: 479462 - DNA, 1000 bp, Homo Sapiens; identical to SEQ ID NO: 346973

SEQ ID NO: 479463 - DNA, 1000 bp, Homo Sapiens
tcagcccgtggactctatgccctcacactccttctccccccctccaagttcaggcagcgcctggggcaggtccccctcaggcatctgggccacctcggcccactgcgtccgcagagtggggctggcccctcggctcagcagaagccccacggtaggcccatgccctcgctctgcagccaggtgtaggggggtctttcggagccagccggtagcatccacctgggcacccctgtccagcaggcagccggcaacctccacgtggccttcccgagaggcgtgatgcaggggtgtgaggcccagggtgtcccgcgcatccacctcggccccctgggtgaccagcaactggacggcaagcaggtgtcctcgggcggcagccctgtgcagcgcagagcggccatgcctgtccctgatgcctgggtctgccccgtggcccagcagcacctcaatgtcctgggagcggcctagggcggccgccagacccagcgctgtggcccccgcgccatcccgggcgtccacccgcgccccgcgcgccaggaggaagcgcagcgccgccccgcgccccgcagcggcagccacgagcagggcgccgtccaggcccgcgccgccggccgccagcagcgcgggtcccgggcccggagcctccagcaggcgcgcggccagcagcgtgtggcccagggcagcggcccagtgcagcggcgtgaggcccgtcccggagcgagccgccgccgaggccccgcgctgcagcagcagctcggccacccgcgagtgtccgtgccaggcggcctcgtgcagcgcggtgcgccccgcccggtccaccgcgcccaccggggcccctcgctgcagcaggagacgcaccaggggcgcgtggccccgcagcacggccaggtggagcggggtccggcctgcgtggtccctctcctccacgctggcaccttgccgcagcagctgcgtcaccaggcctgcagggcccctccacacggcctggagcaggtgcccccag

SEQ ID NO: 479464 - DNA, 459 bp, Homo Sapiens; identical to SEQ ID NO: 346975

SEQ ID NO: 479465 - DNA, 1000 bp, Homo Sapiens; identical to SEQ ID NO: 346976

SEQ ID NO: 479466 - DNA, 849 bp, Homo Sapiens
tcaagatggcagagctggggctgaggctgagatagcagccccagccccaggctggttttccagggacaaggcctcttccactatctgtgctgccctctgatccaagggctcctctgtctgagtgtcttcatcatctgctacttccagggcccccgctgtctccttccttcggtggggagctccatatactcctataactcctgatgggaatgagagtgtggggagcttgcttcttggctgaatggtctgctggggtctggcatagaaagcagatggcttaattcggtctggttcctttggagagggctgggttacctgggccctgtggccttgggccagcagctccagatagggaaggtccttgaactcatcctctccgacagccacatagtaatggccagttaccagctccttccctgctgacagtgggagcccctctagggtgcagagtttgcacacagccccactctgcaacttgaccttctcagtcaggagcttcaacacagtttcccagtcctggctggcagcctgggacagcttcagactaaatgggggacttaccaggtccccattcctgaacacatggagcttgtggaatcgttcaaatccagcggccacatactgccctctgttcttcaagtctgccaggttggtgacagggtggccatgacaaggtgtgtagagggcacgcacagccagtggggcctgcacagctgatgtcacctcgcagaggaaggcctccatggtggggaagcggcgttgagtcaccaccagctgggagcctgggaagaatgggtccccattccggtacaccactaccctcttggctgctggactgccacctgccat

SEQ ID NO: 479467 - DNA, 1000 bp, Homo Sapiens
ttaggcaggaaagttgaccatcttactaggctgggaccaaggagggatggggaggggatctgggctgccagagcatctgaaggctggaaattggggcaggggaaggtgagggaattcccacccatctccatactgagagtcacttggatttccaataaagggcagggaccccatggtaacctggatgttctgggctggctgagtgtgggggtgggggttgcgggggatggtggagtaggaccttccaattaaaggaaagaagactggcagagagagggaagctgggtcaggacttatcatcatggctggggcaatcacccctaacatctgccaaaggtccaggctgagaacactaatgttataatagtgacaaatggtggcgtcaggcttatatttagggttgtctattttgggatgaatctactccccctggtaattgggattttcaatgatccaaggtttccattctcccttatacttcggatttggcatcagaggcctttcccactccccatccatagcctccttccagttatctggcttcttggcttctggatccaggatgtattcaaagtcttcccagtacacctgctggttgtcaattttaacctcataagtagcattggggcgaataatcagagtgtacaggtgagggtctttattgattttgttgttgccaaagccacaaatgtcagggccaaacatgatgtgatacttggatcctgagtgcatatcctcctggttcagggtggcaggaaagagttttacatatccgccaccacaatacttcctttgcttgtgttttactgaaaactgaaacaccaaggtctcattctcattgctgaatgcttcaactgagttccagtatttacctttatctttttctttgtctccataaaattatcctgcagcgagctgaaatttaccataatccggctgatgtttagactgcacccatcgttttttccattcatccccgtctttgaactcctcgcgcagg

SEQ ID NO: 479468 - DNA, 1000 bp, Homo Sapiens; identical to SEQ ID NO: 346979

SEQ ID NO: 479469 - DNA, 417 bp, Homo Sapiens
tcaaggactatcctctatcctacgaagatagaggtctcctccaccttgactttttgtacatccatcttctgtccaatccttcttctgagcaagggacattttggaacggttccacctcttctttttaacttctttcttgggcttcttttcatagaccggattctctggtacagcagcatgagctttcttatacatctcctccatcatgtctggagttacactgttctttatgtattgagagaactgtttcttgtaagcatcttcatcttcggttgaaactctgggcgccgcatcggcactttgcgccttggtgggctttgcgctcggaagacgcgtccacgcaccattttcccaggcgttgtgcgggtttcttaaacctctcagctggtgcctcggaagagtttctggaagctccat

SEQ ID NO: 479470 - DNA, 414 bp, Homo Sapiens
ttattccattggggatttatagggtccttgcatttgggcaaggatgacctcacccacagccttggcagcaccagtagatgcggggatgatattctggagagacctgtgatcgtcatgccacagcttcccagaggggctatccaaagtcttctggctggcagtgatggtgtgcaccatgatcacgagtccttccacgataccaaaattgtcatggatgaccttggacaggggtgctaaacagttggtggtacaggagtcattgctgatgatcttgaacctgttgtcatacttctcatggctcacatccatcagaaacctggggacgttagcagctggggcagagatgatggcccttttggctcccctctgaaagcaagccccaaccttctccatggtagtgaagacaagtgccat

SEQ ID NO: 479471 - DNA, 1000 bp, Homo Sapiens
ttagccactgatatttggtaacggcaaatcacattgtctgtcctttggtatatggttagcacagaaagcttctggttgggccagtgactgcacaggttttgatgacacgaggaagacaataagttggccattgtgtgaaagggaggcagcaggatctgggcttgtgcccttgtcaccttctgtatgaagccaggaggatgaagcttgatgatatctcctgtagcgattgaaggggagttgacaggtataaattggcctgagcaggaatctcactatttccagcaggaagccaatccagcatatcagggctagaggaaggctccatctggaatcaaggcagaggccaaattctttgttcagggtgtaactaaggtagtcatagctttggtaagacatgtcatctgagatatagtagaactgtcctcggatgcttagggccttcttggggtcctgcagggaccacaagaccagaatgtgggcccaggccacattgccaacatagactgtgttgatgtggataacttgctgacacttgacaggatcccattgtaatggggcctcatttgtagtggcagaaagtatagggcttccttcctcatagatatacatgagttcttattcgtggccattctggatgatctcattgcaggagttgggcctggatacttctatgatgctggtgtggatgaagcctggcatactagcttggacacaggttcccaacagaagttgggtacctttcacattggctttcatgatagactgtctgtgagtgacaccgaagacgtcaatgatagaggcagtgtggatgatgaccaagatgtcctggcaggctcttttaaggcatgactcattcagaatgtctccttccaacactgttagcttggtcttgttttggagctttgcatgaacatgggtcaggtcattgcaatgatttctggatctggctaggaagttttctttaaggtcctggtacctattggagctgggctgcccatcc

SEQ ID NO: 479472 - DNA, 1000 bp, Homo Sapiens; identical to SEQ ID NO: 346981

SEQ ID NO: 479473 - DNA, 1000 bp, Homo Sapiens
tcaataagaccattcagagaacttgatgtgtgtcccctgcagcttggggatgcactggacaggtgcttgactcacatctgagcctatggccgcagagtcaggactaccagtggggaaactgcatccaaattgaggagtcaaatgaaactgcttttcatctgctggacacgggaccgtgtgagccacagtatctatctcacaccagaaggaccatgaatcttcactccgcatggcactgatctggaacttcggggagctgctccagcctgatcccagggtctggccatctccgaagaagcagaactggagctggacttctgatctctctagagagagccgggtctcacagatcagggtcactgggctccctttggtgggctgggaggagctggctctcagcactggacgtgaaaacagctcttggacttggattttgactatgttggaagaaacagagaaattacttccgttaaatccagtaaagtgatatgcaccattgtctttgagacttgcgtgatgaatatggaagtcagagcttttattaaggaatgtcaggacgttaccattcttgtacatagtattcagtgttacttccgcctttgcccggcacctcagaaccacgaagtctccttcaaacacagaaagtggagcttgcaggatcagcgaagcagtgacaaagaggctcaccacctcactgcgctggggaccaaagccattgtcagctgtgcagtagtaattctctgaatgtccagtgacagagagactcaccacctcactgtgctgggggccaaagccattgtcagctgtgcagtagtagttccctgaatgctctgcagtcagagggaagctgatggccactcctcctgcagagtgggctcacctactccccagggtgacatcctcatgttgaaactggtacacgatggggagtgaacctctctgggcttcacagtgaagtgtcaccttggctccctcaaaattcaagtccttagcagagctg

SEQ ID NO: 479474 - DNA, 606 bp, Homo Sapiens
ttaagcccacaccttgggcttagttaccacatagccattatcttcataagtcagggtatgccgattcaggaggctgccgctgtaacaggagtcacacatctcctttggagggagcacatgatcccacaaaaacacatcccatatcaccccaacaaaggattgattttcatcaaaatgtcccccaaaggaatcctgctcttgtcccaggatgatcttagcctcttctcccacagagtaccccttccacacacccttcctccccaccagcttcccatttgcccagagtgtagcaattccagaggcagactcccagctcacattgacatgggtcgaagcataaggagatcgagggcagggggtggggccattgaaagtgactgcagcatttccaatgtgcagcagatacattcccattttgttgacaaggagaagcagctcattgtcctgggaccgagtgctgtagaagaggctataagggcaggtgaagtctgtgaaggttttcaggcaaagcttgaagttcttcaggggcttcttcactgtcacacctctcgagagagtggtgaggagcaggatacccggaagatgcctctccatcacactctccat

SEQ ID NO: 479475 - DNA, 1000 bp, Homo Sapiens
tcacaaaggcttgccctccagggggatgaaggcactgccccccaccttctctgccagggtgcagcggtccttgacctcctcgtagcagtttgcttgtaattcttgcttgatccctgtcagcttcttcttgatggcatttttggagctggcatagatcattttgctcgtaaggggtgcccattcagtggcccagaagataaacaccaggtcctccttcttgctctccttggtctcatagattgtgtcgtagagggcacagtggcagttcttatctggcagcatcttgacaaaggcggtgtaggggtcatggatggtctggcccacgtcacccaccaggatctcattgccttcccccaggatgatgttcttgtcctcactcaggcagaagagcaccgtcttctgtgcctcttcaccttctcttgaggcaacccagatgagactccacttgaaatttataagcatgaacttgagtgcctttgtccacagctcctgcgtgttcagatgggttctgatggaatagcattcccctcggccgccaacgtcctccatcaggcctgtctccacctggatcccgtagggcagagagaggcccagctcacccttctcagcctcttccttgaactgctgcatgcagtccaggaaggccaccatcgcgcggtcatacttgttattgaggaaaacatcctgccccccataacagaacaacggcagctcagtgcggtcatctgttaaagacttcagatacgaatggtttccgcaggggatgagtcgatacctctgaaactgcagtccaattgtattggccagggtaaggagcagcaaggccgcctgtccccaggcagtgttaatctcattccagcccacacggacagtggggaggcggcccaacctgaagttattgatgacgcccaaggggccctccacccagatctcaaacgtggcggtgaaacagttgatttccttcagccggtccctctggaccctggcatactgcagctgg

SEQ ID NO: 479476 - DNA, 1000 bp, Homo Sapiens
ctagaagcctggagggagctgagaacattccaagtcgaggtggcagagccaaggccctgaggtgggagcgcaatgctgcacatccccagctgtgaatggggtgtcatccaagtccactgggagtcgggacatggagttccgctgcaggtacctccaggaaccccgaggtcctccttgagccaaggccaggctgggcacaccataagtccaaatgggccgctggaaccaggctggtgggccagggggcacctgcccatcccccttgcagagggccttcctgccacgtgaagccagcacagccctggctgctgaggacccttgcctgggtttggccttggagggatgttcaggagtgaggggcctctgctgctctctgaggctgtcagtgcttgcagggaggggtggggggggtcccacaaatgggtctggctcctccagtgccgtcaagggccccagccagacctcccccttaaaggcagtgcatgccatcggcatcaacacctgttccccttctaccaaatacacatcccacaggtgcaggttgagcctgagagagatcacgtgttcctggtggtcttgtagcccctggacccttgtgctatttgggctgtagaatcctgtgggaaccaagggcagctgaagcccagccagctggaggccaggaggactctcagggaggggagagtcagctgcatagaattcgagctggagagcgtggctccaggacatagagggcggccacggcgaggatgagatgccctctgcctgtggggagtgcctctcacaagccaacagctgggccagtgcccagaatgcatcctccccaggcccataaaggagaaacaaggcagcagcgtggctcaggtccctgcggtagcccacctcctccaggtcaatctggtggataggttcagaggacctcttgcccttttctttcatgacctcatatttcccagggttctcaggcttggtttcctcaatgtttagcaggactgaccac

SEQ ID NO: 479477 - DNA, 1000 bp, Homo Sapiens
ttacctgataacacttcccaaattggttaaacttaagttaacgcacgatccttccctcagtctgtctccttcagatcctgaagatttctgcctctcacttcttgccaggtccaccaaattaatactggattgtttggtgagatctctgtctaggaaaacctggtggtcctcaggctcgtgggtctgaaggctggtctcatggtggtaatgtacagatgtgctgctgatacagttcaaggggagccttctgcagggggagccttctgcagagcggccttgtgtggagatcccaccagggggagcctcccgcagggggagcctttcacagagcggccttgtgtggagatcccaccagcccattataccaggggtagccttctgcagagtggccttgtctggagatcgggacagtggcatccactcagctctcacctgcttgaactggatggtgatgaccaagtgagaccggctgctgctggcattcatgttggtggaagctgtggtccttatttttgttccttgttccatcagcctttcaatttgggcatagttctcacagggcaccgacttcaggccttccacgtaaaatcccagctgttgatcttcccttattccgccggctccagctctgccctgcccagaacgctgcgtcatgacagtgtacgcgcgcatgcgtgttgtgggaattgcacgggagatggaaggcttcagggacacagctttctgatgaccggggctggtgttcttgatttctcccctggttctcgattgctcgaaagagctcctcacacacagttggaataataccctgtttgcaccaaacccaatcatggaatagcttttcccagagccagtttggccataggctaggagagttgcattatagccttgccaagcactgtccagaattcccctgccaaggtcatggaagacgtctctctggcctgcaaatttacgactaggatcagctgaaataaggacaccatccttatccctttga

SEQ ID NO: 479478 - DNA, 825 bp, Homo Sapiens
ctactcctcacgagtccacttgatcatggtctccagtgagcgatagaggaagatgagcttggcagacagctcctcctccagctccagctcatgggtctcgcacgccaggaagatgtcctggcagagcttgaggatgtggtccctgcatggcagctcctccagtgtgatggagtgtgagatctcgctgaagaagtggcagaacatggtggaggggtccgagatggggcctgggcttgtgatgtgggtgactcgggcgatggtgataccctccccttcgacgggaacagatatggaggtgctggtacagctcatggctctgagggctgggttttgagatgcacagagcatcttggagtcagccttggcttcagctcgcagagccggacaccgccccaggcccttctcctttgccatctccctgccttcccacactgccaaggtggcaagggcgcctgtgtccccatccgacgcgcctcccttctggcctccaatccccacggcggcactgtggccgcaaacgggtccaccaggtaacctcgtggtttttcttttcaatgcacaagtaaaatgtctccccaccgtctcatcaatcagctccatgctgctccatgccagcgccttgcccgccttcttccctcgctccctcccacattctatcctctgaaattccatgattctgccgttccccaccagcctgggcagctgcagggacaccaggcctttggaggggactgccgtctccgaattcagcacgcgggtcgtggaggcctgcgtgtcctctgtgtacacgaatgctcttctcccgcaatcatttcctgacctcat

SEQ ID NO: 479479 - DNA, 1000 bp, Homo Sapiens
ctagggggcacctgccccaggcgcatcatggtctgcttccaagctcgccttcccatcctggcctccgcactccgggccattctttgagcagctttctgaagcatggggggctccaaacgagtcgctccaggcctcagctccgagctcctgagggtcacccgctgcgttgggcgccagtgcttgcaggaccggtgtgcttgctctggctctggccttcacctgggcagcacagcaagtgtcgctgtcctccgagatgtcctcgttctcatcaaagtgctggatgcggtcgctgcagcaggcctcagagccgcgctgggagccccgctcgctcacactgtcctcgtcagtgtcgatgttgaagttgatctccgcgatctgctcatctggggcctcggcgctcctcccccggtgctcatctggggcctcggcgctcctcccccggtgctcgtctggggcctcagagctcctcccccggggctcatctggggcctcagctctcctcctctggtgctcatctggggcttcaacgctcctcccccggtgctcatctggggcctcagtgctcctcccctggtgctcatctggggcctcagggctcctcccccggtgctcatctgaggcctcagtgctcctcccctggttctcactgggggcctcagcaccctcatgcaactggaaacacttgatgttgttgtcatggtctgcaaactcctcatcattgaagccaaactgatccacaaagttggccgtcatctgctggatctggtagtcagagaaggcctgctgaagggacagctcattagggaaagcaccctcaatgtcctcactccaggagtgaaggtagtgagtgcttgcacttgcagggtatgctcgggcacccgcgtccaagaggagcaggcaggtgtgcggcccttgtgcctctcttggcctctgcttcggggcaaagacaggagtgtctgacagtgtcccagcaccgtgcatgcaccaagggggcagcccc

SEQ ID NO: 479480 - DNA, 1000 bp, Homo Sapiens
tcacggatgtagcagttttcgtaattcacagggatccatgatgagcattgagcaggcttgattctcacacacatacgcagtggcctggtcttcctgccttcggagggtactcaggaaaggcagccagtgggacaggaaactcgaggggtccccatcagccagaatcagcaccatgttaggaatgtagacagggtggacgcactgcaccagaactttggtgtccttggcctggcggtctccacagatggtgatctgcctgagggtctgctgctgggctgagagggcacggaccatctccggcaatgccaccgggacatggtgcatgtgctgggagaaggcagtcactaggcacacacacttgtccatccagtccttgtgactcgtgaagctgtgcaaccagagcgggttgtgggctgacacggaattggcgctgggctctggagactgtaatgttttaaactctaggaggaatgtcctctctaaggattcaaccagaaatctctttgatttgacatttattttacaactttgatgtttgtgaccactgctcagttcccacaggttgtcaatgatgtttacattttcaaatatttgcagattgatatcttgcttcatcttagacctctttgccaaaaaatacaaggtcagctccctgaatcttgctttcttatttcctgagttatccttcatgtctattccaaccggctcagccagcacaggagcacgtagcctgcaggtgtgggttgtacacaggcttccccctgctgagtcagttccccagatctcttcatcacttccccagatctctgggatcttcagctgagattgggccccagcacctggactcaaggtaaggccccttaggatgcttgtagcactctcagggagaaaagctgtatctgaacttccacgtgctcttggaggatacgggtgattcacggcataagagtcatctaccaagtcatctgcaagagcgagtgcagcttccaagagggtggag

SEQ ID NO: 479481 - DNA, 1000 bp, Homo Sapiens
tcacttttgcaaattcattttgttcagcagtgtaggatggccgctcaggcccaggccctggcctgggttggcattagtgcagctgtgctggagcgggtacagagctttgggagttctctgtttctgggcacgctttggcttgtacagcttggccgccttcttgttctgggtgatcctgagcttggtctacttgaaggattccaggtgcttcctcatagacctgtggaagatatctcggtcctgcttcttgtcctcagctggtgtggctgtagcgatgcatatactccttccccagcttgcacaggtattgctgcagcatgtggtgcatgaccgtgtcctccccgtaccgaatgctctgccatgctgctccagggactgaatgtctagacagacggtgctgatgttctccctcaggtggtaggagacagaggccaccatggtggacgatcgtggtgtgaagtccacgtttaccacgttatcagtacttggggagccgatgaaggccagggatctcaggcactctcctttggtcacttagctgatggcatccttcaggttcagtgcatggaagacattgaggatcccttctggagacttctgggccagccttctcatgaggactccactgaggaaattcctgtcaaagtgggaccacatgtctttgagatcattgtgcctgatatgcctcgatatgtccttgatggccaagaggatgtggtcgagagggtggcattgcagcttctcatggaacttaggctcccagtgctcactcctcttcaccttcagccactgcaccagggactagatggtcagaccccagaagatgaccttgaagatgttgacggtggtgctgacaaacaggttcttctccttgaccttgtttccattcagaagtatgaccaggatgaaagccatggccccatgcaggcctccacaggacatgaccacctggcctatgatttccagccacaccatccaatagcagtccaggagccaggag

SEQ ID NO: 479482 - DNA, 1000 bp, Homo Sapiens
ctaggacatttttttcttgtgtgggagcagatccatagccatcttctctaggaaaacagctttccacaggcatcccataggtattgccacgggcattcccatggtattctcacaggtatccccacaggggttctcacaggcattctcacaggtattctcactggtatccccacatgcattctcgtaggtatactcacgggtaatcccacgggcattctcacaagcattctctcaggtatccccacaggcattctcacaggtattctcactggtatccccacatgcattctcataagtattctcacgggtaatcacacaggcattctcacaggcattctctcaggtattcctacaggcattctcacaggtatccccacaggcattctcacagatattctcactggtaaccacacgggcattctcacaggcattctctcaggtattcctacaggcattctcacaggtatccccacaggcattctcactggtattcacacaggtattctcactggcattcccacaggtatttccacaggtattcctacagatatttccataggtattcccataggtatttccaaaggtatttctataggctttcccacaagtatccccacaggcattctcacaggtattctcactggtatccccacatgcattctcataggtattctcactggtaatcacacgggcattctcacaagcattctctcaggtatccccacaggcattctcactggtattcacacaggtattctcactggtaatcgcacaggtattctcacaggcattcccacagatatttccacagatattcctacagctatttccataggtattcccataggtatttccaaaggtatttctataggaggtattctcactggtgatcgcacaggtattctcacaggcattcccaccgatatttccacaggtattcttacagatatttccataggtattcccataggtatttccaaaggtatttctgcaggctttc

SEQ ID NO: 479483 - DNA, 1000 bp, Homo Sapiens
ttacgtgatggcagggccagaactgggagcagaagggtagggttgcagcaactcttctgagtggatcccagtgtcacggacagcctcaggacctgcagtgggggaagcatcttgcccagcattggcacactgggaagccagccctttgtacagcttcgccatggatgacttcttgagctttttccgtttctgaataagcaaatcttcattgcattgaaacagcagggtgtagtgtgagataaatactcggaggcgctggacacacaccagtagtagataatagtcagggtgctcctgctctgtgaacttcaggacgttctgcagatgtatcagatattcagggatgcgctggactatgtgaaaaaacaacgtgtagatgtcagatttaatctcttcatcaccctctttcaggactacaacatgaaccaatgagatgcactcaggcaggtcccttaggtaggcaacataataatccaagaaattattctcgtcatttgttaacttaaggaataaatctccaagaacgccttggcgtggccacttcaggaccctttcctgcagtgcgtgaagcagatccaggtgctgctggacgaggtaccgtaaagagccagggaagaggcttctctctttggaattcctctttccatctgacccctggaatgtggcttttatcttcaagatcagagagatgttaatgacatattttctttcagattcaagcagttccagggccacagtctgtcttttagcagctaaggaggtttcacataaaacgttttccaaggagctgtgtctaccctggccagcctccttgagtttatctgggtggtcttttgtgacgtattcttcaccccattctttaccatccttaggctgcctccacatgccagatgggagatggcccttggactggatatcagccgagaggcaagacttgaggttttcttctgcttctggagttgttgggttcactccaggacccatcattccttttacatta

SEQ ID NO: 479484 - DNA, 1000 bp, Homo Sapiens; identical to SEQ ID NO: 346987

SEQ ID NO: 479485 - DNA, 1000 bp, Homo Sapiens
tcacaggctccccaggagaatcagcagcaggaggaacatgtgagcagccagaagggctgcgcagagcccgggcttgtggacgatgccctgagaggtcatgctgtccagggctgggggtgtttcctgaggaggagccaaggcgggatctggaggggtgctctccctcttcttctggctgatccagttggtgaagtaggggagcctggtgaagaccctgggaccgacgggtgagcagcagtcgaggctccaactagacagccccatcaggaaccaggtgccatttaatgggcagacgaggggacccctggagtctcgtcggcaaatggcctttcctgttatgaggtccccagcgcacagcatgtcctcgtggatggtgtagtcactgctgcttggctggccggggtactggggctggaaaaaggatccgcagacagtgttgtccatgacaccgacctctgcctcctgaagttggaagggctcaggcaggaagacatcctcggtgaccattccccaaccagatatccagcaggagctgtcaggggccagccacgtggttggttccggaaggcaggcggggaggatgtgggagctgaattccacatgatggtgcagctgcagcagggtgatgtcactccccatgcggtgcaactcgttatagtcagcgtgcaccatgatcttattcactgtcatctgcttgctgtgctctgtgggatggctttgctggtcatacccaagcaggatccggtaatcagatgggttagtggactttgggcttccctcttgcatgcactcccacagcggggcccgtggagggaagatgcatctttggaagcagtgagcagcagaggccacccagttgctgtcgatgagggcagctccacagatgtgcccgcctaggtagaggagactggcctgccatggccaccgctaaggctcagccctctggcctccaaagatcttcccggtgggcctcccggaggaattgccgctgaatctggcc

SEQ ID NO: 479486 - DNA, 798 bp, Homo Sapiens
tcagcacaggtctgtggccactctagtctgtttggcttcctctgttttctgcagccttgacttgatgccacttgtgcacccggcagcatgggcatcggcatctattgtgcttgcctggtgctcgataagccccagctgaaggaagcctggtgtttcccactgctcctgaacaacccactgtacttcccactgctcctgaacaccccactgtacttcccactgctcctgaacacccccactgtacttcccactgctcctgaacaccccactgtacttcccactgctcctgaacaccccactgtacttcccactgctcctgaacaccccactgtacttcccactgctcctgaacaccccactgtacttcccactgctcctgaacaccccactgtacttcccactgctcctgaacaccccactgtacttcccactgctcctgaacaccccactgtacttcccactgctcctgaacaccccactgtacttcccactgctcctgaacaccccactgtacttcccactgctcctgaacaccccactgtacttcccactgctcctgaacaccccactgtacttcccactgctcctgaacaccccactgtacttcccactgctcctgaacaccccactgtacttcccactgctcctgaacacccctgctatatcccccactgttcctctcagtgctccggaatatcccccactgtaaccactatccccaaatatccccccactgctcctgaacaccattcgccctacccccaactgcttctgaacaccccacactgtaatcaccat

SEQ ID NO: 479487 - DNA, 1000 bp, Homo Sapiens
tcattgtatgtttctggctctatattcctggttttctcctacaggttctctggcttgctctgcatctgggaagtgaggactgttgtctataggaagatttccagtggctggaagcttatggctgatgatgtaactcagcaccaagttcacaccaaatccagcattcctaattctaacaaggtgctcttgatccaaacttagggcatttgaggctctacgttctttctccccttccctttcctctagttgctttaacacgaccaccgagagcatgcgaaagaagacacgccgtgatgtggagcaaaccttaggtacatctttctcctccatgaaattcagagtgggctctgggttcccaattgatgatgggagggctacaagaaacaggaagacaaattccactagtgtgtctttgttgatcagtgggaatgacatgatcaggttatgccactcaccaacttggtgctttccaagacattgggaagccctcacctggcgacgtgctttggattccagcagggggagctctgactctggaaaccggtcagtggccaccgaacgctgtttcaccgggtctagacctttggagatcagcgttctctggtcgccaaggttggtaacaaggtccgtgggtaatgtcgctttagcagggggagccacaaccccaattttaaaaactgcctgtggttgggatgagctagatttcctgatgccatcagtcagctctgggcactgctgcgccctgctgctctcactttgggtgccttgcacagaggaaaggcagatgaagaactcatctcctagctgaattttcaactcgattttcaaatcattttccttctccagacctttcactaatctgttggcgcgctcaatagtcttgttagttctattcacttcttcctgacagcggattttctcagctgtagccctcccagaggccgtggttaaagcagccaggtttgtgtctagttcctttaaataaaaacagtgagagaca

SEQ ID NO: 479488 - DNA, 1000 bp, Homo Sapiens
tcagcaccagcaagtccagctctcctcctcctcgcggcgtagctctggcggcgctccatcaatgctggtggaaagagtcccaggaggatgactggggctgaggtcggccatcacgggcctgctcctgggcagttttctcccctctccagcacagacccagccacgggccaggaggttgatcaggctcagaggtttgatctggcagacctgcagcagaaggacactcaagtccagggccctggaacaggaaacggaggagtccaggcccctggaatagtgaacggggtgtccagacccctggaatagtgagtgggggtgtccagggccgaccactagtgagtggagttcaggcccctggaatactgagtagaggagtccaggggtctggattggtgaactgaggagtccacggcccctggaatagtgaacgcaggagttcagggccctggaatagtgagtagaggagttcaggaccctggaatattgagtggaggggttaagggccctggaatagcgagtggaggggttcagggccctggaatagtgagtggaggagtccagggccctggaatagggagtggaggggctcagggccctggaatagggagtggaggagttcaggaccctggaatagtgagtggaggggttcaggaccctggaatagtgagtggaggggttcaggaccctggaatagtgagtggaggggttcagggccttggaacactgaatggaggagttcagggccctggaatagggagtggaggagttcagagccctggaatagggagtggaggagtccagggccctggaatagggagtggaggggctcagggccctggaatagtgagtggaggggttcaggaccctggaatagtgagtggaggggttcaggaccctggaatagtgagtggaggggttcaggaccctggaatagtgagtggaggggttcaggaccctggaatagtgaatggaggagtccaggaccctggaatagtgagtg

SEQ ID NO: 479489 - DNA, 1000 bp, Homo Sapiens; identical to SEQ ID NO: 346988

SEQ ID NO: 479490 - DNA, 774 bp, Homo Sapiens
ctagaagaaggtgttgggcctcttggtgaagtgtggcttgtgcggatagtgcagtacctagtggggcagcaggaagttgatcttggagtcatggaactgcttgacggctggccggcggcacttgctggctgtggtctcctccaccttcatgatctggacggagtgggcccgggcgtggtgccaggcgcccatgtcttggtagcactgggtgacagcacccgcggtggtcaggtccccatattcccggcacatgttgtgggtgctgctctgggcgtcacagtgcagccagatgccgaagttcttcacccgcagggggcacttctcaaacacctgcccacagtagcaatctctcctgaagacttcttcatcttctttaatctgggatagggagagtgcctgccgcatctctgggtctacatggcatgactgggccaatgtttggatgccagcagtgggcagggaggctgctggggaaacttggggtcccacataatcatctttccacttgtcagtgcgggacagttgaggacaactgacttcatccttctgaatcaggttcctcacctctccaagccttgagagcaaagcatggagatctacaaaaataggatttccacttggagaaatgtcgctgggacagttaaaccgtgtcccacacggcaatgcccccttcagcactgccacaaatgtccagccctccgacagctcggcgaggtaggttaggagcagccagcccagagccggcaggtgagactgaggtggcctgggaggcat

SEQ ID NO: 479491 - DNA, 1000 bp, Homo Sapiens
tcatccatccaggcagggaagactcttagggatcctgactttctcctggtccccacatcccctaaacccgaggaaggggtccagcagggtcccgagtccctgaagcaaggattcctccgtggtcgtgtccccacagcgggaagaactgggcataaagcgggagtgaccgctgcgcatgcgccttgggcgctgccttcttctgcgcaggcgcgccgcgtagccctcggcgagccgggggggcggggcagagaggcccacttcttgggctctgcggatatcggtgctgccggggattccccggctcgcccttcccagcttggcttgggctgtgttgggctgggcctgtgccaggctcagaggtactctcctccattcttgaggaaagggcctttgagggtattcctttcccagctgagcattaacaagagggacaaagtccagaatgatggtgaccagggtgtgtccaggtactttgcatttctgtctctgagcacccagctggtaggcatggttaaagatgaagagggactcactggcagcagccccagcctgaccgcttggagtatactttccttgacaggcgtggctatctgccagggctcacttgacatactccttctgcacagccttcaggttctccttcttcctgccccaggccttcagggcagaggccatggcaatctcctcatgagaaaacttctggatgcaggcatggcctggggtgaccatattggacttcagcaaggtgccttccaggtagatgtcatggtcactcagagccttgtagagcagccacaccttctcggttacatactggcagtaatgatgccacttggcaaagtgggctccatccttcttgtatggggcacagcgctcagacagcccatccagcccttgggtggtggtctcaccatttgccctttccaggggtaccacccccttgtctaccttgatgctcacaacattgcccttggatttgataacttgggggaagggacgc

SEQ ID NO: 479492 - DNA, 1000 bp, Homo Sapiens
tcacacctcaattgctgggtctgagccctggccctgccgctgcagctgctccttctgcttcatcttgggcttcgctgtccgtgtatgtcacaccagtacccgagtgcagttggcagcccgtggctccaggtccttgggatccacaaggtggcttagaagactgctctccaggtggctccggggagcagtggaatcaaactgggcattgggcttagctaacagcaagggcagggccacagcaaatccggccatatccacagggaagggcccgttgggctcccatgctgtgtggaagcccactacccggctgtcctgtacctgagggcccttgactcgcaggccacccaccagccccacaggccacactgagacaccacgggtccagcgcatctcctcaaacagctcccagctgtaggtgttgccactgtcagcaaagtacacgactccttgggtccctggtggtgatgggtccttcttcccacccacagcactccctctgccccggagccagtccagggccttgttccgctgctcgacaccatggggatgaacccagccaggcttgccctcccgaagccgctgggctttgggcgtgaggaccaccaggtgtgtgaagaggaggccagaggcagccagcagccctgagaccagcggggtgggaccctcagcatcctccaccagcagtcaatgcagccggggcaccaggctcagtgtctgggacagccgtaccaactctgccttctgtaccagcctggcataggtgggggtaacaacatagatagtaggcagggcctcgggttcagggggctgggcaggggcagggggtggccgtcggagttccgcttgcagctgggaaatcctcagatccttctgccgtagctgctcagctgctgcccgcaggggaggaaggcagtcacatggctggccagcgcgtagaggaggccggcgatcgacaccaggaagtaggcgagaaacacgttcttcaccttcagcttcatgg

SEQ ID NO: 479493 - DNA, 1000 bp, Homo Sapiens
ctacgcgacccgctctcgtgcatcttcagcttgggtgactgcaccgctcgctattacttccacatgtcccttcaggaaatcattgaaggcaaatatatgaacagccccttgttcggaatgccagaggggctgctttgcttcggcgacactgttagtccggtcaagccagggtcttccgtccgcagggccccagcgctctccgcccacaaatggtaacgaggcggttggttccttaaaccgagtcctgcccccacagcccccgcccctaccactgctcataggcgggtttgaatcctgttttccgccttctaaggctggtccgaggctggttcgggagaagtcgggtctgcgcccggcagtcagtccggggcgtcgggggaaggtggggctagttcttgccgcgctctcccagtgtcgttctaagatccttcgagatcggtcccacgacgccccgggtcctgggtggtcccggagccgcagggggctagaaaccttgccctcctgaggcgggctgcgggtcttttctccccttcttgtgcttctcatttcaaaaagaaggcctcgtaaactttttacaaccagatcaaaatggtcactaaaaacaaaagcaaaatctcgccgtgccctgccctgcctccagggcccgttctcctggccccgactcccgggcgagggcggccacagctccgagcgccacacctttggctttgagggcgcttcccactgagttggctttttgtgtcttctcctcctctgccccccagctccaccgccaattctactttccttgaagaattcaggtccgtttgccctagtcctccgactctgcttcatcttcttgactaatctggaagtaacaaagtttgtaagtctcctgtcagatgcaaccactcgaagccaatcatgaagactgctcttcttaaggtatttcttggtaaggtatttcaaataccttttagagaactgtttctcagaaagaactgtgattttattcttgaag

SEQ ID NO: 479494 - DNA, 471 bp, Homo Sapiens
ttattccaaatccaggtgttttcctgaagtttggcaagatttggctttctgttcatggatctttttatggtctttgtccacttttagcctagtgataaccactttgctggggtgaatgcctacacggacagttgtaccattagccttttgctgctgcacccattcagtgtagatgacatctttcttcctgtaaaccttgagtacgtggccaatttgctgacctttacaatgtccttgcacagtctgaacatcatccaccaacagaagggggatatccatagggacctgaagcccaagaatttccttgtggtccatcacaacataaaaataacagactttggatttgataccaggttcactgtaggccagaagctgggcaccttcggtgggagtccctcttatgcggtcctgaactcttccatggccaaacatatgatgggccccagtggacatgtggagctggaaagtcat

SEQ ID NO: 479495 - DNA, 771 bp, Homo Sapiens
ttagctctcggcagcccgctcctgagctctgagggagcttgccttctcttgagctacccaatctttcttctgagcaagggatattttgggacagttctacctcttctttttaatttctttcttgggcttcttttcatagactggattctctcgtacagcagcatgagctttcttatacatctcctccatcaagtctggagttacgctgttctttgtgtattgagagaactgttttttggaagcattttcatcttcttctattaagtagcgcaggtcatctgcaaacttctggcccatgatgtgcttccggtgtacttctgcattaaattccttgttttcagaatcataaccaaggattcatttggtactgtgagggatagacaaaccaaggaatcgtttgctactgtgagggttagacaaacctccatccacagctcccttcggggcaccaaacactttattgccagtggtagttctggcaaggtctgcgaccaaatagcaggtaaaggcacctggctgaccatcaatgctttccacattgtattcattgccagtcacctccacttggccttcatagatcttgtccatgcctaacctattgagaagcctgcgggccagcagcaggccagtacaatacgctgcagcataatttgtcaggccggccaagcatttctgagcatagtaatcagttttaccctttcatcatcttctaaatttcacttggtaactcttaaagtaggccttattcttaacaattttaacaaaccccat

SEQ ID NO: 479496 - DNA, 1000 bp, Homo Sapiens
ttacactccagtctgggtcctgggtttctggtttttgtaagaggtctgtaaaatgtacagatggtaataatctgtggcttccttcaaatcctgacgactgctgcttttattctctcgatttcctttggtgccaaagatgtcgttattgaagtcattaaggacccacggggctgggccctgaatccgctcagcacagtctccaaacactgtcacctgacttgaaacgcaagggaaaagcctgacaatgaagacaatctcctttcggcatttccaggaccttaagccacctccctgagacactgtgctcagggccacataaaaatccattgacagcccagaaatagtcacaatcagcataacttcagcaacaatgcagtaaagatctaaaggattcgccgattctaccccatcactcatactcagcagggaggtcagagtggcagctttcacagggaagacgaactgtgcctcgaaggccagtgacggggacagggagtcgctggagccagaggctgcctgggtatccccagagctactacgattagggcagagagcacagctccacattccctcatcttccaggtctatgagcctaaggaatgtgatgggaaaggccccctccaggcatgggggcttcgagctgtggggccgtgggggcagtgcatgcgggggagtctggaatctctgaagaccacttgccttacaagggcatgtcctgggccctaccgtccgggaatgggacggctccctcctttcggtgccaggaagttccccaatcccacgctcgcagagggcccccggctcctcccccggcagggacgcgggcacccaggggagcctcggcggtgcccgcggcgggctggggcagggcggggcacccgcgaccgcacggcacggacgcgatccggtgggaagggacgggacgggcgcgcggcggtcgcactcacccaggcagcggatgtggaagcccgagggcggccgcagggcccggcgcgtccag

SEQ ID NO: 479497 - DNA, 1000 bp, Homo Sapiens
ttagccaccctgcgcccagctctgttccagttctttcctcttgcctttggcttctaccgctccatcgtaggcctgacttatagtgtcttctgggtctcttctctgagcagcttctgacatagcgtctgctgggtcccttctctgagcagcctctgacatagtgtcttctgggtctcttctctgagcagcctctgacatagtgtctgctaggtctcttctctgagcagcctctgacatagggtctgctgggtgtctcctctgaacagcctctgacgtagtgtctgctgggtgtcttctctgagcagcctctgacatagtgtctgctgggtcccttctctgagcagcctctgacatagtgtctgctgggtcccttctctgagcagcctctgacatagtgtctgctgggtgtctcctctgagcagcctctgacatagtgtctgctgggtgtcttctctgagcagcctctgacatagtgtctgctgggtgtctcctctgaacaggctctgacgtagtgtctgctgggtgtctcctctgagcagcctctgacgtagtgtctgctgggtgtcttctctgagcagcctctgacatagtgtctgctgggtgtctcctctgaacagcctctgacatagtgtctgctgggtgtctcctctgaacagcctctgacatagtgtctcctggatgtcttctctaagcagcctttgacatagtgtctgctgaagcctccaagcaattggacggtccctccgtcagttgcagcagctccttcgcctccacggagagggagtttggctgattctgtgtccttcgcctccacggagaggggatgtggctgattctgtgtcctttgtctctgtggagagggagtttggctgattctgtgtccttcgcctccgtggagagggagtttggctgattctgtgtccttcgcctccgtggagagagagtttggctgattctgtgtcctttgtctctgtggagagggggtttggctgatcctgtg

SEQ ID NO: 479498 - DNA, 1000 bp, Homo Sapiens
tcatagtccagcctcaaggtgtgcatcctctgtgtgcatggagtccatggcaggctctgcctggggagccgtccagctgcacacctgcaatgtggtggtgaccctcatgaatgggtggttctgggccccatggctggcagcaaagagggagatgttcagccaccaagcccagagccctgccacaggcttctgtgaggccaccatcttctctgggttcttgccctgagaggctgccctgaagtcaaacagaagcacgtgggcctctcttccagggctgctctctcccccactgacagctcccttttcttctggcatgaggaatggcttaggaagcaggggatggtggggctggggttgagtgatgggctgtgggccacaaggagtgggtgggcactgagcaagtgtcctggttgtctgtccatagacgcagaatgagtggcatcccaggagcctgtgaggggctggcagagacttactggttccagtaaaagccccatgtggatgcagtaatgctgcctgctggtccttggctgtaattacaaacaggtacatgaggtacccatgcatcttgaagctctcagggagtgggttccagcctccaggtgagatggcctggtcctcaccacctgagtgtccgtgctcccttttcctctgttcaatcctggcgccaatgcctccctcaactctcaggtcaccattggagaagatgctcaggaagaacaagcagctgcagttaaccctgctgaaagtggcagatgggtccaggctcttgagctcgtcttggacatggaacatgtggatacaggctttgagcagtgtgtgtagctgggttgtgaagttagaaggtgctggtgtgacagcctgacaagcagagcgcagctccaatcccaccttcatgctctcatctgacgcagagccctcagagaagtggggaagtgcttcctggccctgcttctgggggccgtccccaaggcagtccaccgaacttccaaaacagcct

SEQ ID NO: 479499 - DNA, 1000 bp, Homo Sapiens; identical to SEQ ID NO: 346991

SEQ ID NO: 479500 - DNA, 969 bp, Homo Sapiens
tcagtgacgcctacggtcgctgggattcgaagactctcactcccaggagcgacgggcttttttatgcctatgggatttatctcggctcctacttcgagttctgtgactacgcccttcggaacgccagttgtacgggctagaaagtgtgtctgagctctgccctctgtccctatccccggttgtttcttctcttgcctccttcctgcttgaggacttgtgctcgtgcttgggtttctccttcttcagctccctctctaggtcctctgctccaccgtagcaggcagtcctggcttcggggagcttccgcctctccctgggctgtgacttctgagctctctccgagttcttgctgctgtgcttcttagggccagggtcatctttttcctttactgtcttgcttgtgggtgacgaagaggatggttgctctgcctgtaccaaccgatcagttttctctttttctttctttcttttctttttttcctttttctctttcttgtgcttttttattggtttttcatcttcagagctctcagacgaacttgatgagtaggtatgaggcccacaggagcccttctggagctctttggtcgcatcatccatttcttccgagttcttaggagcccgatagttagacacatgatccactcggatagttcttcctttgatcttgatcccattaaaattgtcaacggccagaattgtgctcctctggtcttcatagcagaggaaacagaatcctttggatttcccagtcttcttgtcccgcacaagattaatgttaacaatctccccatattgtgagaatacacagatgatgtccccttcagtcagttcataaggaagccctcccaggaagatccaggcgctgtccttgtactcggagtgccaggacaccttatcggccaccccaagctggacctctccctcattcagcttgttgatcagcttcaccttagttaaagcattcat

SEQ ID NO: 479501 - DNA, 1000 bp, Homo Sapiens
ttaccccgaaaggttaaaaaccgaggggtaacttccaaaggctggcacatggcgaggaagcggggcgcccctctccccacccttcgcctcctcgcccctcctcctccggctccacttcccgacttgaccttgtggtgcacaaacagtacgctcggatcctcgcagtttctggaagaagagcctgcgctcgccaggcgggcgggctgtcgggctgctagccggcggtggcggggccttgggtctgttcccggagccgcgggccacacccacccaacccgctgcgcccgccgagctcaccttctctcgaggaaggagaaggactggcctccgtgccgccaggggcccacaagctcgggctttctggaactgctccagccagccaggaaggagacctccctccttccctgggaccccaagccgatgggcccctgggagtatttccagaactgctggaggaacttggcgcaagttaggtgtagcctggcaggcgggctgagggctttcgggagcagcgaagtccggagataaggccaaccgcttgcagggccgccgtgactcagctcccgccggccgcaaggaagctccgcggccccctcggagcaggacgaggaggaggggcgatgggcagaggcggagcctgggacgccccgccccccgctccgggaaggacgacccaccacacccagcttcccagaggcgcccggatttcccacgggtttccccgcttgcctcctccagaatactgcccacaccaacacccagccctgccctctggagggatgagtctccatccagaaagcccctggcttgctcacaagttagcccctgaaacctgcggacttgacaagtgagcaacagcaggccctcgtcgctgccactgccactggctggcccctgcccataggtcagtgccaggacaatgcatctgccctccttgcctggctccccagggcaagccccctccttgaggattttgctggcgaggaaccccaaggccatg

SEQ ID NO: 479502 - DNA, 912 bp, Homo Sapiens
ctaggaaggggtagaggagacacgaggacctcgagtcacgtggacatgggtggtggccaaaccagtgccctgaaggttggtggcccagcaggtgtagacaccagcatccctagcccaggtcccctccacatacagggtgccctctgcctcctgctgtacctggctctccccgtgtaccacatgggcctgttcactctccaacaccacttgggaaggtctgatctcacagcagatgccaaggaaacagttgctaacgttcatctctgggacctcctcagtggggagctcccagtgtagtgccatctgggccagggggtttttaacttggaagggaagcaaggctggatgatgagtgcgcagctgtaccacctcatagtagttatctgtgaagaagatgaaagtctttctctggtaggccaggcattcagcgcatgcgccgtcctgacagtgcggagcccaacagctatattccccggtgtctgcgccagaggagttcaccagcagcagctggctgcactggctgaagtgcttgattctgaaagacagatggtaggggcgggacgggcaggcgatggggatggcccgatactccttcgggaatcgggccttccctacacctgggtcaggtggggggcttggggttgcagaggctatagcctccatgggggtcttcatctgcatgggcttctggctcccgtctgctttgggttttctctggcagggggctcctgaaagctgcacctcactggggccagctgctttggagcccctcattttctgagcctttggagttctgccatgctccgggatttcaccatgaaggtgcctgcccctttccttccatatgaggctccttgaggagaatccaacagccaagcagtatctggaagaggaaatctgggatgacaacat

SEQ ID NO: 479503 - DNA, 1000 bp, Homo Sapiens
ttacagcgagtccagactatcaagggactcggagctcaggccacagtctctctccttcattctccatccagtgcagggccaagcaatcctgattctcacatgcgccgctccagcttcatcctgaggggcttcaactgtgtgaaggggcccgggacccacagctgaggccgctcgctgcttgtggggagtgggctgcaggggaaggtgtgatcgtgcagctgagccacagccaaaattagcaggcgtccatcctgtaggacaattacatgcaagaaagccttgggccaggttgacatctgtgctgcagatggggtggacgcactgccttagcaggtagacactctgtccagatgcagggggctggggctggtgagccctctgggtttcttccttccctgttctcaaggaggagggatcagaggagaaacaagaaaaccctgacatcagtgtgcccctgagaaggggctctgtgctgcgtctccacttcacaacccacgtgtggtccatgggaggaatggaggcgatagactcttcttgagtcgtgctcagtgcactcattctaaagcctcggccaagtttcaggctggatgaatcgccctgaatgcagctatatttaggcctctgcatgctaatgtttctatgtgttactgagccccaaggagcaagtccaaagcgcatcgcccgggtcccggtctccatggaaacggctctcccgctttgcgcgccagccgcaggagtaaggagcagcgctagggccgcttcctctctgcagctgacacagaatctgaattttgctgcgtcaaacaggcccacccgctcgttcgcagcgcctgctggtgtaggggaggcacacactgagccagttggtgtagtgcacgtgcagccccagatatctatgagcgtcacagacctgttattgcccaatcttgggtcactgaacaccacttgtccttctaagaagttgggggatgccgactgctcagggatcgtgtaaccagtc

SEQ ID NO: 479504 - DNA, 1000 bp, Homo Sapiens
tcagcccttgtccccgccgtccccgtgttttttctggtggtcagcgggctcttctgccttccctagttcccgagggagggcaccctcgtgggcatgggagctgccccggtgtcctcccgtgcagtctgtcacccacaaagggggacgcgggcagggcgccggagtgggtcccctctccgggcttcccgagggccgcagctgcctgctcggcgcctggcccggccgcgggcgggtgttgtctgacctggtggtttgttttgggttgttgatcaagcatgtatcagtgaacataggtgtgtgaacctgcttgtcttggctttccagcaggcagatgtccagggacatgcggccggaagaaccggatttcagcccggctgagtcaccacagcagccgccttgtgatggatgtagcccgcaggcggatccagccgcctcgaaacaggtatgaattgtgaagtgggccaaagagagcagatcagctgctccacagtcctgctcttctagaggttcccctttggcttttacctcattactcctcaaattctcttcttccatgaattctaggattttgcttaaatgggctacatctacagttggtggagtgagggttacaagataagcctggtgattcttagtccctaaaatgggatcttggcagccccgtggctgctgtcctatgaagcagaggtgcttggatctactgtcctcacctttagggtgttgagcaaaaacacagcggaagagctctgcagggagaaatgtacagaaaaaggcagcagcaaacggtcctttgggagcctgagttggaactgaagctggagctgcagcctgggccttgatttggacctgggccttggtttggtcctgggccttggcctttggctggcacagcctgagccagctgacaccctttgggatcttgggcttaacctctttgggctttacgagggcctcgatagccttggcacatgtactcacggccttggcactgtcggcctgc

SEQ ID NO: 479505 - DNA, 834 bp, Homo Sapiens
ctagataaaggcgcttacacaatcagaggtggggcgcaggctaggctcttcatcctccttcctcctctcggattcaccctcctccctcctctcggattcaccctcctccacccaatacacagaacaactcaaaggggctccaagtgttaggaaactcctctcccgcccttccccacctacccccacccacgctgtccctctggagagccctctaattggcaggacaaaggccagctccgggttcggccggggcctccgcccatccctcggggctacctgttgctgcaggcgcagcgcaactcggtccaggggctccgaggaagaattcccagctccagcatcgcgcccacagtactgggcagtggggtcggagataaagaagcggccgccggccacgcgcagggccgcggctctggccgcaaagtgaggccgagagcgcaggaagagcacgggtgtgagccgcgcccgtcgggccgggttcctgcgcgtcccgttccgccctcggatcccagcgagcagccgcgaggcaggactcagggaccgcccgggcggacctcctggaacgtcggcctcctcacctgcggggagccccgacacctgcgccgtctccttgcggagccctgggtctcttgggcagtcagtcgccccataaaccaactgccctgaattgaaacaggcggtgtctctgaagcagcggcttcccctcgaacttggccgacaccgccagaagctacaggcgcaatggttgagggtcgtgttgtcctccaccgccacatgctccgccgccaggtcccgctgcagcttctccctgaggtattcggccctgagttccat

SEQ ID NO: 479506 - DNA, 936 bp, Homo Sapiens
tcactcccacccccttagtctcttcactacccctcttacatctttgtttctgagggtgtagattagagggttaagactaggtgtaacaacagtataaaagagagcaatgaacttgccttgatcttgagaattccctgatggtggctggagatacatgcacatggccggaatgaaaaagagagatacaaccatatgatgagctccacatgttccaaatactttctgaagcccagtggttgactgcatcctcagtacagcctgggcaatagcaccataggaagtgaaaatgagggtgagaagtagcagaacaaaaatggagcttgtgatcatgagggtcagtttattttcacgggtattgacaaatgataatcataaaagtgccggaacttcacagaaaaagtgatctatttggcggtgtccacacagaggtacccagaaggtgaaggaggaatgaagtgctgggtttgtaaaaccacttacccaagaagccacagccaacaagtggcagaaacgagagtgcatgaggacagtgtaatgcaaaggtctacacacagctgcataacggtcataggacatcgccaccagtaggaaacactctgtggttcccagtgtgagaacaaagtaaagttgaaccatgcaaccagcataagaaatggtctttcccacaccccagagactgaccagcaactgagggatagagctggtggtgtagcagagatccagaaatgagagatttgaaaggaagaaatacaagggagtatggagatgggagtccaggtatgtcaggatgatgatgaacaggtttcctatcagtgtcatcaagcagaagatcaaaataaccacaaagagaactacttccagataaggccaattagaaaatccaactaaaataaagtacccctcagagctagcattgacttttccatcatcattcat

SEQ ID NO: 479507 - DNA, 1000 bp, Homo Sapiens
tcacatccacatgcgcttgctttgcttcactatttcagagagctttacaagcactctagcagcttccaccaaatcatcacaagcaagtattttaagtccactgtctgcttttagtgccttaacatcatcaacttgtgtaccttgtaactgtaccacaacaggtattttaatttccaaactttttactgccatgactataccctttgctgtaatatcacagtgcatgattcctccacaaatgttgaccagaatagccagtacctttttatctgaagtgataggcttaaatgcttctgttacttgatggactgtagcaccaccaccaacaaggaaattagctggagtctctccatgaagttttattatatccattgtggccatagccaaaccagcaccatttactaggcagcctatacttccatcgaggccagtgtagttgagatctgccttagcagcatctttgttcctttcatcttcctgggtccagtcctgtagatcaaacattttcttttggcgataggctgaattagagtcaaaattgatctttgcatccttacacaatgcagctccatctgaatcttccaccattgaatttatttctatcatggttgcatcgtatttcagaaaaaggctgtaaagcttgatcatgttttctgctgtcatgtattcatgtagtgagagattcctttgctgttgctgctgtacttggagtccatggttattaaacaatccagaacttcccagaacctgagcagcagcccgcagtgtggtccgaagggtggcggccaccaacagcgggcggaagaacatggaggccaccatttctgagtctaacattatgttttcttcgtggctttcctgctgtgggtggcttggctctggagccagctgggggaggcggggccctcgctgtcggcgccgcggcggggtagaggtagcggcggggtagaggtagggccgagtgctgcaggcgaggctgcgcgtcctggtctctgcgctg

SEQ ID NO: 479508 - DNA, 819 bp, Homo Sapiens; identical to SEQ ID NO: 346994

SEQ ID NO: 479509 - DNA, 306 bp, Homo Sapiens
tcatgcaatgctgccagcactggacgcaatccagggccacaagtctgcacactcctttgctactggtcctgtaatggcagaacctttcatctcgcctttattgttcactgtgacccctgcattatcttcaaaataaagaaacacgccatcttttctgcggtatgactttcgttgtcgaataaccactgctggatgtaccttttttctgagctctggtttgcctttcttgactgtggccatcaccgtgtcacccacaccagcagtgggaagtctgttcagccatcccttgatcccttgatctgccat

SEQ ID NO: 479510 - DNA, 1000 bp, Homo Sapiens
ttatgtaacctcattttgttcatctccatcataaacattgtatccttctaatttaattagttcaatgttttttggttcctgaaaaaatacaacatctttaattttgccaacaaaattggttttaaaaatctcttgagtaacgatatttacctttctaccatattcaaagccccctagataacaaatgccatcatagtttagagccacaaagtttttatgtggatcaatatcctcggaaagaattagactgttatttatgtaggccttgataagagtctgattttgaattacaactacatggtgccatttattacaacagaatgtgccattgttatagctcataggcacagagattctttctcccaagttaactgctattttcaaggtctgattatggagaccaattgccagaaaatcattttcttcattttgagctattcccatccatacaattagaccttctgttttagtggtactgaaatttaaggatatagtagtgaactggaggtttctcattctataatttggatcaatgtatttaatgtaagaattacccataaattttgcagttgaaaatgaagttttgttttcacaataccttcccacccaacccaaagtacacaggcaactgtaagaaaatgattggtcaggtatacataaagattggtggaggcaaagattattcaaacaggacacagactggttacatgtatttccagcccaatctggcaaacatctgcaagaaaaagttgtgccatttactgtacattcacctccatttctgcatgtgttgtacccacaggctgtcccatcacagtcacctacatttgagccaccttttgctccaaattcagttaattgtaattcttgattatttatgataacttgtcggatacagccttgaaaacctacaggttcattttctattgccatgggatttacaagatttaaagaagatactcctccaatatagaagtctgtatttgtgtccagagaactc

SEQ ID NO: 479511 - DNA, 1000 bp, Homo Sapiens
ctaaagcttccgcagcaggtcaaggccaaatccatccactgtaaaatctgctgggcaacagaggcctggagtgctagtgacctgctcgcctctaattagctggggcggaggggcatcgaagtctgcaaacagcaggttgttcctgcccacacaacccttggcatctaagtctcgtctcggtgagttcccgagctgctggcgttggcctcgtggtctctgctcgggtcctgctgccccgggacggcctgtgcggcggctgccagaggggctgcccttcccctgcgccttcggacaccagcgccgctgcgcaggcttcagccctgcagcctctgccgtgctgtgctgccacgtgcggacaaggccctgggctccgatggcatcacgattgtgaatgtgcttccgaacccaggagctggggacaggctgaccacacccaagcccacagagactggcccagcgcccccttccaggcggccggccgccggtgatcagcctggaccccggtgcacgggccgcttgctttgttgaacggcccggggtgacgtggctgcggtgcaagcatgccaggtccgctctctctgaaaaggagctttctccccggcactggaatgtggaagacaaacatcgtccacctttcccagcaaggctttttaaaaacgcttgccaaacagaatcattgtgagcaacagagccagatccggcccctggaccagccagccatcctccagtgccgcatttaatatgttgtgggaaaaacgcttccttcccagcagaggcagctgccatcagcctaagtgagtcaacaatggtggaaactgccaagtgggcaacatcgaaggccatgtttcctcccagccaacagtgctccactgagcaagatgccgaggaggaccgacgctctttcagaaggcgcctctccaagcctttctccacttcaactaaagaacgtgtttcaatgagtctgcgatctcggtggcctcttattactgtcatctcattc

SEQ ID NO: 479512 - DNA, 1000 bp, Homo Sapiens
tcacaactcctgcacacttcctgctccctcaacaggaagcactgcaaatgagctgtcctcgcgttctttccgagtttctgcttccctcccctcctccacctgcaggctcccctcctccacctgcaggcccccctcctccacctgcaggtccccctcctccacctgcaggctcccctcctccacctgcaggctcccctcctccacctgcaggctcccctcctccacctgcaggctcccctcctccacctgcaggtccctcttctccacctgcaggctcccctcctccacctgcaggctcctctcctccacctgcaggctcctctcctccacctgcaggctcttctcctccacctgcaggctcctctcctccacctgcaggctcctctcctccacctgcaggctcttcttctccacctgcaggctcccctcctccacctgcaggctcttctcctccacctgcaggctcccctcctccacctgcaggctcccctcctccacctgcaggctcttctcctccacatgcaggctctcatccataggactgcaataacaaatatccaggaagctgcattcagtccagaatagcatatgcagttctttatgaagataccgagaaggagcagggatatttttcctccgagttcttatcaggggctctagttctcgctgttcctctggatcaggtggggaagaacctggctgctgtggaagttgatgctgtctgtcagggatgcaaagcgttggagtctttctcatggttgccgggcggggtttggcggggaggcggtctgtcatcggcaggcagaagtagaactcgtttggggccgtggtgagtcgatgctgtcgatttggttttgagttgaggtttagtttttctttgactacatagatggctatcctccacttctttgagaacggccctggtggttctggcggcccgtggggcccctccctgggtgctcggccacgtgtggctctgtgtggctgccctgcatcgggg

SEQ ID NO: 479513 - DNA, 1000 bp, Homo Sapiens
ttagactcgctgggtggcaagagctgtggctcccctcctccagtctcctgtggagtcttcactccctgtgactttggttgtctgcagggtgaggtcattttcggtccctgtgactttggttacctgcagagtgaggtcattttcagtccctgtgactttggttgtctgcagtgtgagatcatttttggtccctgtgactttggttgtctgcagggtgaggtcatttttggtccctgtgactttggttacctgcagagtgaggtcattttcggtccctgtgactttggttacctgcagggtgaggtcattttcattccctgtggctttggttgtcttcagagtgaggtcatttttggtccctgtcgctttggttgtctgcagagtgaggtcattttcggtccctgtgactttggttacctgcagagtgaggtcattttcgttccctgtggctttggttgtcttcagagtgaggtcatttttggtccctgtgactttggttacctgcagagtgaggtcatttttggtccctgttgctttggttgtctgcagagtgaggtcattttcggtccctgtgacgttggttgtaagaggacccagagtgtggggtgtctggctgtctgagcagttgggccactgacgctgaggacaatgtgagaaagcctgtccacaggcaccatccccctcacagaagtttgatgtctgatcattcagcactggctgagcctcagagggtgatggagagaggcagctgggctcaggagcacatgggctgttgcctgtgggatgaggccatgtgggctccccgaggtcctgtccccgggatgctgctggatttcctggcagccccatggccagtcccctggcgtggctcctttccacagcattgagggcgctgctcgctgctttgcactgaaagggagcttctccctcggaggtcagggttggggtgctgtctgtgtggacactgaagtcacataggagggtggcaggggccacagtg

SEQ ID NO: 479514 - DNA, 1000 bp, Homo Sapiens
ttagcaggatgcatctttgaggtccccaaaccaagccacctgcacggacccaatatctctggcgcgtcccgaacgccgtggattggcgtctgccgccccctgccggcggcgcgctgcactgcagacactgaactcgcccaatgggtgcgctgagggtggaagaccctgaccctgctcttcaaacctcaaagggcagtttcttctcactgatgaaggggctggttgctgtcttaagcatgtaaaaaggagggccatgcctttgaggagtgaaccgggttgtctcatagatctgcttaggtttgattcagagcatctccagcgctcccgtccctggtgcattgtagagacaggagctggaggggcctggggacctgcggacccagtgtcacctgcccatacccttacacatttcacagacttgaggtgataaagataaataacaccaagggatccccagaggtcaaccctggagtctgagtgggccgtagaaaagggcttcctcatttcatccttctctgaggggcggttgttctcgtcctcgctgttatgccatcgtctcagtgtgtaaaggtggtggttctggggaggccatgcaggggtcctggtgacaatgcggaagccactgtcatttctatggtgctcccttgatctgaacggcagcctgtagaagaggatcgcaatgatgtgtgtgcacaaacccgacagcatggacagagcccaccgagcatggtactcagtgtggtggtcaaccacaggcctgtctacaccatgtaaacagttaagatgcttctcggtgattggccactggcaagtcttcctcctatcaccatcagaaatcttcatctctggtgatgtcagttcatttttatagcccccctctcccacggaagcacctgctgcccctgcttctgcccccagagcccctgaccatgggagaagaggcctggagtccagccccaggatggagctgcagtggcccatcttgtgggtgtaggactca

SEQ ID NO: 479515 - DNA, 1000 bp, Homo Sapiens
tcagaatagcaggatgggaagaatgtagtcacaaacaatccaccagatgacaacactacacagtgtaaaggtcagcacagccaggggagatgggagaagaatatcgtttgtttttgattgtcttcgccttttcagggcccgacttctatcaccttgtgtcactccattgatttcgtcgtcatcactgtaaggtttgggttcttgctggtcttgattctcgaccccatttatggaaatgtcatcaacaccagagagaagtttggagaaggctgctctgtgttgtccattctcctgcccctttaacctctgacgaaaatagtccccttccagccagaggcttgtttgcttcatcaccaaaaactgctgctgaggcccgatcaccaagccaggtctgcagatccttacccacgcaatggtctcggctgctgtcatcctgtaatgcttcatgatgtagcaggctatcagagtgcctgtgcgaccaaggccagctttacaatgtactgcaatggcaccctcagcattttcacagatatccagaaatcttttgacaatggcatcagtaggggtgctgccatccgcaaagaaaagatcatggtgatcgaagccagcatccgtaaagcgtttggcatcatacatccttttattcagacgaataatggtagtaacattgtgattcttaaaatattgaatataagtctcgggagaatgttggtggtaaccactttcaagtctggctcttgaatgaggtccacagaaggcaataaatcggtctggtattatccaatttaaatctccgttttctgctttttcatagtgttcatattcatcaaggttaaatgagttgaaattaaggaagccatactgcattgccttctttactgcatgaaaacagtcaagaagtgtaatgtagaaattgcagcttccataggcagcatctctgaaaggaatatagggtgtatctccaaagattaatattctatatgctgcttctggggttctc

SEQ ID NO: 479516 - DNA, 1000 bp, Homo Sapiens
ttatcttatattcagtaaggattgaccattgatcaaatacttaccacattcttcacatttctaggatttctctccagtatgaattcccttatatttagtaaggtttgaaacccagttaaaggctttgccacgtttttcacatttgtagcattgctctccagtatgaattctcttgtgtccaataagatgtgagctctggttaaaggttttgccacattcttcacatttgtagcatttctctccagtatgaattctcctatttttagtcaggattgagccatgcataaaagcttttccacattcttcacaattgtagggtttctctccagtatgaattctcttatgttgagaaaagtatgagaaccagttaaaagttttgccacattcttcacgtgtagggtttcctttcagtatgaattctcttatgtccaataaggtgtgagctctggttaaaggttttccacattcttcacatttgtagcatttctctccagtatgaattctcttatttttagtaaggattgagccatgcataaaagcttttccacatttttcacaattgtaggatttccttcccatatgaattctcttgtgtccaataagatgtgagctctggttaaaggttttgccacattcttcacatttgtagcatttctctccagtatgaattatcttatttttagtaagaattcagccatgcataaaagcttttccacattttttataattgtagtgtttctctccagtatgaattctcttatgttgagaaaagtatgacaaccagttaaaagttttgccacattcttcacatgtgtattgtttccttccagtatgagttctcttgtgtccagtgagatgtaagccctggttgaaggctttgccacattcttcacatttgtaagatttctctccagtatgaattctctcatgtccaataaggtgtgagcactggttcaaggctttgtcacattcttgacatttgtagggcttctctacacta

SEQ ID NO: 479517 - DNA, 480 bp, Homo Sapiens
tcacagatcctcctctgtaccccaagaacaccccattggatttccgggctggctgcttggcctacacacctgggtcaggcctctcgcagggatgcgcctgccactctcagtctcactgagccactccgttaactggaggcagacccaaaattgctccacaggctgaaggtgataattgtctacagccagctgaagcagctgcatctcctggagaactttgatctcctgcagccaaaattgcttcacagactgaaggtgataattgtctacagccagctgaagcagctgcatctcctggaggactttgatctcctgcagctgacactgcgcatctcctctcatcttctctaggcacgcgcgccttcccagaatgtctttggatcctttgcagggtgatgtgtcctcagtcactctcctgtgttttcctggtccaagtattacagctttctggggatgatccaagatacccacaaggaccat

SEQ ID NO: 479518 - DNA, 1000 bp, Homo Sapiens
tcagcatagaggagactcagcatagaggagaaacaatatggtctccaccatgtagacagactcagcatataggagaaacaggacagtctccaccatgtagacaggctcagcatagaggagaaacaatatggtctacaccatgtagacagactcagcatagaggagaaacaggacagtttccaccatgcagacaggctcagcatacaggagaaacaggacagtctccaccgtgtagacagactcagcatagaggagaaacaggacagtctccatcatgtagacagactcagcatagaggagaaacaatatggtctccaccgtgtagacagactcagcacagaggagaaacaggacagtctccaccatgtagacaggctcagcatagaggagaaacaggacagtctccaccaggtagacaggctcagcatagaggagaaacaggacagtctccaccgtgtagacagactcagcacagaggagaaacaggacaatctccaccatgtagacaggctcagcatagaggagaaacaggacagtctccaccgtgtagacagactcagcacagaggagaaacaggacagtctccaccgtgtagacaggctcagcatagaggagaaacaggacagtctccaccgtgtagacagactcagcatagaggagaaacaggacagtctccaccaggttgacagactgagcatagaggagaaacaggacagtatccaccaggtagacagactcagcacagaggagaaacaggacagtctccaccatgtagacaggctcagcatagaggagaaacaggacagtctccaccaggtagacagactcagcatagaggagaaacaggacagtttccaccatgcagacaggctcagcatacaggagaaacaggacagtctccaccgtgtagacaggctcagcatagaggagaaacacgacggtttccaccatgtagacagactcagcacagaggagaaacaggacagtctccaccgtgtag

SEQ ID NO: 479519 - DNA, 603 bp, Homo Sapiens
tcaggtgcagcagctgctgtctggaatgttatcaaaccaggactgcacaggcactgcattctctgtgtggaagacgtaagaagcaggcgagttgtccaggatgagagttttcctcaggtccctccccagatggctgaggtcattgacatagcagccagtcactaggcagtcagcattgctgattggcttaatggagctatgcacaagggtttcatccatgtcagtgaccatacagatcgttccttgatttttctctgtcacctctgggagcaggcaggtccctgggatctgataaaactgatactggagacccttgagctgatccgacttagcaatggtgttgactccctccttatgtgtggagaactcagtgggggaacttgacttgccaacatgcatgagttggatggggagcaagagggagggcactcttcttggactgaagtagattgtcgggtgttggaactcttgtgtacctgtcatgttcatacctaggccatagctgttgataatattccataagggaggttcttccccacagtgtttagtcttccaacgctggtacagcctgacatgatgacattctactttcatgtcggtcat

SEQ ID NO: 479520 - DNA, 1000 bp, Homo Sapiens
ttaatgacttccttggtggccccccgtcccgttgcagccagggttaagcttcagcgtgcaaagtgaaaggccacacaaatctttgtccgtaacaaatgccccgtggacaggacactccggtgccctgaggctgcaggagctgagggtgatcttgctcaggtacttctggtggtacctgctgtatggggaagaagtctgttcctcctggctggtgtcagaagtaaccaggctgaagccatgctctgaaagaaccttctcctgggccctgccctgattttctgaatctcctccagccctctgcggtggaaatgaggaggtcgatggctccgaaaccagcaggtcaggtctccccctggagccagatcttatgcccccactgaagacacccacttggaagagtctctgggttccataaatagcacaaaccagaggtgccccactgtctcccttgaagataccattggtgcctggttcgttccaagcacaaatcatgttcctggacagctggtttatcctcttggcacattctttccggctaatctgcaccactctcagcttttccaggtgcatgtttaagtcatcatattggtcatacccattggtcgttacccactgtgccatccaacaccagtcccaggtcctctcctcctcctgcaggcagacaggcattttgaaattgctgaattgcactggtgtggcaagtagaagcagagagaggtcactgtcgagctggggcggtttgtaatctttgtgaataatgaccttctgcacttgctttctctccgagtggatgttgctgaatgttctcgttcccatgaccacagtgacatttaccacggccatgtctaatttgccacgggcactcaccattctggacttgaagccgttcatgaaatggtaaccatgacgagtttggaaaagcaggcctgtggccacattgtacgttttcaacagcaaacaggccgaggagagggagagctcagaaaacaccagcaacctg

SEQ ID NO: 479521 - DNA, 1000 bp, Homo Sapiens
tcaaacgaaagcctttggagcgatgaggagcatctgtttgaaagggggaggtgccacgcttgctgcttctctaagctccctgggaagggagagacaactcagaaaacctacaaactgtagctccttccggtgcccgcgtgacccccgagtccaggagcgggcaggggcgccgcttggctgagcgcactgggcacccggtctgggtctgggccagccccgccgctgcagcccgagggaggcggcgctgcactggcctccgcgcgctcccagaccccacgtgggggcgcccctgggtgccggtgcgcggggaacgtgctgcgggggtgctgcgccagctgccaccgtttcccgggacttccctcctggaagatttccatgcgcaagtcgaggacgtgctcctgctaggagtctagaaactctaggccagcccggaccctcccggggcctgcactccccgcgggtggaagcacgcgccgcgtgtccctgccggattccagaacttccccgaaggtcctcagccccggcagaccctctccctcgaagttcccccgccaccccctgcaagcccccaggccccggggaccgccgctcacctagccagcggctccagacaccggacaccggacaccggacaccggacacccgccgcggccgctctcgccgcccaaccccgcacctgagcccgccccgggcgccgcgaaggggtggaggcgggggtgaggcttccgcccgcccgctctggcccccgggcgcctggaggctctccagggccactcgtcggcgaggctgcgtggcctgcgcatctcgggccgcctggcccgcgcgctgtccccgagctgcggtagtccggggtaggcttgtcctctcctctcttagttcatgagacagggatctgcagtaaagcagaagtgatgccatagtcttttcagttgccagagcgaaggaagtaaaagcatccactatgagattcaccagaggggtttgaccagctttagaagga

SEQ ID NO: 479522 - DNA, 1000 bp, Homo Sapiens; identical to SEQ ID NO: 346999

SEQ ID NO: 479523 - DNA, 930 bp, Homo Sapiens
ctaaggcttaaataggccaggccccagcctggtggctgggggtccctgggcccagggcggacagaagtcggaaaagtaggggtactgcagggcctcttctgctgagatacattggcaggggttacacttcagaagattctgcagcagatccctccctgtggcactgagtttgggcacgatgttcaccagggatgttgtggccgggtacaatgggtacagcttatagtctggcagcttggtcatggagggccactgctccttggtgagcatccctagcagccagaagatcctcttcaactggtcatcgacgtcattgcctggaaaaagaggccatccagcattggccagctctgcaaagatgcagccagctgaccacaagtcaatggacgtggagtacagcttggccccaaagaagacatctggtgggtggtaccacagtgtgaccactccagctcagtaacagcagatggggatcccaaaggctcgagacaggccaaagtcagccaatttcagctccccattcctgtttattagcaggttctggggcttcaggtccctgcgtagcacattgcggctgtgacagaatccgaggccttttagcagctggaagagaaatgactttacaatctcaggatcgagatcaccattgcaactgtcaaaatactttttcaggtgctggtgacagaatttgaaaaccaaagtcagcttcttgtcgctgtgcaggaggtcatgaagcctgacgatgttcttgtgcttcagctccttgagtaggcagatctcccggagggcagaactcggcacaccgtcatcattgtcatccagcctcacccatttcagagccacaatctcatgagtctcccagtttttggccttgaacactgtcccataggtgccttccccaatcttctccagtttcttttatttctgcat

SEQ ID NO: 479524 - DNA, 1000 bp, Homo Sapiens
tcatgggggtgtgcaggatcgcccatcagagagcagggagcgggtgagagcttctgtgtagggtggtttttctgtgcactgtggaactgcggtggtagcattgaggcagggagtgccctggccctcgctcctgcctgatgtcggaggggcgtgcactgtggaccctagggcaccctgagaaaagcaatcctgggaaaagacgtcatcacgaaggctgtggaaggaggcgagggccttcaggtgccgagggtggtgggcgccccggagcgcccgggatgctggtggggattgggcaaagacgtcaacaccagggctgtggaaggaggcgagggccttcaggtgccgagggtggtgggcgccccggagcgctggtggggattgggcaaagacgtcaacaccagggcagggctgtggaaggaggcgaggggccttcaggtgccgagggtggtgcgcacccagggatgctggtggggattgggcaaagacgtcaactccagggctgtggaaggaggcgagggccttcaggtgccgagggtggtgcgcaccccgggatgtggcccgctgcaagttggctccctggcggaggtcgtggatgggttctctcagcaggggccagctgctgaccggtggacaggcacgcatcttcccttctgggcaggggtccactctccgctccctccagcatacctgggattcagggccttcccggggattgcagctcagctgacctcctaggctgtgagcgacagcacagtgactgccatggttgtcagtgatgaggcccttgtctcctccttcctgtctgcatagctgctgctggtgggacacgcagccctgccggctggatccacagatcccccagccctcatgctggacccccagcccgctccggcctccaggcctcaatgttgtcctctgtgaagctgttcgggtgtggttgaaagcaggcagcctcgctgcagacagttgggactggacgcgctggtattccccggaggtt

SEQ ID NO: 479525 - DNA, 1000 bp, Homo Sapiens
tcatgagcttgggaagggacacgcagggatgatgaggaaatgggcccacatgtccccatagccagagtggacggacgccccgctgcagactggcaggcgcttgtcagacactgtcatggatgacaggcttccatataggtcacacacagcaaaaatgcagtcctcagctctttcacccaacagcaagccaccagtgggtgacacatagccccatttacaaatggagaaactgaggcactggtccacgggatgaggccagatttccttccacactgctcccctttccaggcaccagtccctcagcacatgtgcttcatggtgacaggaggatgcatcctgctctgacctcccccagatcatgtgtgaccccctctctggggtgtccagagaaaagccagtaccacgatgggcttgaagaagcctgcagtcccctaggagcccaaaccaggcagtcacctcctccttctgcagaagggtctcaccagcccgccccctggagaagcccgccttcctctggggacgaaaataattaacaaagcaaacaggaaagccggaggctcccccagctccgcacaggcaaactcgatacttgccggagccgcttccagaggagccccggggaggtcgctcacagtgggcagcaggaggctggggtctccttggggacctggagggccgggctgtgcttcccgcgccaatcagcccaggactgaagcccctggggttctgaggagcggtcccgcctccctggcccgccccgaaggtccgcggcacccacaggcagccgccctgtctcctcctctcccggcagctgcagggacgctgagccctgacaaagccgcaaggggagcgcaggtctgtcaagctgaggacctcctgtgggtccgcatttctggtttgttcttgggacttgtgttgggcaagaaccagcagtgtggcaggcagcctgcaccccagtcccacagggtcagcctcacggggctgccaattggtcactaca

SEQ ID NO: 479526 - DNA, 1000 bp, Homo Sapiens
tcagagtttgcttctggtcttaatgaggtgttgcctgaagaatttctggatctcccccaaggcgtgctcctgggctgccgcatgagcagcagcgtctcctccccagagcaaaggcctggaaatgcccgggttccagcacgcgaagcacaagggagcatagggcggttctaggaggtggcctgccccgaggtgcaccagcatcctcccgctgcttctgccatggctctgcagctggtccacggcctgctcagcgtacgctttgctatccaggcattcgtcactctccccagcaatgaaaagaatccaacccctagcaatcagatccccgtatctgagtggaacttcaaagctggcgttgggcccgttaatgcagacggtggccaccacctgcttcaggtagcaggccatagccaagccaatctcggcacctttgcacacggagatcactccaattcctggcctttggatcttgggatgagctagtagcaagttggcagcttcctcaaaatattccaagtccacctcctgcagtttgtcaggcaagtctttgtaggcaaaatatgctaatgccagcactgcaaaaccatgggaagccaaaagactggcccgaaattctactaggctcccaatgcccccaaacaaatcaatgactcctgggaaagggccttcccctggagggagaaaaagggctccttgcactggaccttcttggatctgctgcctctgcaccccagggcctgagaaccagtgctgcacggtctggctggccttgggctgaacagtggctgaatcttgaaaacaaatggagtcatataggtccagactgacccaaaaggggctgttcatcacatcctgcttgagcagcctccggaaaggcctctcaggcttcagagaccaaaagaggcccattggatgtacccccatgtagtcacctccaaatgccggagcctgctccaggtccacctcaccagcctcattagccctgtagaaggccatggat

SEQ ID NO: 479527 - DNA, 558 bp, Homo Sapiens
ttagctctgggtcttcttgcccctacgcccgagcctggcgttctctcggccccctcttaggaacgctagccctgggcagaaattgcctttgtggctgaagtcggccagcgtcgcgtttccactctcccgccgaatctggacccaagccagccttcccttgtgcatcggtagatagcttgtgttaaggcgccagcttcttggaacagagctctctgcaaaagtcgcgctgaagaattcatagtcaaaagctgaacttgcagaagtttctacttctggcattgcgactggtgactctgatggccagctgggctgccctttccatgatggctttgcagttccagaggacacattgtgagctatctcaggacagtaagattttctgcatgtcagcagcccttccaagtccttgacaatgcgtaccagaaacttccagaagccgctgggcagcatgtgctttgtgttttcattgcttctatattgttctgactggtggtgaatgaacttcttgctcctctttttgatgatcttgggcttcatgaggggtctgatggtggccat

SEQ ID NO: 479528 - DNA, 1000 bp, Homo Sapiens
ctaggtcgtcaggctaccagggacacctgtctgctgtgggatggcagatgagatcaggagaaggacagctccttctggcattttaaattgctctgattttggcagaatcttcccctggatatcaggatcatctccgcattcatccccagtctttgactgagacagctcctggagatcagcttccaggtcaggcatggtcatggcataaggcatgatgcacacataggcctcctccccccgtagacattctttctttctcttcccaccactttgaatctcagctgcaccctgatcttcttctgtcttctgaccagatgtactatcctgactttcagctggtggttcttcttgttgaggctctggcacactaggctccgcccacacctcccagccctgatcctccttgaggagttcagaatctgtcctctgttgggggttccaggggtttctgggactcgaataccgccagcagcaccccagcatcgccccactccgaggccctccttcttctttcgttcgcactccagcaagacaagaaggcccatagtggcagggccacatgagaaggacgacaacatcaaagcccttctccctcagagtcaccgaccaagctgcccgaccctgagggacagctgtctgctgtggaatggcagatgagatcaggagaaggacagctgaaaggaggagaggggagacgcactgctcaggcgaggggccggtctcccttatggtgattttcacactgtgttcatcatgtcctgtgtttctgtgtgctctgaggtcgctcttctcaacttcatgtctgtcccagctggagggaaagtcagtcctgagagggtggaaggggccagtcacaaatcccggatagatagtgacctgggctccacaggtgagctgggctctgatggctttccctgcccagactgccaccttaatgtgcttcccacagcactcaattgatggggcaaggatgcacaggagaccgccccccctccccagt

SEQ ID NO: 479529 - DNA, 996 bp, Homo Sapiens
tcacttgctcctggtgtagtggagcagagtcttggagcccctggatatggcgtgcttgcccatctgccccgggaacatcaggcgaatggtggtctgcatctcgcaggaggtgatggtggtgcacttggtatagtgggccaagtggccggccttggtggcgatgtgctccaagatgtcgtgaacgaaggaatctatgacatccactgcctcgggggaaaggctgaggcccgcgtgaacctgcttcagcacccggggaaaataggtggtgaagctgtccctgcagcggctggggtgagagtgcccatgcctcttctgcttgtgggccatcgtggcattggccgctttgggctccttggtgctcaggcctttgttggaggtcatctcagaggaaggctcagccatcttggaggcagtcaaccgccatagttgaaattttctgatgtcatgacagcaggtacttgcattgccacacatactgtccttggagctgctgctgttgctgatacagatttggtagtagtaggagacatttcctgcgggaaaccgtcggcctaccagctctgcaatcagccgcacagaattcaaattcggattcggctttgatgacctgcgctccactggtgggcagcgtatgctcccgcgtcgacagctctgtttcgccttccggtccccatagctctgcaggggaacaggatcgctggcgcctcctgggccgctaagcgaccccggggctgcccggcttagcgagtgcttcgcagagaggtagccgagtcgaggcagcgcggttcccaaggaagtcacggctgcggccaccctccagttcggacctccgggcagccgcggttgccgcggtccttcctggaactgtatgcaaagaatctggactccgtacattcttctgagtccacagctttgcagattttcaaatgggtctgtcataatgtcttccttcttcaagccatgcttgatgaagaagtgtgagaaatcaaaccccat

SEQ ID NO: 479530 - DNA, 738 bp, Homo Sapiens
tcagtgcatggatggagagttgggtgttgttaaacagccattcaaaccccttcccaggggcagccgggaggtgccctcatcgctgtctgcacccgacagcacgagctgctcagccttactattgcttcttttattaactttgaaaaatcccagaaattttttcttctctttatctgtctcatcattgccaagcgatgattttctaaaggtttctcttctgttgtctcacgagtagagctcctttatcccaagctcattcagggacttggacagctccagctcctccctggcaatgttgtccctgaggagaaccatgtgctctgggctgacctcacactttgcacaaatggctgggagaatattctggagaggaacctcagggctcacatgcacaacagctttttgtgtctgcaagtaattcacgaccaaacacacagatttctcaggcaccttagggggaacaggcttaattttttcttcaggaaatttttctttcagaaacacagtatgcacattcagggtcccaatcaaagtatttggcttaaaactcaaaggttgttgggtttctgaagaccaaatgtcaagggcgtggtgggatggattcaggtggttctgaaggcaaagttcaactagtaggtccatcattgcatggctcccattgagcacgctcctcttctccagcttgctgggcaggaccatggtgacgtccatgatggtggccctcagcgcctccttcat

SEQ ID NO: 479531 - DNA, 1000 bp, Homo Sapiens; identical to SEQ ID NO: 347005

SEQ ID NO: 479532 - DNA, 645 bp, Homo Sapiens; identical to SEQ ID NO: 347007

SEQ ID NO: 479533 - DNA, 751 bp, Homo Sapiens; identical to SEQ ID NO: 347011

SEQ ID NO: 479534 - DNA, 1000 bp, Homo Sapiens
tcccaggagtaatttttctttcatcaaattgacaatagcatcaatcagaatcccaggactcctaaaacatgtttaactccaaaagcagagttgcaaactcaaatgctacaggggccaagcaggcactgtggccacctagaaagtggaccctgaaggtggggaaggtgggtccagcatcggtaaatgttctaattttttttaaagaatcaattttataggctgggcgcggtggctcacgcctgtaatcccagcattttaggaggctgaggtgggcggatcacctgaggtcaggagttccagaccagcctgaccgacatggagaaaccccatctctactaaaaacacaaaattagccaggtgtggtggcacatgcctgtaatcccaggtaatcaggaggctgaggcaggagaatcgcttgaacccaggaggcggaggttggggtgagctgagattgcgccattgcactccagcatgggaagaagagcgaaactccgtctcttccaactccttgggggctcctggtgtccttggtgtgggcatccctccagtctctgcttccttctctgtgtctctgtgtcctctcctattctgtataaagacccttttccccaataaggtcccattctgaggtccagggaggacacggattcttagaggacactattcaagccactacacttggtttcttcatacactaatagacagcagtctacactgctgaggtcagtgtgaggctggagctgagaaggggtagctgcccttgggcaccacgcccaccggcactgtggaggcggcttggtgaatattcctcctcttgccgcccgtccttgctggggtgagctggatgaatgcagcaaggacagtccttcaagctgcgtcttgcatgttggtttccgacgctgccggagcgcactgccatgtggccctgggtgtctctcccactcatctgggtgctgatggggctgtcctttctaggttccagatcgtggacatcctcatc

SEQ ID NO: 479535 - DNA, 1000 bp, Homo Sapiens
taattaaaaataaataaactttattatttaaagcttataaaatgttctctgaaacaaaaacccaaaaacaaattgagaagacaagccacacagtgaaaggagatattattaatgcatataaatgacaaagaattagtacacaggatataccaaaaacaccaaaaaaatcaatttgaaaaggacacacctacaagaaaaggcaaaatatatgaaaaggccaaggaccgaagaggaaattgaacgatcagtccaacaaatgacaattgctcaaactcatcagtaatcaaggacacacataatgaatagcctgcatcatcgtttgatacttatcagcttagcacaaatgaaagtgtctgacaacgcaagagttagtcaggaaaagaagacgcaagaaaattcctatatgcgactgggaattgtcagttcctgaaatcactgagggaaataatttggcaagaagcaaatctgcttcgtggatgtacggtgcaaggagacaaattgcagtgttgtttatacatgtgtaagagctaacacttggaaacttttggaagaaacagtcctccacaggcttcctgttctcctacaggtcttactgggtgcaccaagactataaagccttgactcttctttactggatccatttttcggggtcgtagttgcagggaggaacctcaaaggagagggcttgcctgctgcctgctataggtccacatggtgcccagctcagtggtcctctactgtgacttgacccaatgcatgtgcgggagtcatagggtctctgcatcaccccgtgggcatcagggcttgaggcaccagtgcaaatacactgacactggccattgctttagctgtgacaaataaatgaagtcttctgtctctgattcagaaatcttaagtcttctgccagcatccatgaaactggggcagcagcctcacttgtgaatcttgtttcagttagcaggccaagggtcagcggtcaacagagctgctccagcaagct

SEQ ID NO: 479536 - DNA, 1000 bp, Homo Sapiens
gagacagggtctcactttgtcacccaggctacagtgtagtggtgcaaccatggctcactgaagccttgacctgacctcctgggctgaagtgatcctcccacctcagcctcctgtactttaattactaaaaattctttagtgcggtcccaccatttgcagttttgaattatgtgtctgaatgccacaatgacccactggcatttccaataggtcatgtagactggtgagatctgccagaactccacacagggacagccggagaaatcagagatgttcaggagcaaagtaggcgcacagggctattttggtgaagtttcaatctaccacgtggaaggaatattagacacattcgctacggctccaagagcatgagtaagacaaacacagacaggccgcaggcaggcagatgtgtgagtgggcccgcagaagaatgtccagcaaccagtgccatgccacaatggggtgcacggctcagagacacaggacgctctgatggctgagtgatcagcctcccacccagcagcctccaggcatttctacgttgatcaaaacattccatgaggggactgactacaaaaggtcccagagacttctctggaaggatggaaataatctatgccttgactgcactggtggttacacaacctgagtaagtttgtcataattcacaaaactgtacagatataaggggtaaattttactatctgtaaattattcctcaataaagagtaacacaaacacttctgagctctcttcttgggcttaagttctggactttattaactggcatccaacatcaccaaacatgagtcatagttggccagtgacttggaggggttctgaggacacaggcctttctgttttaacacctcagttcatgggactttggtgctaacactgggtaagtcccatgagatcatctggttaccctcagtgcatctcgccattctgctactgcaccttcctgtcaagagttacagacctgaccgccgtatgatgg

SEQ ID NO: 479537 - DNA, 1000 bp, Homo Sapiens; identical to SEQ ID NO: 347013

SEQ ID NO: 479538 - DNA, 1000 bp, Homo Sapiens
aattcagtaaactttatttatatataacaacagtacaaattgtgtcctcagcttgcaaaataggagtgtttcatatttacaataggtacacaataatatattagaataacaaaaaaccccactttattggaacattttaaatacttaattttcttacagtttttattccacaacacctgtaaaaacaacaaaaccagacaaccatcattgtattttcttaaaaatatatataatacagattccagtgtgtcaagaggagtgggtttgagcaggaaaagttgtggggaaaggcaggtgggctccggcccctagtctcatgggatagagagcttgtcccttctgcccttacacacgcaagaatatctgttctgtttggggggagtatttccattctgcctgccaccttccatgccaagatgaaggccaaataagtcaaagtgaggactttgaaatgcagaagatgtttcctaccttccttgaggccagggtaggagggagcaggctgcactgcagcagaaagaagacagctcaggctgaagggagagcttctctgctgtgagaagaatgagatgtgggtgtccacgagaggctgaggaatctccagtttgcttattgggtggaggccctgtatgccaagcagtggctgtgatcgtgtctcaggactttccctagcactagttagaaaataccaagagtgaaactttatccctcattcatggggatcactgagctccagatactaaaacgtcacacttcagggaaactagggaagagagactgagttatggaaaggatgctaccatttttctcaaagcatgttcctgagacaaggcgtcggaaggccctgaagttcatctcccaagttccccgtcgatctgctcccacagccctgtgtctgtgaagccactttgcattttctcacccactgagcctcctgagtctcaattcttttctctctgtgcccaggccccaggagtctcatgcaagacacagcgtggct

SEQ ID NO: 479539 - DNA, 1000 bp, Homo Sapiens; identical to SEQ ID NO: 347014

SEQ ID NO: 479540 - DNA, 1000 bp, Homo Sapiens; identical to SEQ ID NO: 347015

SEQ ID NO: 479541 - DNA, 1000 bp, Homo Sapiens; identical to SEQ ID NO: 347016

SEQ ID NO: 479542 - DNA, 1000 bp, Homo Sapiens
agacaggagaaatgtaatacaaaagactggtacactttgataaaacagtaactctaaaatacaagaaaactctatatggtaccctggagctgagggagagtattcaatgaagaaaaaatttagaaggggtgttttctccacaagactagagtagttgaaaaaggtgcagtggcaacccactcaacagcaccgcgtttcactgctttgctcaggtcagagctattcggcaactgctggacaataacaatggcagaaagcaattctccgcggcataggttccacacagttgaatctctttcagtggatcaagctacttaaactctggtgcttaatgtcttcacttatacagtgagaattaatacccacttcctgaagttatccttaggaccctcctggaggactgtgggtataggtgtccaagaagaaagctcaaatctgccgaaggcaggtaccttacttgggatttactgtccaacaggtgtcagaacgcagcccgggaacagaaagtaagcaggtcatttgcaatctaccagagcctggaggactgtgggtattaggtgtccaagaagaaagctcaaatctgccgacggcgggtaccttaattgggattgactggaggactgtgggtattaggtgtccaggcagaaagctcaaatctgccgacggcaggtaccttacttgggatttactatcggacggggtccgacgcctccttgggatttccgatccgacaggggtccgaagccacccgggaacagaaagaaagcatgttatttgcaatctaccagagcctaagggccaaaggcaggcgagagaattctcaggagctgtggggttttgtagactgtggatcccaaactttgcaatataagccaagcctttgtatgaggtcacaaagggggcggggaccgggaacctttggaatggggatcctaacaacagcaagtctttcatgagttaaaggaaaaacttctggcagcttcagccctggggttacccg

SEQ ID NO: 479543 - DNA, 1000 bp, Homo Sapiens; identical to SEQ ID NO: 347017

SEQ ID NO: 479544 - DNA, 1000 bp, Homo Sapiens; identical to SEQ ID NO: 347018

SEQ ID NO: 479545 - DNA, 1000 bp, Homo Sapiens
cttgtaaagaaatatttaatagggacttaggagcagaagcgatgttccgggctgccacaaaatggtagatccccacatctgccctgcagaaagtacttttatgtagcaagcttttagggtaaaacatgtgcaggtggccatatctccgattttaatgcaaaactcatagccacttggggagggggttagctaagcatctttacaaagggttatgtatggtacaggcattgtttaaagagcttactgcagagcagcttggtatatgggggtgaaacattcatcatcatatggcggttttaagatggcatcactcttgtcacactgttttcctgtacaacctacaatagaagagccattctggcgtgtccacttctctgagactttgcataccttcctccagggctgttctgacatctccacttcatcgcctatgcactatcacttcttccaagctttcaagaactgcctcaagtgctgggcactgtggctcacacctgtaatcccagcactttgggaggccaaggtggacagatcacttgaggtcaagagttcgagaccagcctggccaacatggcaaaatcccatctccactaaaaaaaaaaaaaacaatacattatctgggcatggtggtgcatgcctgtaatcccaggtactcgggaggctgagacaggaggatcgcttgaacctgggaagtggaggttgcagagccaagatcgcaccactgtactccagcctgggcgacagagagaaattctgtctcaaaaaaaaagaaccctcccaagcaacatattagaatcttcccagggcctttttaggggttagggagtctttctgtactaattaactctccagtctccagctactatgcagcctcccttgatctagaaccttcagagtccacatctaggaacattctctagacccggctggtccctgctggcttgctcccaccactcctctgcttgttaatccctcttggtccctggcatgcaaagcacat

SEQ ID NO: 479546 - DNA, 1000 bp, Homo Sapiens; identical to SEQ ID NO: 347019

SEQ ID NO: 479547 - DNA, 1000 bp, Homo Sapiens
ttttttgatttttttcttttgttccactcacagatttcttcttattgcccaggcttgagtgcaatgacctgttctcagcttactcaacctctgcctcttgggtttcagtgatttttctgcctcggcctcctgagtagctaagggaggagtcttgagattatcatccacggagggtggaagaggagagggtggaaggggaataagaagacattcgggaggtgtcttgaggctcagggagttatcagttatagaatgttgttgagttggaggaggtggctggcggcccatcctgttttttaaagtttcagctgtgaggtagggccagtagggcaatcctgaagaatgacgatgctccgctgccgccattctgacccagttgcaaagaggctttcttgcagagggggtgattttgcatttgtggtagtcctctgcccgccaccgcaactcttgcgcacgttgaaacattttctgttctttggcggtcttcctctttccattgattttgtaatgatggttgactttctttgtgaccttcatcttacggattttagcttgaacttttgtttccgcctgtttccataaagtacagatgtcttccaggccaattttaattccttcctgtctacggcggttggacctcctagctctctgctgtacatccctggatctatcatgtccatttcgagaccagaagatagtcttcaggaaaggcacacaaaggtaaattgtgcagaagagaatggtaaatttgtaacgtcccagaaacacaataatgataattatccaaggacttccaccaaagtcagtctcacgatgacgatggtcagccagagtattgataacctgatttctggtcctccccaaccagctccctgtccctgcttctgggcgctccttccttcctgagctcccagggttcctcaaggtcaccttcctcaggtactcgcatgggcatgtcactgactttacgtgctgctgcagctccttggtgagcgggccc

SEQ ID NO: 479548 - DNA, 1000 bp, Homo Sapiens
tacatcactcatgtctttatttagggtaggccactgtcctctaattccatactgattcttctgggtactctggtgagccactcaaaaaacaatttctgccaaacctttgggaaagtatcagtggtttggtggccaaattcctcatcaaatagtgcaaactggtttcctccaagctgtgacttctgcagagacagaaatgtccttgttaagtaacactgtcctcaaattttctatgtgtatcatagcctacttcctcctgaatactacctttctccaaatcaagactcaaaataatatgttttctttttaatttctatcctaaatcccatatagaaggaaggatgcaagacgtggtctccatgggagacagagtataatcaccaactaggtccaaaagaaaagcaaagtcgtgtcctgggttcctttttccaagttccgagttgtgggaagatgggttgtggcagctccgggagcagacacataggatttcctccttcctcagctctcaggagggccgctggatccaaggcaggggtcaggtatttccgagatgaagtgaactgaatagggcggctacccgaaaggcagtcctcagcattattccaggaaacatcagggcagaaccatcttctaggcacagtagctgttatccgtttgccatttcttctttgcactgtaacaggatccgctttgcagcttcaagcacagtaaagttgaaagcagtcccaccttggcaattgtgtataaaacgacaatgtgcagatacaggaaaagtcccaggtccgaagccacctaggaacgatgaccccaggacagaagtgtgcccaaacaaatgcctggggtaggtcattttaaaaggaacaatgtttacaagccctttctagcgtgaaaaacagagaaaagagacccagctctttccacccaatctgctggagcgccgtttcgttttcagttgggcgagagggagacatgtggcctctcgccccttttcctgactctg

SEQ ID NO: 479549 - DNA, 1000 bp, Homo Sapiens; identical to SEQ ID NO: 347020

SEQ ID NO: 479550 - DNA, 804 bp, Homo Sapiens; identical to SEQ ID NO: 347021

SEQ ID NO: 479551 - DNA, 1000 bp, Homo Sapiens; identical to SEQ ID NO: 347022

SEQ ID NO: 479552 - DNA, 616 bp, Homo Sapiens
gaaaagaaggaatgtgatttctcatgattgaaagcttgatttagattgcatacagcttttgctacccaagaccaagaggctctggcaagacagggtggttttccgaatgccagaccgacgtgccttatgaaggcagctgccgatggttccagatgtagagagataggtgatgcaggagggaaagctggattggaaaagggagagttttgtagatgggctacgctcattgtgcctttgaaagagcagagccggcagcctgtagtcatcatttggatatacaggactagagcatgaatctgatgtagagctacagaatgaagagcaacagcagctgtttaaataccgagaaagtgtgtagaatgaaattggacaagccaagcatggtggtttcatgcctttagtcctagctacttcggaggctgaggtgggggaattacttgagctcagcagtttgagtccagcttgggccagatggtgagaccctgtatcttaagaaaagaaaaaataagaccaggtacagtatctcatgcctgtaatcccagcactttgggaggccaagttgagaggactgcttgagtccaggagttcaaaaccagcttgggcaacatagtgagac

SEQ ID NO: 479553 - DNA, 588 bp, Homo Sapiens; identical to SEQ ID NO: 347023

SEQ ID NO: 479554 - DNA, 1000 bp, Homo Sapiens
ctcaaaagaaaaccctctgtcttctgagaagctccggaaggtccaacacgttgcctgtctttctgaaaagtgtcttgtctgttaatgtcatatgagcccctgtggtggtagaagaatgctataaattttggatccacagaactaaagtacgagagggaatttttcacaggaaagatggttgatacttgtccttagtatcagaacaatctccagtggattcaacagagcatctgccgttttcttgaacaaaggtttcttagggctggaacaccagtaaagcttctcttctctggaaaaagtttaggtctctgaagttttctcagtgcatcataactgacagcagcaggaatatggttttgcttttatcctggcccagacgcggctggggcggacgggacctctcgcgctctgcctcctcctcttgcttcatggagccatgcgcctgggtgggggctcccgagagaagctggcctgcgggcgggccggacgcgctgcgcggacgggacggggcgaaggaggccggcaggcggaggaggaagcggcggggcggcggcggcggcggcggccgggaagaactagaggtattccccgggcggctggaggactgagtcgagccgggacccgagtcctccggtatcccagcagccaccggaggcagtgaggtaatggaggaagaatgtagggagtcctccggtggaccacactcctttggccggcgcagtgcacgctgggccgccccggagcgatcgcagagcccgtcgggagtcgtagtcccggacgggcccgcggcatcgtccgcgacgcagctcgggatccgggtcggggtgtcggccgggttgctcgcctgaccggccgcagccttggataccagccttaaatcgagccgactacggcccagccccgcccgcggcgaggtgcgcggggttcggtgcgagcccctcgcccctggccgggccagcctcttgatgcaccggggacgggcgcgcccatccgactcttc

SEQ ID NO: 479555 - DNA, 1000 bp, Homo Sapiens
acttttaaattgtccttctgactcacagcaaaagcttctacctgatggcccctttacttccattctttatcagcagacctacttttgtgccaatcaacccatgctccttcccactttggctctttcccagtcttgacgaatttcaacagcggcctcacttcgtgaacaaagttcaaaacacattttcagtctgagaaacacaggggttcttaggaaggcaaggggactgggtgtttgaaatcaggatggtctcagccgatccagactattaggtggctgtgtgcttatcattgtttaggaagcaatccttgtacccccaggtcatgcatgttgctggaatctctgtccacaccagcaggccagccttacgtcccagcccctttgctggaaagcctcaatccaggaaagagtggctatgtgacctacagcaccgagaccagaaatcctttcattttgtttcccagcatattgtgctggtgttaaatgtttatgttttatcttttgaatgattttaatttaaccaagcaatacttttcatggctccaaattcaaactgtgcacagtggaataggcaatgaccagccttcctcccatctcttttccctggccacattttctttcctggaggaaacaggtgttatctgattgtttctcatcttcactgaaacacaccctggctggcctctctcagctcactgttggcctcgtcttcaccatacgttcttgctgtttggaatccagtgtcatggcatgtggttctctgcatgggaattattgtagcctgtctttaaaaaaagcttcattctcatttccacactgagaatcactgtccgtttattagtatcaaaatgataggaaagagcactcatgttctgtgttgtgaacaaggggagtattagaagaaactggtcaaaggagatgaggagtgagaactcagagcacagcaacaaaatcttctgagacacacaaatcactccctgctgggcagggtaattttgca

SEQ ID NO: 479556 - DNA, 1000 bp, Homo Sapiens
tgcgggagactggagttttattatcactcaaatcagtctcctcgagaattcggggagcagaatttttaagcataacttggtagggggaagccagtgagccaggagtgctggttggtcagggatgaactcacagggagtcgaagctgtcttcttgcgcttcgtcagttcccgggtgggggccacaagatcagacgaggcagtttatccatctgtgtggcgtcagctgatccagcaagtgcggggtctgcaacatgtctcaagcactgatcttagaagcagtttagggagggtcagaatcttgtagcctccagctgcgtgactcctaaaccgtaatttctaatcctgtggctaatgttagtctagtccccagacaagaaggaggtctgcattgggaaagggctgtcacagtctttgtttaaactataactacaaactaagtttctcccaaagttagttcagcctacgcccaggaatgaacaaagacagcttggaggttagaaacaagatggagctggttaagttagctctctttcactgtttcagtcacaattttgcaaaggtggtttcaaaatgactatccatgagtttgtaaaataacccaggatgcctgttgttcacagcacatagcctgctgtgtgtctaagctgataatcagctagactctggggagagaaaaatgccaaaagaaaatggccttgccctgctagagagtcttcaggtctccctttggatgcatgagcaatatggaagggaatggagaaggaggacaaagaaaagtcaccctccataattgggacagggtttggaactcttgcggccaattctttcatgctgcctggccccacctgccccggagacttctggtgcttaacggaggctttcttctggctgtcctggaactatgaatgggcctgccttggataattttccctccaggcgctctctgcctggggtctgtgaacaccctcgaagtagtatccaccatgaattgtatgaataa

SEQ ID NO: 479557 - DNA, 1000 bp, Homo Sapiens; identical to SEQ ID NO: 347025

SEQ ID NO: 479558 - DNA, 768 bp, Homo Sapiens; identical to SEQ ID NO: 347026

SEQ ID NO: 479559 - DNA, 1000 bp, Homo Sapiens; identical to SEQ ID NO: 161533

SEQ ID NO: 479560 - DNA, 1000 bp, Homo Sapiens
tccgtccccgctgcccttctgtgtttctcagccaggacacgcagcctctgctgtgggtttacaccaaggtgccaatgtagagactaaaatggacagagcaggaatccctctcctctccaggacatttgctggagtctccagtgaaaacgcagtaaacagcaggcagggtccgtggcgcttgcagttcgacctcaacctgcagccacggagagctgtggggagagcggagctgaggccccggcagctcccggtcccgcaccgggctctgctggcggctgccgagttcctgagactcctgcccccgcccgtgtggcggcgcctcactccgcacctgcggcagcccctgcccacgccgcctccacccgccccgccgcggcccgacttcgctaaagttagggtcctgagctccagcacccacagccgcccgcgcagagccccgcgccgccacctcgggtcccggacccttcgccgccgccctcgctcccgggatgggaaaatttggcgccggtgagcgcgttcctcggcggcgcggcgcggcgctctgggtcctccgtgtcagggcgtctgcggaagcggctccggtggctcctctgctcctcgtggcacgcggcccagacccccagagtactgtccgtgccggcactgcgagaccgggctcctgctgctcctctctcctcctggggtgccaccagcgcccaacgatgggagaggtgagcaggagcctgcgggagcgcaaagtccctgaagactgggggcgacggcagcatggaactccgcggcaagatgaagatccctggcaggcagcgttgcgagtagcagagtggtgatggggtggggtcggggagcgaagcggggagggagtgtgaaagtgggcttggagggtcaagggcagaaggtgatttgaggcttctgacttgaagtgtgcaaaataaaggctatgcttgccttcgccaggaagtatttcatctccaagatgggcctcagtcctcctggaactccc

SEQ ID NO: 479561 - DNA, 548 bp, Homo Sapiens; identical to SEQ ID NO: 347028

SEQ ID NO: 479562 - DNA, 1000 bp, Homo Sapiens
gagaacaggaactcaaatacttgtatatgaatgttcatagcagtattgttcacaattgccaaaaagtagaaacaacccaaatgtctatcagtggacgaatggaaaaacaaaatgtggaatatacacgtaacagaatattattcaaccataaaaaggaatgaagtattgttacatgtcacgatgtgtatgaacctcaaaagccttatgttaagtgaaagaaacaaacacaaatggacagaaagtatatgtatttctattacatacccaaaataggtaaacccatacagacagaaagcaaattggtgtctgccaggtgcatgaagtattgggaatggggtctacctgcatcctgggtacagggttttattctggagtgacaaaaaatatttggccgggcatggtggctcacgtctgtaatcccagcactttgggagacagaaacaggcggatcacctgaggttgagatttcgagaccagcctgaccaacatggagaaaccccgtctctaataaaaatacaaaaaaattagccgggcgtggtggcatgcgcctataatcccagctactcgggaggctgaggcaggagaattgcttgaacctgggaggcagaggttgtggagagctgagatcatgccactgcactccagcctgggcaacaagagcgaaactctttctcaaaagatacatatatctatattttggacctagatagaggtgatggtttacgtaacatagtcaatgtactaaatgccactgaattattcacttaaaacggttaattttgtgttatgtaaactttacttcaataaaaacaaaagagaaaagattatgtccatacaaatggggtgtttaataaccagaaataccatatggacttagtgtcatctcctctatcaatgaatccgctctggagtaggagcatactaggtctcagaagcttgcaaattttattcttttttttttaaccgcctcactccgctcccaagaagcttgcaaatttta

SEQ ID NO: 479563 - DNA, 1000 bp, Homo Sapiens
tcataaacagagaagagagaaatgctttttaaaaaaattctcaaaatatttaaacccagaaaagtgcaaataaaatccagcaccactggccccaggagtcggagcgctggtcttttctgtgctacctgaggtttgagtgtgcagttgcgggcatatgggagggaaggctcctgctgtcagcatcgaaagcagatactcatttaaattccagttgcatgcctgaacgttgtttcttccggaaatgtcagctctcttaattctttccccttttaaacagatccaaatgatttccccttccacagcctggccagggaattttctgccctctctgttggcatattcaggttggagccctgcaggagaagatcgcacactgcaaattgagcaagtcgctgtgatttcgcaactggctgcgcttctgcatttcgtgagatcagagctgcaaaggcgagggggtgttctcggcaacagatgtttggtaattaagcatacggtttccttgttttggagagcttcagagagcagggacacagtttgacaaataaggagggtgagaggttcacacgaggccgtctttaacaggtgtctccagatggacctgcgactggtgctctgaaaagtgctataggcctggcccctcaaggcccggaagccccaggaaaggcctccatgggtggagcaggggctggtgtcaagcaggcgctctgcagaggcacagatctctgcatgattgatgcctgaaaggggcttctttgagggttgagaagaacaaagcgggaggaactgttttgtcttcgtggctgaaaagatttgcagccccaaaggagcagcaatgcacagctcatccgagaaagcataaaccgctgagaacattctccccttccgagggtccccatgctcccgttcactggaaggcaagcgagagttaagtttcctggacttcttctgagcaccattatccgggggtagcgggcgtagcctccagagccttggcctgtgc

SEQ ID NO: 479564 - DNA, 1000 bp, Homo Sapiens; identical to SEQ ID NO: 347030

SEQ ID NO: 479565 - DNA, 1000 bp, Homo Sapiens; identical to SEQ ID NO: 347032

SEQ ID NO: 479566 - DNA, 1000 bp, Homo Sapiens; identical to SEQ ID NO: 347033

SEQ ID NO: 479567 - DNA, 1000 bp, Homo Sapiens; identical to SEQ ID NO: 347034

SEQ ID NO: 479568 - DNA, 1000 bp, Homo Sapiens
ctatttaaaacacttggctccttttatttcaccaccacggaagtgaattcggttcttaagtgccagagcaaatgaagtcatttggtttccgcgggctctccgcatctcagcagaaggagtcaggctggacgaaagtcggaaggcccatctaagttgttctttcttacaattaaaattgattcctggaggattaggcgcttgggcttcatttagtttttttctttgaaaagccttgtaagaaacatcatcctgaaaacccacccaccagggcatcccatttttactttgactaaaataaaacacatatttcaaagctaccctattctgtaccactacaaaacgaaagggaagggaagttttccagggagagtctcctcctgggtttggtggtaactgcgactcagtcttttttggacacaatgtttctgctgactcctgaaaattttccacttgaatgtgcaatgaagcggcggcggcagcggcagcaacagtcctggagaagcggcaaagacgaccgtgccctttttcatttacctcggcccagggagccaccgcagcgcccggcgagtccgaggcaaacttcggcgccgcttcccccgccctctgctcggtgcccggctccctccccggctcccggtccctgggcccggccaccccacccctgcctagcaccgctcctgccccggggccggctggcgcgctgggctgctgcccgcgctccgggcaaaggtggaggggtgggggggcgtcactgcatggcctgtgcctggacgcggccgccccgggcccgggccccgccgcgcggaatggcccgcagggtggaagcgagtctgcaaagtgcttggtgggcgcccgcggcgggcggcggggccgcggcggcggcagcagaggctcggctcggctcaggcggcgcggcgcggcgcgagcgatgctaagaatgttcggaatgaggacaggaatgaaatgaacgccaggaccgaactcgctccggaggggtggg

SEQ ID NO: 479569 - DNA, 1000 bp, Homo Sapiens; identical to SEQ ID NO: 347035

SEQ ID NO: 479570 - DNA, 1000 bp, Homo Sapiens; identical to SEQ ID NO: 347036

SEQ ID NO: 479571 - DNA, 1000 bp, Homo Sapiens; identical to SEQ ID NO: 347037

SEQ ID NO: 479572 - DNA, 556 bp, Homo Sapiens
ttaaaacaacagtaattatttattatctccaacagtttctggggtcagaaattctgacaggtcacagcagaatggtttcatgatgtctgggactgcagctggaagacttgaagactgtgggctggagtctgaaccctcatatctggtggttggtgtgggctctccatggggacctagctggggctgttggctggaacacccacatgtggtctctgcggtgccctgggctttctcacaacatggcagctggattccaaggaaaagcatcttgacagagggagagagctgggggagccacattgccttttatgacctacactcagaagttatagggcatcaattctgccacacctgggatgaggggttctccttcaaccctggactttgacatgaacctgcatgagcagatgtttctgtcaccagtgattaccctatattgctcttagtatctcatagagaacacttcgttcacagaatgtcatccaaaaatggtgagcttcaagttctagaagcccttggccaggctttccatcgccctactgctgccttcagccca

SEQ ID NO: 479573 - DNA, 1000 bp, Homo Sapiens
gtctgaaaggcccacctccaaatacatttggagttgggacttcaacatatgaatttggggatcacagtcagtacataagaaagcacatctgaaataaaaacacaaaggctaaaagaaaggaaaaagatatactaaatgattttgaaactgaaaaagcaaagtaataacatcaatactaagcaaaacagaacttaagacgaaaatctgctaaatacagaattctcccacaagataagtcatgaatcttcctcacaacacaactacaaaatacatatggcaaaagctgacatacaaaaagaaataggcaaatccacagtctcagtaggagaactcaaaatacttccctcagaaagcaacagatgatgccgataacaaagacaacttgacaaaatgccatcacaagttgatatttctggtgatgttggggttatctgcttactgtgtatttgagaacttctgttcatctgtttgtcaaactgaccagcagggggtgctggggagggaaacactccacagggagggtggggaaagttctctaagtctagaggctcctggtccccccatgatcatcatctatcaggggcaagcactgctgatacaggagcctacttggagcacagtttcataaatgctggcagatgacacaagcctcctggatcaaagacagtattttatgattcattcaacaggcagaatgatttttgtgtttgtgtcagtcatccttgctccataagtcctgtgagttctgcctacttgatggtgacttcatgtcaatcagaagggtcctagagatgctgctgatctcaccatcactgacttggtcacagtactgtctgttgacttttgtttttctctttctcttcacatccagatctccatctctgaggatcccaggctctcctagtctttccatccctccttcaggtgtatggctctggttctgaggctgagtaatgatgatctggtaatctgtccaggcatctaccatcacctccatttt

SEQ ID NO: 479574 - DNA, 471 bp, Homo Sapiens
cggccgcagcagtgctctgagtagaagggggaggtgagcctacaaccggattggccactcaagaaagtaaaaggccggcgttccctcagatcctcttcctgattggttaccacggacgccaattaccttctccttgggccagcagtccacactgtagccttgagagtcccggagctcccccaaaatcaaacctctcacaggtggtgaaaggacctctgtaatggccttccagaagtaggcccggcaggaggctgcactgtccaggagacgctgaggacaagttccctctgggaaccagcctcccagggtccgcgatgaagaaacctttctgagaccatggagatttaaagtataccccgaccccaccctctgagcctgtgtaaaggccacgggatcagtgatgaagaaaatcaatttcgtctcagctgccacgtgcccttcagaggtggccagcattagaaggtaacgcat

SEQ ID NO: 479575 - DNA, 1000 bp, Homo Sapiens
gcgagggtccgtggcttcattcttgaagtcagtgagaccaagaacccaccagttccagaaacactatgctccgcttgggggctcccctgccctgtatcaactgcgctctggcctgggtggcagagagagaaacactatctgttcccgttggttttccttgtctcctgcaggcagagagctgatcaaaacagcaaaagcaaagcagtgcctctggcccagttctgaagccaaccttccttaaccacccagacccatccctggttaggacttgctgtggattctcaggtgactccatctcaggatacagggactgagagggtgtatgcaacatctcagacccagaaactgttgattctgtctaaaaacacagcaataaccacatcccaccctcttgatttaaatgaaagtgtttgggggaataaaagatgaaccttttttttttctttgtcagatcttgcgctcatttggttctggtggggaacaacagcttcgtggcagatatcactattgtacttttatactcatttgtgtgataagtacttcaatgtccacttcttccacgagcccctgagcccctggagggcctggaccacacctagtttttctcactgttacatatcccttgccagacacatggtagacgcttaataagtatttggtgaacgaatggcttgtttggtgacagtccaaaggctaggggacagagggaaagctccctcctatcgggccccagacgggtggcgctgatggagaggaggctaggataaggcctccaggaccgaagcgcgcacccataaggcccctgccaaaaagaccttcctgaaggcggaggaactgtgagagtgcctacgttggcccaaggcctgacccgacgatcccggggaccctagccctaacggccccgcctcctgggccccaaacccggactcggccccgcccgaagctccggatcctggggcccgaccatggccccgagtcggcagaccgtggactcgctcct

SEQ ID NO: 479576 - DNA, 768 bp, Homo Sapiens
tgggagtagaaggggatccaagggaaagggagagccttctttgtccttttctcctcccttttcctcaaggggcttaaggacccacacgtggacctgcatgggcattttctgccctctggatgtcacctgcaggccacttggcagcctcctggatcacctctttctggaaacatgtactcaggatgtacagggcattaatattaacccacgttgttgccagattcatctcctgaagcatagctctgacagttcccaataagtgcttctctgttcagaaactttccatggctccccactgcttctctggcagctccccgtcgccccgcgcaccgctgcctctccgtggaacgtccaagtggtgcagaggagagggatctccggagactgggttctgttgcgagctatgccacgttccgtcccgggcggaactcttctttgggcctttgtttcctcgtctgtgaaatggggccagggtgggagcagagggcttgcagaagccctgccagctcccacgctgctagccgggatttgcctgcctttgtcagcggaggaggagggcagcccgcgctccagccggctccccagctggaaggcggccgaggggtagctcccgagcgagggtcctgagccggaccccgcagcccgcgctcgcgatccgcctctgcttcggtcgggaaggcgcgtgcgctcgggctccgaccgggccccggcgggcgcgcatcgaggccaggagggggttaacgctaacccctcccctctggctgacat

SEQ ID NO: 479577 - DNA, 1000 bp, Homo Sapiens; identical to SEQ ID NO: 347040

SEQ ID NO: 479578 - DNA, 777 bp, Homo Sapiens
atagtttaaataatatattttatagggaaaaacaaagtaacatccacataaatctggaactaccaccactttccagaggctgaatcccatttgtggagtctcttgcgtgtcaagtaccttgcagtcagctcaattatatacttttgggattcgttgcagagaagagtgaagttatctattctctcttacgtgatgacaaacttgttgaaatgtcatttcattttgtggctccagccccaggtattctgactctgattctaaagggtctgcatgcagagcgagcaagccacctagatgattctcttgcaggtgttttaagggcaggagtttgagacaccctgatgcaaaagaacgaaccctcaaggaagttggctgtacgggtattttccttccaacacacgctggcctccctaaagcctgactccattcagcacctgttccactgagcacccactgaaagctcagctcatgagctgagatgacccagacatcagggagtttacaatccagggggaaaacagacctgccatctaatcttgtcttcctagcagtcctgggagagaagcagatgtggtttccaatcccactttccagaagaggagactgaggcagaggctttgcagatacacagaggacatgtgaggacaggtgaaggtcatgatcattgtcagccccctcccccaactggacattcccagatctggtggacttggcaagaaggccactggtccaggacctattagaagccccacttctttcctctgtttctgctgccat

SEQ ID NO: 479579 - DNA, 1000 bp, Homo Sapiens
ttttttttttttttgtttttgagacggagtttcactctgtcaccagtctggagtgcagtggcacgatcttagctcactgtaacctccgactccctggttcaagcagttctcctgcctcagcctcctgagtagctgggattacaggcacccgcaaccacgcccagctaatttttgtatttttagtagagacggagtttcaccatgttgaccaggatggtctcaatctcctgacctcgtgagctgcccacctcggcctcccaaagtgctgggattacaagtctgagccactgcgcccagctggtaatttcttttaaggttaaacatgcacttgcacacggcccaagaattccattcctagatgtgtaaccaaaagaaatgaaaacatatgtctacacaaagacttgcaccttaatgtacaaagaacagcacatgaatgtttacagtaccttcattcctaaatgccaaaaattgttcatcaaatggcgaataaacatactatgatatattcacacaatgaaatactactcagctgtaaaaaacaaccaagcatcaacaaacatgcatcaacatggatgaatcaaagcattaagtgaaagaaacctgaaacataaggctacatactgtatgattccatttacataacataccagaaaagacaaagctatagacagggacagagaacagatcagtggttgctaggacctatgagtgaggggaggaaactttagaatgatgggaatattatttgtctggattgtggcagtggttccattatatgcatttgtcagactttatacagcaatataataaaaattacttttttacttataaatcatacctcaataaaacttgattttttttaaaaaaagcaacatatgccctttttaaaaatatgcatcagtttaaatgagctaaaccaaacttactgggtatgggaatagggcagggaggaacagtaaggagaccaaaaatccttaaaatactggaaatctaaaatatt

SEQ ID NO: 479580 - DNA, 1000 bp, Homo Sapiens; identical to SEQ ID NO: 161534

SEQ ID NO: 479581 - DNA, 680 bp, Homo Sapiens
tcagttcagcataatttcgattatttatttaattataaatgtaaatattaacacacacacaatgaaaatcaatgccacagagcccttcatccagttgcctatgctcaagattttgagtgcagacacccaacaccgttcttccaggagcacatgtatgtcacactctgtcatgccagttagctaaacaaaaggtttgtctcttcctctcccgaaaatgcacatttccctgttttgagtatgtgtgttgttagatgatgtgggtctccacaggagctcttcagcccctggtgactttgagtggcagcaacattctctgctgcgagtaaggaatccctgtatggccaggccacctgctactgttgcttccgtaatgatctccgcagcacagaatcccttattagttctctgctgttgggtggctggcttgatgatcattgttccaccacttagcttaggcctccagctcgaattctgtgactccaatgccattgatcattttagctgtgatgcaggtcctctcctaaagatctcatgctcagataccataagcagtatataatgatattcctttcttttcctctagaatacatgaacaactcccagacggggtcgcggccgggcagaggcgctcctcgcatcccagatggggcggcggggcagaggcgctccccatatctcag

SEQ ID NO: 479582 - DNA, 1000 bp, Homo Sapiens; identical to SEQ ID NO: 347043

SEQ ID NO: 479583 - DNA, 937 bp, Homo Sapiens
ctatcctgcatttgcagcccagaaattactggctttagcagtctttgctctctcggtttaatctgaacataaatacagatatttgcttcaacagtcgctaaaggaaaattataacactgtcaaaaaaacttggagaagctgcctgaaaatggtgttcatttcccttttctttcagcattcttctttgttagcacaactcagaggagtgcaccagtagagttactacctttcttctttcaatgacggggaaagccaccaccatctgccacattttttttctaaaagcaaaacccaaacagaaaaggtatttgctcttagcaaataatcaaaacgcagcaaatggactgtcccaacatggttgctttgcgggggtcacctctttggttggcagtgaaaaccgactccttgcacttcttgtcaccttggtggggcattgcaggttctgggaagaaactgaggccactgaggcctgctttccgagaaagagaccaaaggccagaaatggagccttcactcaggatgggtcacattggtaccaaagataggatccaggataactttgtcgggcaccgcgcccagcaagcagctctgagccccgcacagcccgggggccacaccctcggagcgcacccggcatccccgctgctcctgtgtccggccccggcccttgccccacgcagccgagtccgctgcgccacgttgcgtctctaagggtcgctacctgcccctgcagagtcctggccgcgctgactcgggctctggtggctggcgctgcccccaagacaactcttccccagaccccgccgccacttccatactgccagatggtgtcattgttgaagagtggttctgtgcagttctgctgctgtaattctccactgctgagaaaactgtccaggaccagttgtttgtgaaggtagagtgctttgtacttcat

SEQ ID NO: 479584 - DNA, 1000 bp, Homo Sapiens
gcacgcgaatgctcattgcagcacgagtcacagtagcaaagacatggaatcaactgaagcgcccatcaatgatagactcgataaagaaaacgcggtacatatacaccatggaatactatgcagacacagaaaggaatgagatcatgtcctttgcagggacatgggtggagctggaggccattatccttagcaaactaatgctaaggataattgggtggaggacacaatcccacaaggcgctgtcccttgcacggccacggcagagggaatgaagaggctcctctttgcattggagccctgggactcctcctgttttccacatccctcctcagtgtgtaaataggtcaggagccagctccacacctcccagctccggagacggcagggccgagtgtgtgcagtgtccgtgcagaataagtcatccactgaattattgaagaaacacacaagggacactgcccttgaactgggaacacgtggaggctcctgtttggttcctgcctttatacagctcacactcttagggggaagcaggtgagcagaagaacggatgcaatgcctcacacccagtgccctgaacagggaagggagggaaagcccgggaaattcctagccaattgcaagacgcatggatcccagccccagtgaaacttaggacccaaggtggtcacagagggaagccactcactgctcccttcacaagcacagctgcaaggagctaaggctgccaggctggcaccgccatgctgccgtcttgggatccactgagcatgttaaggccgtgctcccaggctgagctcaggaagaagcgcaacacaccatttttgcttgactccactaatgggaaaccttgaaaccgaaagactggcttctcttgccttctaggccagaagaaccactcccgggcccaggagagatgaacaagcatccttagcataggccgcaggccccacggggaaagtgggttctctgaccccatgcaggctgggttgaaagtcag

SEQ ID NO: 479585 - DNA, 1000 bp, Homo Sapiens; identical to SEQ ID NO: 347045

SEQ ID NO: 479586 - DNA, 1000 bp, Homo Sapiens; identical to SEQ ID NO: 161535

SEQ ID NO: 479587 - DNA, 1000 bp, Homo Sapiens
tgtggtggaaatatttattatctctcttaagagtgttcctctgcagtttagaactcagggacccccttgaagatgcccctggatctcccgaagtctctggacctctaagaatccctagtttagcagaaagagtcccagactagaggtcagaagacctgggaatgttcatagccccatacacaccattaagagccgaccacgggccagtcctcttactagattctgctgtcagtttacgaattcttcaccagttatgcaaggtggctatcttttccccatttcacagacgaaataaattcagaagggtttaacgacgtagttaatgctaggagcagaaaacacgggtctgtccgagccactgttaagatcctcctttaaaatcccgccacatggttctgagagtcaatctctcttatttctgtcggcgtcaaacaggaatatcactaccttgcccacctcacagggtgagattccaactagaaagtgtttatgcaagtccgccgtgggtcgcgaaacggcggctgccgtcggaactgcgatgccaaacacagtaaacctcaaggacaagcgagccgagccgagccgagccgagccgagccgagccgagccgagccgagccgagccgagccgagccgagccgagccgagccgagccgagccgagccgagccgagccgagccgagccgaggaggcttgggatccctcctccaggcccgaagccggagtccggcgcgcggctgagtggcaggtgcactagccaatagagctgggggaggcggagcgggcggggctgccctttggccgcgctcggccttgtgggagagctagtggctgctggcttgtgcgcgccggtctcatcgctgctgagggtcagcagagagccgcggcctgtggggcgttgtctaatcccagagcgctgactgcgggcaccgagaatcctggcgttagtccaaggggcctggcgaaatctcgttaacgagtactgcaggctgttggtgaag

SEQ ID NO: 479588 - DNA, 611 bp, Homo Sapiens; identical to SEQ ID NO: 161536

SEQ ID NO: 479589 - DNA, 1000 bp, Homo Sapiens
agatttaccgtgaagatgctgacatgtgttagaaacagaaaatccagctcatgtggtttaaacggagacgtctctcatagcaggaaattccaggtgagggcagcaggattttggtgaattgcctggttgtgccaccaaggactcctgctcttctcatcttcccaggcggccaccccagggtgaagatgctcttccggccaccttctcttataagtgcaaagggctgcggagcaccaggcattgcatccagacagggaatgcaacattcaccagggaaaaaggagcatttcctctttatgttcctgtaggagtgagaaaacctttgccagacaacccccagcaggcttcctgttgggactcattgacttgagcttgtttgaagccaattgttggaaagagaaatggagttaccaagattttctcaagagacagagtttacccttagccacacagagtggatacctgaaccagcaaggatagagagggcatggctgctgcattgtcaaccaacagtattcacaacagaatgaaaaacaattcacatttactactgaataaagcagacactcctgacagacaggcagccttgatctagtgccttatacaacctctgattgcgcctcgaccccaatcccacagtcacggtttacaaggtagaagcttagtcaaaatccggcttcagcagtcagggttcttgcaggaaactgaaggtgttcttgggaggggatttggaagcgagtttgatgaaggactctttgttgcggtgtggtcatggttcaaggatccttcaaagggtgctgctatttagggaccagcaacaatggcagaccgacaacatgtctcaccctaagaggcttgggggcggggagaagttctgttcgtagagcctagaggagttgtgcaatggaaagggcacccaggaagaatcgtagccacagagtgaaaccaacactggtgggtgtggggccaggccaggaaggagaggggaagaggcccctgc

SEQ ID NO: 479590 - DNA, 1000 bp, Homo Sapiens
attatgcctcttattctgtaattattttttattatgaattatttatttccagatctgtctggcctataaggcctgtaggcactataagggggagtactgcgtcaccttcatctttttatccctttggccttgctccgtgcctgaaagctcaccacactggaacgtccaggtgcacatgtgccactggacaccgggatgttgccggatgctcttttggacgctggaatgctggtgcattgttgccggatgctggaatggtgcacgcacgctctgttggacgctggaatgctggtgcattgttgccggatgctggaatggtgcacgcatgccctgttggactctggaatgctggtgcattgttgccaaatgccggaatggtacacggatgctctgttggacgctggaatgctggtgcattgttgccggatgctggaatggtgcacgcatgctctgttggacgctggaatgctgggcgcggcgcgggtggcatgcggccacacggaaggggcgcgctgggctgctgcggcctctgcagcttctacacctgccacggggcggccggaggtaaagggaggcggcggccaggcgcggccccgcggaggcagctgcactcgctcggtccactcgcggcttcgcggctgcccgcaaaccaggagggcgtggagacccggaaccggggggaagggcgggggcacttgtgcggcacccgcggggctcccaggggacgggtaggaggagctgctggccgtcagtgatctgtgcttaagcttgacatcatgggctgaaatgtggggaaatgcgtctgatttttgtaagccgccctcgtgttcctttctagccgtggtagctgtgacatggggggcactggttggcagctggtgtgttttcagaggctgtcggcgatcgtatgccgccatgagcacctgtgcacagcagggagccgctgccgtggtcatcctcagggagccgctgccgtggtcatcctcacatacagttaggt

SEQ ID NO: 479591 - DNA, 1000 bp, Homo Sapiens; identical to SEQ ID NO: 347050

SEQ ID NO: 479592 - DNA, 1000 bp, Homo Sapiens; identical to SEQ ID NO: 347052

SEQ ID NO: 479593 - DNA, 1000 bp, Homo Sapiens; identical to SEQ ID NO: 347055

SEQ ID NO: 479594 - DNA, 641 bp, Homo Sapiens; identical to SEQ ID NO: 347056

SEQ ID NO: 479595 - DNA, 1000 bp, Homo Sapiens; identical to SEQ ID NO: 347057

SEQ ID NO: 479596 - DNA, 779 bp, Homo Sapiens
taattttatatgaaaacgctgggagaaatgtcaatgtggcatccagagtagacaatgtgtgctagacaatctcttgctcttttctgtaccatctcctctactgcagagactggaaatgtggatgctgcatttctcagcctctgtgaccagcggggttacacagtaggttcttcaatgagaggtgctcatgcaagatacatcgcagtccagagcaggagggagctctgcatctctccctggagtgcccaagctggtgagatgtctctgccatcctcgatgtgaggctccccatctctggctctaagctgggtggctcaattgttgtcatcacatggtcaagtgcaattcttctgccgtaggtttgaaattgcagactgggctctgagtgtaacttcttccagcccatctgtgcctggaatgaggcttttgaattttgaagctaggaaactgatgacttcactttttaagctcctatggacaatgtccctttgggagcctgggagtccggtatctggttgctggggctgcaaggtcaccttcatctcccaagtcaacagggtgtcatggctctgcaactgtcctctgcatttactgagatgagaaaaatcagcaaagtgagacaataacatactctggatcccctgtggtccccactctagctaagttagttagaaaagttatgtcctgggacgcctccattctgatctccctcacatgtcacctcccctgggaagccctcctggtttatcccaaccgagaacaattatttctgctgcatg

SEQ ID NO: 479597 - DNA, 1000 bp, Homo Sapiens
gcgtccgccgaactgagccaccttcgcggaccccgagagcggcggcgcgactcaccgcggaggcgcccggacgcgtcaagtgcgtactttcaaccgtaaatgggtgctgagcgtttaggggtgcggggcaactccctaactcgtggggccctggccggccctgccgcggcgtccgagaccttctgatccctcgctgcgcgcggcgcggggttggcgacttgggctcaggggcggcggggcggggaggtgccttgacctagggacccagaggccgggagcaagtctcctttcgccttggactgcagtgtcccccagggcaaggcctgaaccaggtcgcgagggtctgtctcccgtctggggagctgaactgcccgagacactgtcgcagtcgcggggacttgtctggagcggcggggtctgagcccaagtcggaagccgccgccgccgccagcgtcccgtgcgcctgccgccccgggaccagccgcgaaacttcttctcgggacggagacagcgctcgccgcccgggccgaggtaggagctggctgggctcggtagagcgcgggcgaatcgctttcggcagcgaaggaacgtgtcgggagaagccaactgcaggaccagggccccagcgggcgcgcagagacgcctgccttgggcggaggtccccccctccggttttcgtggctctggtagggccctctgtcccgtgagctcctcactggacctgaggctacaggcttcagcaggtcaagcgcccgagtgtgcctggaggattggcggcggggtggcatgagaaggtggcccctcttctccatctcccagtcaggcgatttctctgctgtggagagagctcggagaggagagggagtctcgattgctgtggctgtggctcggagatgcctgcaagaggtgacggtgatgtgcgtggtggtgtgttcactgatgatgctacactgcaggcccagggctgtgttgtggtggcaggtgtcctcctggaccgttt

SEQ ID NO: 479598 - DNA, 595 bp, Homo Sapiens
agactttaaaatacctttcaaagtttcatcccgcctcatgtcgcaggactgctgtgtttgtgaaagcgcgtttgtttccacaagacaagctccgtgtagtcgccagcgggtgcctggcccaggagctgccctgtggagccagcgttgtccccgagctgctcgcctgtggccgtggctccttttctgaggctcctgactccattcttgcagattctggtggatcaggagcttacattctaaatgctacatagaggtgttgaagaaaatttcataggttctgagtccccgatgtttgaacccttccacccaatagaagtgcggtgatttcagccatttcccatctggcggtctgaatttttcccttcagaggagagaagtggtgggcccaggcatccctcctcctgtgtgtggtcgttctggtgagaggaaccttgccattgtagaattcctgcacttttgcagaaaggctgttttgtaaaaatccaaccccaaaataactttttcccatgttcatgccagtgattcttaactttagggtcatagagagccttgataacatgatgaaggtttaaacggattgtcccaccctggaaaa

SEQ ID NO: 479599 - DNA, 1000 bp, Homo Sapiens; identical to SEQ ID NO: 347058

SEQ ID NO: 479600 - DNA, 1000 bp, Homo Sapiens; identical to SEQ ID NO: 347059

SEQ ID NO: 479601 - DNA, 910 bp, Homo Sapiens
tattaactggaaaagattttcttcatattttaccagcttttccactagtgtcatttttctgttctaggatctaatccaagataccacattacatttactgtcaggcatataactgaccgattgttgtataacatattactacatagtttagactttccaacccagccctacatagtacttacagtttctctgggtcagatgcctggcagagatttcaagggaaggctcatctggggaaggatcacctacccagctcctgggattctcgggaggattcaatttctgtccaggtcaagatgacttcactggtgagttattcaaacctgagacatacaatactgtgacatgagctctaccattgcatcaagataccactttgggagatgttccaggctgtggtgtggcacggactttggaagacaatgtcagttgagaagatggaactgagagtcgagaacacaatggctggattgcatctatcatttcttcccatccagtggtaagaatgggagacagcatccacgtcagcatccatgcacactggactgctattgtcatcattactcaagtttctctgtatcatgaatccagatgtagaggatggccaaggacgaggtctcaagtgaaggttcaggtggggaaggctccagtcttcctggaccctgcaattcgggggtttcaggctcgggacaagtgcagggttctccataaaggcagcctcggtggtggacccgaccccttgcagtcccacatggagggagcggaggggcgcgttctgcagcctgctgcacaggataaaaggtaaattccacctggtgagcagaaggcgcctgtggcagctccgctggggctgggggagtacaggcaagagtggctggtggcctggggcacaagagtctgcggagcacat

SEQ ID NO: 479602 - DNA, 695 bp, Homo Sapiens; identical to SEQ ID NO: 347061

SEQ ID NO: 479603 - DNA, 1000 bp, Homo Sapiens
aacatggtgaaaccctatctctagtaaaattacaaaaattagctgggcatggtgtcgggtgtctgtaaaatcccagctacttgggaggctgaggcaggagaattgcttgagcctgggaggcagagggtatactgagctgagattgcaccactgcactccagcctgggcgacaaagtgagactctgtctaaaaaataataataataataataataataataaaaagcattttgaaattagtcgtggtcaatgcaattctactctttggaatccgtttaactaaatgaatgtagtgctcttgttgaacggaaataggtgataggaaatgcctaccatttgactctatatggataatcaagagttgctgagaatgcttgtatctgggggtagattctcattcatcattgccctggcacatgtcaattactacataaaaggtcaaatgcaatgtcaaatccaaagtctcaagaggaaagtgagttcagttcccaagagaacagtgatagctcaacaatgtaaaacttcatctagaatacatcggcattaaattagtgctgtcgaaacaatacgttgaggaattacagtaacacctgaaagttccttctaatgtacttataaatagaatcatggaagctttttatattacctgttttatggcattatagaattaatgaaccaaatgaaaactgaatctccattccaccatcacatcctttatttctattcttattttcaaggtagtattaagtgtccatatttatcaagccacattcaaggaaatcatgtcttaactattttggatgttgcctctccttcaacttgtacatgaaactccagcagatttaatattggcatgcatcatctagtcaaacctctcacatgttcttcaaatcaatcaaatttgggattctcaacattttctgtgtcaataaaaggaatggaattagtagattcgatgaataactgtttttccttgccacactggacttccagacgccatt

SEQ ID NO: 479604 - DNA, 1000 bp, Homo Sapiens; identical to SEQ ID NO: 347064

SEQ ID NO: 479605 - DNA, 400 bp, Homo Sapiens
ctcactaatatagaagagcagggatcccctgcctgaggaggaccaatgcaggaaaggccaaagagcagttagaaatcagcatcccgagagaatgcaagatgttgtgaccaaggtgtctaaatatcaaacgcaagtcaggcggtaatgacttctcggagggagctggcttcggctcaggccattccgggtggggggagaggaaactgaagacaaaactgtgcttctcgtaaaggtctaattcaggatcttctccttgcccccaactcccagaccggcaatttctgaaggctgggaaggagatcctgcaagagaactgaaaatagctctgtgaaccctgccctgggctccaagtgcccgcccacagccctgtcccatgctcccagctcagccttggccccat

SEQ ID NO: 479606 - DNA, 1000 bp, Homo Sapiens; identical to SEQ ID NO: 347065

SEQ ID NO: 479607 - DNA, 1000 bp, Homo Sapiens; identical to SEQ ID NO: 347067

SEQ ID NO: 479608 - DNA, 1000 bp, Homo Sapiens; identical to SEQ ID NO: 347068

SEQ ID NO: 479609 - DNA, 1000 bp, Homo Sapiens
atatgtaaacatttattaaaattccctttttgatagaaagtataaaacagggttctgtgacagagaataaggcagaggtgagaaacctaaaaccgatttagctgctttcctaggcatcagttcagctgaaacgtgaagactaagagggagcaatgcacagggaaggctgagggcaaagcactgtcagaaggaacacctgctgcaaaggccctattgggagaaaacctcatgtagctgctttctaggaagtaaaagaccaacatgaccagtgtgtgggagcacaataaagagccaaactagataagactgggaaaaaagcagggtcagaacctggagaagagctggttttctttcagggcaatgggaagccactgaaggggtttaagctagagactagctggatcctattgagcttttgaagatctttctgcctccacacggagactggattagaatgggacaagaggagaagcagagaccagttaacaagttagaagctatttcagaccctctgactctctgaatgccttccattttttattagagacatataattgccaatcagacctttggattaatatgagataataggtgtcatgatagtgagttaaaaacaaatacttaacatttaacattttaattagccttgaagccttctgacatatatagacaagactccatatgttgtttgaaataataaaaatatctcatggacagcttccccccaactaccacctcataggctctttagaatttggagacactagatttagaatcactactgtaagaactctcggggaaaaacttcaaactgtactttataaaaatgtcctcccgatccttacccatatttacatctaaccttcaaactcaacatcaaagatctgttccaccatttcggtgacagccttcaatgtttcacttatagaagggatataaactagttgaaatctatttttcaggaaaattgtagaagtctggcaacaaactgatatcaatt

SEQ ID NO: 479610 - DNA, 510 bp, Homo Sapiens
ctaaagcggccgctggaggagccacaggtctggcgggtccatgtcgaggtgccctgggctcccgcacgaccccacggcctcctgcgtcccgcacctcttgtgtcctgcagccgcccgcgtcctctctgggaccccttccttccgagtccgtccacatccccggcggttcctctgaaatccgcaccccccaaccccggaacctcggctcttccgcgcgctcctcgtccccgcatcctcagcccctagatgtcctccgcgttctgtatccccctgcaccacaccgctccctctctccctgcccttcgcactaggaccctcagggaccaaaatcgtccaagatgccttccctggtgtcgagtttatgttaaggggttgggtgaggagaccaaaaagcagtggatgtggtaaccacaggggcgccgtgtgtccgagtcgggcgcctgtcggaggaagcgagacgggaggagaggctgcggctcgcgccctgggcagcgacagtgtggacgccat

SEQ ID NO: 479611 - DNA, 1000 bp, Homo Sapiens
tacatggcacacactttaacttcaagtagttacaaatgccagaaagaaatgaactgggtaaaacaggagaggacggtcggagcttcattgtcagggaagacccctccaaggaggggacatttaagctgagactcaaagggtgagaagcggttttacaaggatctggagtacgaacctttcaagcaaagggaacaggataaacatgaggaggagactggtgcccagtagctgaaatgacccctgccccgaaccttccccgcccccaccccaacccccccatgtggaggggaggggagtgaggagacaggctggagagctgcgacttgtcagggggcagtggcttgaggcttctccctggtgtcctgtgaagacagtccagccttcctcatcgcacgctcctctggcagcctgagacatggggtcaggcgggcttcctgccttctggcctgagttccagcactcaagcaagaggtttcctggtccctgggcttagatccagacctgaagagggtggcagagaaagctgctaggtgccgctggttgaggttcactgaggcggcggcactggagacgctttgcaggctgcgggcgcctgctgtcacaggagctgcccatgctgcaggagctgggtgctggcgaagccctgtgtgctgcagaagccagactcggaagaagtcacccgtcatgccggagccttggtccggctcctgccctttccactgtccgctagctgtgagttctcggggcacccactccctcttctgaggtccagtctccacctgtaatcccagcactttggaaagctgaggcaggcggatcccttgaggtctggagttcaagaccagcctggctaacctggtgaaaccccatctctactagttggcaaagaaagaccgtggcagaaggaagaggccgctccagcgcatcccttcgggcggagcagaagctccacttgtggctaggccatgtgccctctccgttcctcgggccagccttggct

SEQ ID NO: 479612 - DNA, 958 bp, Homo Sapiens
agacggagtctcgctctatcgcccaagctggagtgcagtggcgcgatctcggctcactgcaggctccgcctcccgggttcaagtgattctcctgcctcagcctcccgagtagctgggactacaggtgcccgccaccacgcccggctaattttttgtatttttagtagagacggggattcaccacgttaaccaggatgttctcgatctcctgacctcgtgatccgcccacctcggcctcccaaagtgctgggattataggtgtgagccaccgcgcccggcctgagaccagctcccctcccagctaggtgactgaggatgacctggcacagtcgtgctgactgaaggcttggagaggccaggtggccacctgagtggggcggcgagtcccgcgtcacccacccagacggggactggaagacactgcagactcaggctctgggcagacagaaggctttgttactgccaccgggcaggagacacagggtcagggttccagggccaagttatccactcccttgggtctttccttccaggggctcaccttcctggggctttccctgcggggcccgggggagctgcagcagcagcagtgggcgacgaccagcagcagcaggagcagcacggtgcccatgaaggtgaggaaaacaatgaaggcaacagtgtcccatgtggactggaaaaactggtggctcttcagtctccccaggacttcctgaaccgtggcctccagctcctctgtggacacagccatcttggcgtgcaccgtgccacctcctagaagcctccaattcccccaaccaggcaggtcctggggagcacaggctgcttcctgcttccggctccacaccacctgaggccttggcaaccagccccgccctccccagggccagcagaggccgcccagcccaggggagagggcccaggcccagcaggtgcgctccctggctccccactgcat

SEQ ID NO: 479613 - DNA, 579 bp, Homo Sapiens
tgtagttcagcccaggtagaaggatttaaaagtcccttttgggaggatgctttcactgcttcatttcctttctctgagagacatgagcgagagcagtttagggaaacggctgccttcaggttctattttctccatctagaaaagggctgccttcgtggaatcctggtcctggggagaagcctctttctgcaatcacagcagacatctcagaacacgctctctgttcttagttctctctcctgccttctagattgtaaatatcacaagacaattgaggatagtacctggtaggcgcttaataagtatttggtgaacgaatggcttgtttggtgacagtccaaaggctgggggacagagggaaagctccctcctttcggaccccagacgggtggcgctgatggagaggaggcttggataaggcctccaggaccgaagcgcgcacccgtagggcccctgccaaaaagaccttcctgaaggcggaggaactgcgagagtgcctacgttggcccaaggcctgacccgacgatcccagggaccctcgcccctccacaggtaacgcctcccgaacttgagccacat

SEQ ID NO: 479614 - DNA, 466 bp, Homo Sapiens; identical to SEQ ID NO: 347069

SEQ ID NO: 479615 - DNA, 858 bp, Homo Sapiens; identical to SEQ ID NO: 347070

SEQ ID NO: 479616 - DNA, 1000 bp, Homo Sapiens
ataggccatctgggcggccacggcacaggtttgtaccatagcacagagtccccctggagccagggtgagctcagacagctgctcccaggtcagcagagaataggcctactgttcccacacctgggctgtgttgtgataaatggcttcagatggagtgtgcagagaggtcaccaggcttttctgaagtggcagtgggtggtctcctagagactgagatctgggccgcttgctgtgcccggtgtgggcctctgggggtcccccacagcaggcatcatgggtctcctcatttcactgatgtgtacagtgtcagagaggcctttggtttcttttccaaagtcaagcagtccttttgcactttcggctcatgtccttgatgctgtcctgctctatcttggcagctgtccatggaatggatttctctcttcctagagttcccccatctgagctggactctgattcttgccttgcatgtggctcttactggaatgagaagacagtgtcttatcttttcttctgatggtctttcctccttatccaagcccctttctgtaaaggagacctgttccatatgatgttagtaggctgatgcctgtccacaatccaagaatagatctgtcctagatctttgttctcaaaagtcatccagttgtcaagaaacctgagatgtgatccttccacatggcaaaggttcccatcaagacatgaactaggctgccgattacctcatggccaggaaaagcatgggggatggatttattgattggccccacgttgcatccaagcactttggccagggcccaatacattgccaaaatgacagtcaacaggcctaaagtttactctcatgatgttctccagcctgccatcaaaatacttttctttttctggccacttcttcaacctctgacacattaataatattcccatatgattcatatgcacattaataattgttaagttggggaattttattcttttttttcctttgaagggtaaaaat

SEQ ID NO: 479617 - DNA, 787 bp, Homo Sapiens
ccaggagaggaaaaagaaacaagttttattaaagccccaaacacttggctagaaaaactgaaaaggaaagagagcagggaggtggggagaagaaaaaaggacattaaaaaaagagacagagaaaacgcagcaacccttttccatttagaaattgtcaagttacaccgacagaggtcacagaatatccacagaagccatcaccgctacaccaacatgggccctacagggtggatggggcagggtgtggagccggggctcaccccagggggccctctggggaccccactccgagcctcaggcctgaggctcctgggggaaacagcatattgtggaaggggcaggaaatcccccatgcaagtaacacagcacagtgggcgggggctgagaggaccaggtacaggggccccccgagacgtcttagttttctcttggtcaagcacacactgatggacagagcagcgaggcgcatgcagctgggggcactgatgtgttgcaggctgtgagagggccagtggggacgggggctcaggaagagatctggagccagtggtgcagggatgatggaacacacgcacacagaggcacacccacacacctgggtctgcaccagcacacatacgtgcacacacacactcggagacacagattacatgcacctccatgtatgcgtctctgtccacatgtacgtggcccacacacaagtctctggcgctcggcatgtctgcacacacattacacatgttctcacacacaaagctcctctcacgctaacatgcaggtaggcacg

SEQ ID NO: 479618 - DNA, 1000 bp, Homo Sapiens
ttagaacagtgtttgggccaaatagatgggggtgagcaggggaggaaaggtcttgagggagcagcacgcttgcctgatgggtgcccaaagccaggggcaggtggaggtgagagaaggacaagctctgcaaacgttgcggaagcgctctgtccatggagaaggcacaggacttccatgtggggagcagcttactcctgctgagaactttggggagacagagtggagcagccatctcagacctgagcggctaaggagctgggtccccctctgtcgcactgtgcagagctgctggactttgcagtaagcagccttcaggtctaaaggctccacattgtaaggaagcccagtcacatggacagaccatatgggtccagttggctgccccagccaaggtttcagccaacagccaagattacccacagccacgtgtatgaatgagccttcaaatgagtccagcacccagcagaataatgccccctcccgtctcacaaagatttccatgccctaattcctggaacctgtgaatctgctacatcacatggcaagcagagctggcagatggaatttagggtgtggagcttgaggtggggagggcagcctggattacacaggtgggccctatctaagcacatgagcccttatacaagcaaagaacatttcctcagctgccagacagctggcaaacagaattggaggggcagagagatgtaatcagaaagggcagaagagacttaaaaggaagagaggctcgacctgctgtggctacctttgaaaatggaggaatggggctccaagccaagggatgcaggctgcctcttcattggagtactgccagcaagaaaacagcccagcaattgcaaggaaattaattttcccaacagtctgaatgagcaagaaaatggactctcccctgccacgccctgagttcagccttgtgagactctaagcagatacccactcaagcccacaggacgtccaacccataacaattgtaagataa

SEQ ID NO: 479619 - DNA, 1000 bp, Homo Sapiens
acatgtaataaattttaattgaaatttttacaagtgtttatacatacatgcaaccaccactcagattgatacagaatgtttccagcatctcagaagcctctcttgtatcccaggtaatatccccctctagaaaaggcaaccactagtctggctgatgtcaccatagattagttttgccagttcatgaacttcatataaattaaattatacagtatttgctcactggagtctagtttcttttggtcaatactatgagattcatccaggttgctctaagtagctatacatatatacacacacatatatatatagcaatatatatgtacacacacatatatatagctatatatatacacacatatatatagctatatatatacacacacacatatatacatatatatatatatatatatatatatgtattccccccatgactgtgaattttaagaaactattcctttttttttcttttttttttttttttgagacagagactcgctctgtcacccaagctggagttcagtggcacaatcttggctcgctgcaacctccgcctcccaggttcaagtgattcttctgcctcagcctcctaagtagctgggactacagatgtgcactgccacgcccagctaacttttgcatttttagtagagatggggtttcattgccatgttggccaggctggtcttgaactcctgacctcaggtgatccacataccttggcctcccaaagtgctgggattataggcagtcagtacctttgcagagcagcggactaatatgtctattgtttccccttttcagataaagacatccagtgaaccagtcctttcacatatcctttcaccaccttggaatgtccactagtaacaggaacacagagaagcaaagagtcagagcgacccctgacctgccatgcagtgtgtccctcaggagaaggcaagggggaaagaacaagttgagcctgcttgcccatcccagcaaccatggggacact

SEQ ID NO: 479620 - DNA, 1000 bp, Homo Sapiens; identical to SEQ ID NO: 347071

SEQ ID NO: 479621 - DNA, 1000 bp, Homo Sapiens; identical to SEQ ID NO: 347072

SEQ ID NO: 479622 - DNA, 941 bp, Homo Sapiens
cagcctcccggcgccccctccgggcccagctcttcctcccggctgcatctccagggcggactctggcccgactccaggtcccaacaacgtctttggactcagctcctgcccagctcccagcggccctggtaggcccacaacttccctaagccaagctccccaggcccagctcaggcctcgcggtggcctctccaggctcagctcctggccctccgatgacatctgcaggccccaaacggcctccggtcggtgggctcctctaggcccagcttgggcctcccggcggcctccgcaggcccaaatcgtcccgaagtcagtctctccaggcttagctccagcctcccggcggcctctgcaggcccaagtcgtcctcaagtcggcctggaagtgggcctggaagagcagcaagtcggcctccccgggcccagctccgtcctctcggcggcctctccaggtgcaaaacttcctcgagtcagcctctccaggcccagctcctcctgcctcccagtggcctctttcggcccagcccagctcatggctctcggcggccttcccaggccccgcttttgacttttggcagcctcttcaggcgcagaacttgatctccaggcggcctttgcaggcccggcctcctgcctctcgaaggcctgcacgggcccggcctcggcctcggcctcacagcggactctccacgcccagctagctctcgcctcactgcggtctccccagtccaaagctcctggctttcggccacttcggcaggtccagctcctgcctgccagtggcctctttaggcccagctcattcctcacgtcggccattccaggccccgtttttcccttccggcagcctcttggcctctaatttgtttatcttttgtgtataaatcccaaaatattgaattttggaatatttccaccattaaaaaaaaaaaaaaaaaa

SEQ ID NO: 479623 - DNA, 1000 bp, Homo Sapiens; identical to SEQ ID NO: 347074

SEQ ID NO: 479624 - DNA, 908 bp, Homo Sapiens
ttatgaaatgaaaatcttgttcaaagcaaaattttacccttgcattagtttattaatgttaaccccaatttgtttacacgaaaccttatagattattccatcaaatcctaaccaatttgaccatgaggtgaaatctttttttttcttttttttttgagatggagtttcattcttgttgcacaggctagagtgcaagggcatgatctcagctcactgcaacctccgcctcccaggttcaagcgattctcctgcctcagcctcccgagtagccgggactacaggcgcccgccaccatgcccagctaatttttttatttttagtaaagacgaggtttcaccatattagccaggctggtctcttatctcctaacctcgtgatccgcccgcctcggcctcccaaagtgctgggattacaggcgtgagccactgtgcctggcccaccattggccaccctattcattattaactgagactcgtaactgcaccccagctcgacttcctcccgactccgagaggcggcgagtccacccactggcgcggtaactccccttgctcgccccgggaaatggcccgcagtttggctgagacgggtgggacacccaagggaccaataccaccttccataagatgggattcgaacctaaaactcgttcctaacggcctaggtgcaagagctacccctccctgaactacgacttcctcaggtttcagagcggacagctccacggcccagaaagagacgcagggaggagcccagcttccgcctcgaaagggactctgggacactgggcgggcccaggaacgcagtgttcttgggaaatgtggtccacagcctccgctgcgcaggcgccgtggccctgctccacacgcgcacggctgaagacccctcttctctgactttgttgacat

SEQ ID NO: 479625 - DNA, 532 bp, Homo Sapiens; identical to SEQ ID NO: 347075

SEQ ID NO: 479626 - DNA, 1000 bp, Homo Sapiens; identical to SEQ ID NO: 161541

SEQ ID NO: 479627 - DNA, 1000 bp, Homo Sapiens; identical to SEQ ID NO: 347077

SEQ ID NO: 479628 - DNA, 1000 bp, Homo Sapiens
tgcctcggcctcccaaagttctgggattacaggcgtgagccactgcacccggcctccagcctctgggtacatgggcagagaaggggaagggagaggctgaggtagggaaggggcctttggaggagaggtagagtgagggcaggacagatggggaaccagccccagcagctccaggctcccaggacagcaggagcagagatctgatgctggtccccttttcctccaaaagtcctttcagacatttaaaaatcttgacttcttcgggttccgtctcctggaggccagttgctgcttgaagccgcttctcggggcgagccttccagctgtgcgacagccatctacaggcattcctgaggggtagctgcagcaacaggtctctgggaggggtgaggaaggggtgaaggaagtggggtgcaggcccgcctattacatgcccagctgttttcttttaggaaacaccagacccctgcttcctctaccaccatgcacacacatacaagtctctgttgatcttaaaacacaataatcattgtgcaagatgaccaaggcccaaggggggcccaggtcagggagcctagtgaactgtgctccccaggcccccattcaactatggatctgtgcacacagaagagggatgggacctacagggcccatacaggtgcctgggccctgtttggagcatggcatcccccgtggcatcaggtcaagggtgtgggcacacagcctggccttgggcctctcactcagagccaggcctcccaggctggccagggagctgtcaaatcccccactacagagacaaatggagccgtcagagaaaatagcttctaatggggagcaggagccaggctgggctggggctggggggaggactctgctggccagatgtgaattcttcactaatcacaccaaattggcccaatttgttcactgacacgcggggggaccagcttcatcttttcccactgagcaggcttccctccctcctgcatggaagcag

SEQ ID NO: 479629 - DNA, 1000 bp, Homo Sapiens
ggtttcaccatgttggccaggctggatctcaatctcctgacctcgtgatccacccgccttggcctcccaaagtgctaggattacaggtgtgagccaccgcgccaggcccaatgattattttaaataataattattttttttgagacggagtctcgcttctgtctcaaaaaaaaaaaattttttttaaaaagacagtgtcatttgatggagttgctttcttgatcgttggctgcaattaaagacctagcctcactgtcttttgtgttgccttggaccggctcttaggttctaccgccctaacaggcagtggaggctggcctcgagtggtagtcctccatcttgccctcttttcctaccctctacccccaacccgcgagctgctctcctgtcttcttccaacactgttctctttgggaatatgcatgtccaacttcccaagcagtctgggatctggagtaagatgactcttggtttaatgaagtttttccacagtgcttgcatgtgccccaagggtttggaaggttggagaactaacaaaaagcaaagagccatcctgtgtcgtttcggcaggtctgtgttctgttaaaatatggaagaattaagagaagaacgaagaaataagggcagaaactccactggggagtacttgtctaaccctgaaaaagttcaaggctgttgttcaaggtctgaatttttcccttgagatttgcttgtagtccttaaagtcatcttcagacatctgatcaaggcagcatccgcggaaaattataaggtgggtggctgcactggagcctgtcctggctcaggggcgccggtgaagagtgatttttttcccttggccttgggggatcagagggggtgccctctgctatgcaggaagccctccttgcccgctagatagttctcattcctcaggagatactctgtgaggggccggcgtgttttctccatcttggcacttaccctcagaccctcctaagtacccgggagggccgtgttt

SEQ ID NO: 479630 - DNA, 1000 bp, Homo Sapiens
ttagagggtctgacgctccccactagagagtcggcccacagtgcagacaaaacgcagatcttcctctagagagaacagaaggctggagaggagacgcggagccggtccgtggagtccgccagcctgggaaacagctggtcgctggggaagctgcagcctccctgctcccctgccaggcgtcgggcgagagctgttctgttccctgacaagcgcgtgggccgccagtgctattcctgccacagtgtgggaaggcgctgggctaagggctgtgcttcccggagctgcttctagcctgatttccggccaagccacgcagtccctggtgcccgggaaggcgccggcctcgccgccgctccaaagcgagtggccgtctctcgccggctgtgcctccggcgtgagaaatgaggtgcgcttgttggagagggggcccccgttgctgcccacagaattccgccccagaaacgcttgagtacgtggagcctcgggggacgggtgctccgggaaccacgcataccggcctccccagcccgtcgcagggttgcagaggcgccgagggctgggggggctgccggggctgccgggccctcgtgcaggctcctccccgcagcctcgcggccgggcctggagaccgcgtgcccggacgccgccgccagcctcgtgggccgcaaaggggcgggggcggcccctggcggcgggaggactcggccgcccgagggaccccgggccaggctccggggtcgccccggctgggtctctgcggccccacagctctgggcggggatgggggcgccggcgcctacgcgcgaggccaaccgggggaaaccgaggcagtgaatggcccaggccccgcccggttatcccggagccaggccgggagcgcccagtgtcccgcgaccgcagccgccgcagcctgaactcgtcccctcccagtaggatgcggagcgcggcccttccatcctgtccctgccaccgttgcttccccacgccgggccgccgtcgg

SEQ ID NO: 479631 - DNA, 1000 bp, Homo Sapiens
aaaacataatttaattttggttggatttaagattagggaaagcagaattacaatgatccttaaaacatttcagtagagagctacagtgtttatcctacatttatataaaactaattttcatatttagaaaagaattcttatagtaaatataatatcagaaataaatcactggctgggtgcggtggctcacacctgtaatcccagcactttgggaggccggggcaggcagactacttgagctcaggagttcgagatcagcctaggcaacatggcgaaaccccatctctacaaaaaaattacaaaaattagctggctgtggtggcttgtacctgtagtcccagctgctcaggaggctgaggtgggaggatctcttgagcccagcttggggaggttgcagtgacccgagatcgcgccactacactccagcctgggtgacagagggagaccctggcaacccctccgtagtcaaggccttcttctccatgaaattttatcattaatcgcttccagagatcttttggtctcattttcatgacctgtcaatatgattcctgtcaggcgcacttcgacaggcccgttcctacggcctccgaggttagacatgtccctggcggctggggcggcgggcgggacgggggcgacggcgaggcgcggcggagtcaccacagcggccggggctggggcccgagcagccggcgacgcgactgcagcggcctgagggtcccggatgtgccaagcgtcgtcgccatgagccgcggagggagcggacgccacggcctttccctcctctaggcgaggccggcactgagggaaggtgtgagctgccgccgagggtcccaggcggaacgcgggaagggagcaggcaaggagcaaagtggcggcgggagcggcagctgtgacccagcatgcagggcgctccaagaggctggggcgaggaaaattagaaccaagtctgctacccgccgggaacttgtcgtattttttgagcaaggtccgcaag

SEQ ID NO: 479632 - DNA, 1000 bp, Homo Sapiens; identical to SEQ ID NO: 347080

SEQ ID NO: 479633 - DNA, 1000 bp, Homo Sapiens; identical to SEQ ID NO: 347081

SEQ ID NO: 479634 - DNA, 1000 bp, Homo Sapiens; identical to SEQ ID NO: 347082

SEQ ID NO: 479635 - DNA, 1000 bp, Homo Sapiens; identical to SEQ ID NO: 347083

SEQ ID NO: 479636 - DNA, 1000 bp, Homo Sapiens; identical to SEQ ID NO: 347084

SEQ ID NO: 479637 - DNA, 1000 bp, Homo Sapiens
ttttttttttttttttttgcttttcttcaaaggatgggttggagcgttaaaaaatgttggtgggtttgggctcgcaggaggcggcgcgcggagggcgagggcgcttttgctgagctgtgcagttcggtccgctgagcccggcggccctgcccgcccgctcgtccgcccgcggtcgctagtgttgccgccgccgccgccgccgccgccgctgctgctccatggccgcgcccgccccgcgcccccgccgcgtcccgtcgccgcccgcccgcgtccccggtgagcgctggagtggggtcgggcccgtgtgcctgcctcccgcgccctctccgaatcccggactcctagtgaaaggaagggggagggcgcgggcgcggaagggaggtggatcggagcggcagcgcggcccagccgaacgggtaccgaccgtcaccccgcgatcttcctcgcagggggcgccggcgcccaagctgctcgcccggagggcccagagccgcttcccagaccagagccgggggaggcgcagccagtagcgagccctgagcgacctctctccccactcgcccccctgccccagtgaatttctgtcagttgaagggagcggggctcttgcccggggaaaaggaaaacagttcgtggcctgggatctgggaccccttgccgcccccagcgcccctcccgctccccggcgcccttgcggcccagtggctcctgcgcgccggagtccgccgcgaagactgagcggccgcggggatcgccgcgggctccgcgcgtattctaggtccagaagcattggggctgggcacattcccacatgtcctccggcagcatcaggcgccagagcctcatccaactcagagaggccactctggggagccactggggcctgaaggctgtggatgatcttgatctggctggtggattctcgacatagataagcctctttagtgattccaagaatgacttgagggaggggaactctggaaaagcctgggctcctagc

SEQ ID NO: 479638 - DNA, 761 bp, Homo Sapiens
ttacaaatgagttgacttcagctcccaatccacgggaatgtaagctccacaagggcaggaaccaggtctcttctgattcaaagttacatccctggtgcctcttaaatgctcagcaccatggatgatcaatgaagatgagatgtcctttgcagggacacggatgacttgtagtcctgacattctgattctatggagttgatcagaaaaccacttaaggcacccgggccccagtggtacagcgttttccctggatccgattcctttttccctgtggcttgtcatgtgggatggtgttctgagggttaacgtaaatacagttcgtagaggtgcgtctcactcctggagctggtgttcctgacatattggccaggctagtcttgaactcctgacctcaagtgatctgcctgcctcagcctctcaaggtgctgggattacaagcatgagccactgcacccgggcaaatgtttatcttaatgtctcctgactctacagtcagaggagacattcccaaggctgatgctcatttcttttctctgtcccctcctcctttgtgctcccattgtatgcttcaggcttgaatcacatgtcctggggaggaaggctgtggactagagcctttgccccgctcagatccacttgctttgaaaaaagcctgggaacagccattccaggattctgagggattcaaattcgactccaaactgagcgtgaaatgcaatgaacttgatgatctcagcctagctcccgagaggcagccaacc

SEQ ID NO: 479639 - DNA, 1000 bp, Homo Sapiens; identical to SEQ ID NO: 161543

SEQ ID NO: 479640 - DNA, 502 bp, Homo Sapiens
gcattgctatgatggggtctattttgtctttttctctatttatccccatgtttaaaatatttttttattagaaaaaaaaacggaagtcaccttaggatgaaagcgcctcccctcccaaccccccagtggggtttggcatgtctctcgctgtccccatcacctccctggcccgtgcaggtggcctggccgtggttctgcacgggccgccgcgtttaggcggcactgcagctaatgacaccccgcagcgtgtgcctggctggccgcccgagatgtgcctgcgcatggcatggggacgtttgcaagcctggatcctggcgcgggggcaggtagcgggagaacaggcacgcagatggcagaggggctggggcggggacgctcgcctggcgtgggccacagtcacgacccaatcgtagcccccactgtgtctcttcatagttgcatccttggaaaccggcggggcgttctcccagctcaaaacgttttcgccccgtccagcttttcg

SEQ ID NO: 479641 - DNA, 727 bp, Homo Sapiens
ctacatgacagagccagttccacccccagtgtctcccaccagaagacccacttttggggtcatcactcccattctttcctcctggcctggggggtgctgtggattttgtgggcctggtgggccaagatgacatctcggtgatccaccacgccgccccgccgcctcagaggggggccctcgaagcagatgctgagccggggaggccgagtgtcctgcagggcgctgggcgtgccccgagctgcggttgtgcagggcgtcatagtaactggggcgcgagagcatggagtcggggacccaggaagacttcaacatccacgggcctcgctcagaaatcccagggtcttctccctccagcacagtgagggggaaactgtatcgcatcagcgctggggctcaggcgacgcggctagtggtcagcactgcgagtcctccaggggtcccgagggtcccatctcgtcagcacccaggggtccgagctatctgaagtccatgcatccatggcccacccagtggaaagaagaagggtggcccagagacaggagggagaaaagtgggtgccaagaagagcagttttctgagcagagggctccccacaaaagcagacactgaacggggttgctgtatcagccactttctcttaaccagttctcagctgacaaagcatcttcagcactttctgcatccctgcaattcaggtcatctttctcagcagcctgcttggctgatc

SEQ ID NO: 479642 - DNA, 1000 bp, Homo Sapiens; identical to SEQ ID NO: 347085

SEQ ID NO: 479643 - DNA, 495 bp, Homo Sapiens
cagaggtagtcactgctggtaacagaggtctaggagtccatcctgtcctgcagccttcatctgggcctctccccagccccagagggcaggtcctgtttggtccagccttccaggcggtcccattcttttggccagggattggttgagcggtgggcggcgctggtgaatgagaccggaaaagacgctgctgggtgaggtttctgctgctggatgcggtttctcgttcctacaaaggctcacccaggtagggatgggcagcttctctgggtctgagtctggatgtgatgcctggaatgcagcagccatcttggcaccagagggtgatgccaatatgtggaggaaagcagaacaaacagcagagcagcagaactgggcctgcatgctgtgcccggagtagagccaggcaatccagttttttttttttttttttttttttttggagacagagtctcactcttgtcacccaggtcttatttctaaaataaataaataaat

SEQ ID NO: 479644 - DNA, 770 bp, Homo Sapiens
gggtccctctgggaggctagagttttatgggagcactaacagccctgtgaactgatgaccctggggtcctggggtgcctcgggaaagtaagattctggggtttccgagggcatggatttttctggaaccttgagtggggggaggggcacctcaaaggtgcagggaggacctgtagttgcctgaggtttgcgctgcgagataaggagtctccggatccttgggaagcttggaaggctgtgaggtgttatttctggacccctggagatctcttggagctctttcaggggcccaggctttttctgggagtggaaatggggaggaatgaaaagtctgttttgagctttgcggtgtctctgggattgcatttcctggaggctgttttggagacaactcacagacttcgagaattctccgtggccctgaacagtgtctctgaagttgccctcgtgtcttgcctgacgtgtgctccttcaggcccacaaagagaagccctgcgttgtggacaaacagtctggggacctatggacgagacgtctgtcttcgactaatgcatattttttaagtgggcctggtccacgttgatttctgggagacggagtcggcgcaaaccttgactctacttaagtgccctgatggaggcagcccgtgcgctgggcagggagctgaagccactggggtgtggggtgaggtcaggccctgccctacagaggagctgctccgaacagcccaggcggggcagcccctgaccgaggggatctgcagatgccccg

SEQ ID NO: 479645 - DNA, 1000 bp, Homo Sapiens
ataaagaaaaagaagtttaatggactcacagtttcacacggctagagagacctcacaatcatggcagaaggtgaaggaggagcaaacacatgtcttacgtggtggcgggcaagagagagcccgtgcagggaaactgccctttataaaaccataagatctcatgagatttattcactatcatgagaacagcatgggaaaatcccacccccatgattcagttacctccccccgggtccctcccacatgtggggatcatgggagctgcaattcaagatgagatttggtggggacacagccaaaccatatcattttgcccctggtccctcccaaatctcatgtcctcacatttcaaaaccaatcatgcctccccaacagtcccccaaagtcttatttcagcattaactcaaaagtccacagtccaaagtttcatctgagacaagcaagtctcttctgtttatgagcctgtaaaataaaaagcaagttagttatttcctaggtacaatggaggcacaggtattggataaataacgcccgttgcaaatgggagaaattggccaaaacaggtcacaggccccatgccagtctgaaatccagcagggcagtcaaagctccaaaatgatctcttttgactccgtgtctcacatccaggtcacacttatgcaagaggttggttccagtggtcttgcagggaacccatgtctgcccctgtgactttgcagggtacagctcctctcctggctgctttcacaggctggtgttgtgtctgctacttttccaggcacatggtgcaagctgtcggtgaatctaccattctggggtctataggagggtggcccttttctcacggctgcactaggcgagtagtgagtagtctgtgtgggggctccaaccccacattttacttctgcactgctctagcagaggttctccatgagggctccgcccctgcagctcacctctgctccagttccaataaagttcctcatctccatctgagacc

SEQ ID NO: 479646 - DNA, 1000 bp, Homo Sapiens
gtgcagatcagacaaggcctttagacaccaaggagctctgggacgcgagaaccagtagtcggggtgatctaagaggggaagctccgggttccgcggaagctgagtttccttcactcagcgcgtgtcttctggggtctcctgtgttcagcgaatgaagccacgggcacaaggacggacgagacccatcaggtccagagcgcacccgtggaggaagctgggcgaaccccgactgtcctatggaggatagtcctatggaccagacgaagcccctgccccaaggagtgcccgggtgtaaccgcaagttaaggagccctggggaggtgacacaggcaccctcattccttttgttcagtaggagtctctgaggcctccccagcaccatgccgcgtgggtgaggccgaggacacagagaaatatcaggcaaggctcctgcccccttagggtggccctgacaacggatcataacctcccagggagctgatggggtgtgacaggcacaccataggctggaggcacaggtggagggcagggaagaggaccggcaaatctatagaatcctaaagggagccaagagaagccacatgcaaatctccctccctccaaacaattctcccttagagggcatccgcgctcccctggggtggcagtcagcgagaagtttccgtgtaggttctccccaggcttaaacagtttaagagttttatttcaagaaaaccctggggagggcgaactgcaagagggctgccaggattagccgagggattccgaatgaagacggagtatttccgaacatacacacctctcccaagagcgtttccggagggttccgaaaatacccgagcgggcctcggcgccctcattggccatcaccgcgagggcttacgaagaccggaaatatccaaaggtgccggggctaggcttatatagttcacgcattcaccagttcattcataaaacaaatgtttgttgagcgcccatcatatgccaatcacagtgacaa

SEQ ID NO: 479647 - DNA, 1000 bp, Homo Sapiens; identical to SEQ ID NO: 347087

SEQ ID NO: 479648 - DNA, 747 bp, Homo Sapiens; identical to SEQ ID NO: 347088

SEQ ID NO: 479649 - DNA, 1000 bp, Homo Sapiens; identical to SEQ ID NO: 347089

SEQ ID NO: 479650 - DNA, 564 bp, Homo Sapiens
tcaaactccgatctctgtgctgccatctctctggaatagtccaagaaagaccagcaaagccccctccgcctggcagattaaagatgctttagaatcaatgagtgtcatcccgccctggcctgactccttatatgagcagggatcctcttttcccctaggactgactctggcactatgatgagcagctggattctgtagcgcccaacaaacaactctccctgaccaaacgagagctgctggggtggtggctagcagttccaaggtgaacaatgcctcgtttgcaaagatgccaatcgtcccggcgcagctggcagggctgggcggctctgctcgcggccgctcggagcgactgcgctgggcgcgagtgagcagcttcttctcacaaatgctgcaaacatttttgttttgctcaacccggagtggcttcaccaccaccacccacgcatgcccataagaagggttatcacagggcagccactctgagcacccagggagtgggggctgcaagtgtgagaagcccacttcttcagcccctgcacaagggactccagacactgcctccat

SEQ ID NO: 479651 - DNA, 1000 bp, Homo Sapiens
tcagggaaatgtgcgcgggtggggagcctccgagatccaggggttgactcctggagtcgtgcctgaacctcgctgtcctctgctcccgccacaagatctgtttattaagcacctgctgtgagcccagcgaaagaaaacagaaatctctgttttctggcgtaaacagacagatggcaccctgaaggccccctccccagggtccccattccccagtcaatcgtcttcccaagggagctgtgacctggtcaccagaggggcagacatccgccccagcacggtcgtcaggcttaagtctgtgtgaaaatcaggagggagctcgttcaaaatgcccactccagagacgctgccgggcacaggggcctgaggccccatggtgagaggcgcaaggggtgcagggccccatccccgcacagcatccggcggccctgcctccgtggccagcccaaccgcgcgctctgggcctcagtttacccatccgcacaatggagatgcttccgactcggcagggttgcaatgaagacgaaaccgcgtcccacactaggagggcagtgcagggcggggcccgcacgcaggagctgcagagggcatctgcgaggggtagcggccgtcgcgagggcctcccacggccgcccgcggagcgaggggaccccgaccggcggagggacggctgcgccctgcaggccgctgcgcccaggcaggcctctgcgcccgggcaggcctcggcctcctgtcgcgcccccggcccgcgacaatccgggcaggatgggcggcaggacgcggaggggcatctgcggagcccgtcgggaacgccctcttggcttccggtgccgggcagcggcgggcgcggcgcccacagcgcccctagccccgggacatggctccagcccgcccccaggcgagcggcctccgccgggcaagctaggctcctcctgcacgcacgaaggaggattccacaggaacgaaccacgacccccaaggtttcgcagttgtaagaccgcag

SEQ ID NO: 479652 - DNA, 1000 bp, Homo Sapiens; identical to SEQ ID NO: 347090

SEQ ID NO: 479653 - DNA, 1000 bp, Homo Sapiens
gccgttctacaaggaaggtgttgacactgcctccccaactttattgctgaactcgaactttatgggtttcaaattgcagctatcattaggcatagccagtccagaatcaacttaattccccaactggggctgcctgttgagaaagacagggacccaagaaccaatgggcccagataatggtgcaggacaggagagggctaagtggctttttcctcggtgcccttcgatgctcctttcgtgagacctgggcctggggaggtgtagctctctccccagaccagcctccactcctgctggagcccagaccagcctccactcctggagcccagaccagcctccactcctgctggagcccagaccagcctccactcctgctggagaccagtccagcctccactcctgctggagaccagtccagcctccactcctgctggagcaggccaaaagcaccccctggaacctgtcccagacctcatggctgccgtgtcagcagcttgtctggggctatggcagagccactggaagcacccctgtgcagacactaggaaaagctctactagtgaaaacaagatgtgtttgggctggggcccacatcctctgaggcctttgcaagaaataaaaaaatgcagggcagacaaaaataagcaaacactttgtaatgagctttggtgactccacctttgcaggccagagcagcaggcctcgggtgggcttctgaaggcaccaggtccactctcgctgccctgaggtgtgatgacggacgtgctgagcctccctgagccacatgaagcagcgaggccggcctctgcacaggcggccccatgccaccagctcacctggctgctcctcacgctccctccttgctttgctgtctggatgaggctgctccactttatttctcacaaggaggtgatgtaatagcgaacagactcctgaacacctgaatcagtctctcggagaccagcagaaagtgggcaaccacagacacacagcaggagca

SEQ ID NO: 479654 - DNA, 1000 bp, Homo Sapiens
ttcgtgatcacaaaatatatttatttgaaaatcattaccagccaccatcttgtcttggaacccacacagactgaccccaaaatcaaacataaggctcatttagaaatccttcagcaacttgccttgtttcctcaaaatcaatcatcccttttcagatttgagggaggacaatggactataataggaattcccaataagccagaaacattgcagcgatgtgctaagggctcctaatgggaaaaattggaggagcccccaggctgaagctgacatggtaaacagaaaccctgttcacatgcatggccctcctaggtgatgttcagctggataatggactgtcactgtgatagacaagccctctccctggccctcaccatggctctaggctgctggggggacctgacgtcccctttgtagtacctcactgacttctatgagcctggcactgcctctccctttgtaagacacgtgcttctttgttcttttcctccactgtgcatcctgtaaaggccagttttgtgtgtgtgtgtgtgtgtgtgtgtgtgtgtgtgtgtgtgtgtgtctgtgtgtgtgtcctgctgggatggcaattaggatgtcctagtccctcacgggtgaagaacacattgaggaaagcaggttctcggggctcctgggttaaagaactctgtaggagacgaagtcagcccgacagttcaggattctgggtctcctgggtcctccgtcccacagtaccccactccctccaaggcactgcttgccccccgccccgggaaacctgagctccgctgggctcaattaatccgtatcctggtctgaaacggagagaaaatgccaagtcgagtccagcctagctctgccaagctctgttgttctgccatcaagcagcagttgccctcatttccatctgagcatcacctagaatctcccaattatgaattcatcctagaagcatccagaccacccacgcaccaagtccagcaaccccagatccagggcc

SEQ ID NO: 479655 - DNA, 1000 bp, Homo Sapiens; identical to SEQ ID NO: 347091

SEQ ID NO: 479656 - DNA, 1000 bp, Homo Sapiens
tacagttatgtggttttttattatattcacaaagttgtacagtcatcaccaccgtctaattccttaacattttaatcaccccccaaagaggctttgtactcattaagcagtcatcactctctgtttggcacagtcctaaatgcgggctaatctcccttcacatcttctagaccctctgcaaatacctcatacttgctgaccagggagcgaacccagggcttgaataaagcacccctagacctggcagagccgggaaccggctggctggttcgttttctgatgcagatcacagttttggggtctcctctggttagagcctggcccattcgggtttggttttctcctggacgttcgttcacacgtgaataaggccaattcaccgtggagtctgcgtctgaatccttgttccttaggtcatcccggggtcccagctgcccgggatgaaaaaacgatgcccgggtaccaggggtcggggaccagcaacgccggcgctcagcgtaaccgctaccctccccagccacggcgcacgcgcctcttccgcctccgggcgccggccccctcagctggggtcccccgtctggcctccgcagctccggcgcagggagctgtcccgagccccccttcccgggccgattacacaacctccggtcctggggcgggggcccctcctcagcccgggccccacacctgtccccgcaacgcgctcccaggcagagggcagagacctggcgcgacagcgggggccgggaaagtttcactttgtggtcaggggtttgttgacgtctgagagatgcggggagacggagactgagcggcgaggatgcgccttgccagccgcgttccctgtgcccggggtggccctggtccaggtttcccttccagaagtcctgccggcatcccggctctgggccgggaggctgctgctgcagggcgcccgggtctctccgtctctgccacccaggaggtatttcaataactgggttgttcagcagagcagtct

SEQ ID NO: 479657 - DNA, 1000 bp, Homo Sapiens; identical to SEQ ID NO: 347093

SEQ ID NO: 479658 - DNA, 886 bp, Homo Sapiens
tgtgatggccaattatattttttgtttatttgaaaatatattgcttttgaacgtatacacccatgacataatttagaatttcacacactgacatcaacagggaaggaatagggtcccgaatgaagtttggagaatagtagtgatcttcaccgaatgtctcctttccaagaagtgtaagatgagcagaatggaaggtagcctctaccccttgactgattgttctgtcttttgagttatcaaacttgagtgcttctggctcccagatatgctgaagtagagactgctgggaaggcagccacaaattagagttgatcttccagtatcttctaccgggcagaggcgtctcacgccagcaggtcctccctggctcctctccggccggcgccggctgtctcctgattggcccgcttggggcgcgcagccgtctcccgctccttcgcaggagcaaggcagacaaaagacgcaggctccaggctccggcaaccggcctcagccaatcaccacccaccttgcctctcttccctcgccccactccctcctcgcctggctcgcgtgctcccggcactgactcctggagtgcggccagcgcccggatcgtaccattctgattgaggctgggggagagcgcggatggatcgaggcgggacggcgtggaaggggcggtggtgatgcctgctgtcccccctcccggcgcggttgggtggcgcctcagcgggtgggcagcatggggcggggagggtgtcccctccgcgccgttaaaatgaaactctagtggctggagtccgggcagagcttgagggcagttggtgcggtcgggttggttcttacaccccggcgggagcgcccagacaagccgagctgactggacttctccggccggccccat

SEQ ID NO: 479659 - DNA, 1000 bp, Homo Sapiens; identical to SEQ ID NO: 347094

SEQ ID NO: 479660 - DNA, 1000 bp, Homo Sapiens; identical to SEQ ID NO: 347095

SEQ ID NO: 479661 - DNA, 753 bp, Homo Sapiens
tggcaaagatgtgaaacaaccggaaatctcatatcactggttggaacctaaattgttatacgaatttaaaaactggcagtgtatttaaagtttaatatgtgaacactctatgaaccaggaatccaatcctaggtatatatatatatccaacataaatgaatgctatgtccaccaaaagacatgtgtaagaatgtctgcagcagcttcatcaaaggcagaaacatgaagcaactcaaatgtccaccaacagtaggatgagtacacaaatcgttgaatatttatataatgaagtaatacacagtagtgaaaaagaatggaccattgttacacacaacaatatggatgaatctcatagacgcatctcctctccctcgctgggaaagacatatttgagaactcttcatagtctgacagacaggagaaccacacttatttcaggcagggttggaagagtagggcggaggagatgtaaatactgcatctgggaagtaatcttttcccccagcaccggaggtaggcgtgggcgttacccgcctcactcctgggggcagggagaaccaacgcgaaaatccccagagaggcggaagaaaaacctgcctgcgagagaataggatggagatgggaaaagcctggggaagagagagttatgcggcaggaatagcagaaaagcgtactaagcaaaaagaaaggtgtcccactaactccgaagttaagtgggtgtcgacgcagcccccttcgtctcttggcaaccat

SEQ ID NO: 479662 - DNA, 649 bp, Homo Sapiens
taacattgcttttcatagagcagttttgaaacattcttttcgtagagcctccaagtggacatttggagcgctttcaggcctgtggtggaaaaggaaatatcttcacataaaaactagagagaagcattgtcagaaacttcttggtgatgattgcattcaactcacggagctgaggattccttttgatgcagcagtttggaaacactctttcggtggaatctgcaagcggatatgtggacctctttgaacatttcgatggaaaagggataatcttcccgtaaaagctaaacggaagcatgctcaggaacttccttgtgatgtttgcattcaactcacagcgttgtactttccttttgatagagcagctttgaaacaccctctttctagcatctgcaaggggacatttggagggcttcgaggcctggggtggaaaaggaaatatcttctcatcaaagctacatggaagcattctcagaagctgctttgggatgattgcattcaagtcaccgagttgaacattccctttgatggagccgtttggaaacacacttttggtagaattttttgtagaatctccaagtggatatttggacttctctgagaatttcgttggaaacgggataaacctcacataactgaagagaaacat

SEQ ID NO: 479663 - DNA, 1000 bp, Homo Sapiens
tagactctgcaggtggatatttggacctctctgaggatttcgttggaaacgggataacgtcacctaactaaacagaagctttcgcagaaacatccttctgacgttggccttcaaagtccagagttgagccttcctttggtagttcacgtttgaaacactctttttggaggacctgcaagtggatattgggagcactttgtggccttcgttcgaaacggccatatcttcacataaaatctagacagaagcattctcagaaacttctctgtgatgattgcatgcaactcacagagttgaacattccttttgatggagcagttttgaaactctcttttgctagcatctgcaaatggataggtggaactctgtgaagactgctttgaaaacgggaatatcctcacgtaaaaagtaaacagaagcattctcagaaactcctttgtgaggcttgtgttcaactcccagagtataacattgcttttcatagagcagttttgaaacattcttttcgtagagcctccaagtggacatttggagcgctttcaggcctgcggtggaaaaggaaatatcttcacataaaaactagagagaagcattgtcagaaacttcttggtgatgattgcattcaactcacggagctgaggattcctttggatgcagcagtttggaaacactctttcggtggaatctgcaagcggatatgtggacctctttgaacatttcgatggaaaagggataatcttcccgtaaaagctaaacggaagcatgctcaggaacttccttgtgatgtttgcattcaactcacagagttgtactttccttttgatagagcagctttgaaaccccctctttctagcatctgcaaggggacatttggagggcttcgaggcctggggtggaaaaggaaatatcttctcatcaaacctacatggaagcattctcagaagctgctttgtgatgattgcattcaagtcaccgagttgaacatcccctttgatggggc

SEQ ID NO: 479664 - DNA, 946 bp, Homo Sapiens
taacattgcttttcatagagcagttttgaaacattcctttcgtagagcctccaagtggacatttggagcgctttcaggcctgtggtggaaaaggaaatatcttcacataaaaactagagagaagcattgtcagaaacttcttggtgatgattgcattcaactcacggagctgaggattccttttgatgcagcagtttggaaacactctttcggtggaatctgcaagcggatatgtggacctctttgaacatttcgatggaaaagggataatcttcccgtaaaagctaaacggaagcatgctcaggaacttctttgtgatgtttgcattcaactcgcagagttgtactttccttttgatagagcagctttgaaaccctctctttctagcatctgcaaggggacatttggagggcttcgaggcccggggtggaaaaggaaatatcttctcatcaaagctacatggaagcattctcagaagctgctttgtgatgattgcattcaagtcaccgagttgaactttccctttgatggagccgtttggaaacacacttttggtagaatagtgttgaacctttctctgatagttcaggtttgaaacactccttctgcagaatctgcaagtggagatttggacctctttgaggcctgtcgtagtaaaggaaagaacttcatgtagaaagtaaaccgaagcattctcagaaactcctttgtgaggcttgtcttcaactcccagagtataacattgcttttcatagagcagttttgaaacattcttttcgtagagcctccaagtggacatttggagcgctttcaggcagagctgagcatatcttttgatggcgcattttccaaacacaccttttgtagaatatgcaagtggattttgggacttctctgagaatttcgtttgaaacgggataaacctcacgtaactgaagaggaacat

SEQ ID NO: 479665 - DNA, 811 bp, Homo Sapiens
taacattgcttttcatggagcagttttgaaacattcttttcgtagagcctccaagtggacatttggagccctttcaggcctgtggtggataaggaaatatcttcacataaaaactagagagaagcattgtcagaaacttcttggtgatgattgcattcaactcacggagctgaggattccttttgatgcagcagtttggaaacactctttcggtggaatctgcaagcggatacgtggacctctttgaacattccgatggaaaagggataatcttcccataaaagctaaacggaagcatgctcaggaacttctttgtgatgtttgcattcaactcgcagagttgtactttccttttgatagagcagctttgaaaccctctctttctagcatctgcaaggggacatttggagggcttcgaggcctggggtggaaaaggaaatatcttctcatcaaagctacatggaagcattctcagaagctgctttgtgatgattgcattcaagtcaccgagttgaacattccctttgatggagccgtttggaaacacacttttggtagaatctgaaaggggatatttggaccgctttgaggcctgcgtaaacagaagcattctcagaaccttcttcgtgatgcttgcattcaactcacagtgttgaaccttcctctgacggttcaggtttgaaacactccttctgcagaatctgcaagtggagatttggacctctttgaggcctgtcgtagtaaaggaaagaacttcatagaggtgaaccttcccttgtgagttcaggttgaaacgctcctttcgtagcat

SEQ ID NO: 479666 - DNA, 830 bp, Homo Sapiens; identical to SEQ ID NO: 347099

SEQ ID NO: 479667 - DNA, 727 bp, Homo Sapiens
ttaggttgtccagtgtttaaatgagcagtgcaggaaaagcatggagccaatgcctgtcacgtagtaattggacaacacgcatgagctcctatcagcgccatggtctccagcatttccatcaggttttgatctttgaaatgtccttcttgatatgaaaggatcattcctcaaacattctctaaccgatggccatgaaattgctccaatgtgtattattacaaatacaactgcagggaccagactgacacatgtatctgtcgtgcatcgcttgtctatttctccgtagacacttttaatattttttgagaattcttttttctccatcttctggtcaaaactgggaagtacttgcctaccatttcctctgaacttacttttgccaacatttgtgtagtcatacagtgggatcacattgtatgcaagacatcaaactcaaatcccttcaacacgtttgtgtcctcgtttgctgggtcaattgctacattgttataacttgtatattttattcagagttcagtcacattggatatacatagcaggaatgagaggccagtatcttcagggactctctctcaagtagataagcttcagagatttttgtagtctttggtcactctccccatctttttcctattccaggtaagtactggatctgatgggcccagctcaggtcaggcactctctccttgagcaggggagagcgggacatcttcatgtgcagtaccag

SEQ ID NO: 479668 - DNA, 1000 bp, Homo Sapiens
ttaggtcttttcttccgttctgtccgccaaatcggcctcttcccagggtgttgaccagggccagccaggcagaaggctggtttcgctcaaagaggatcctctcgcccatcctggagcttcaggcctgtttcggttgggcctgcagaggagctttagggaccacttcgttcggcatcccggggggcaggtgcgtggtgccaggggaagaagagggtttgactgttgttctcaacccccggcaccaaacctccaccctggtgcgcgcccctccaggctcctgctggtctcactcgccggtagttaggtctcccgtcagcctgagcccccgagacacccaggcccggaaggacaagtaggggaaaccagctactcacttaggtcctgtccgcaagggatccctttctgacgggaaagaaaggcagcgagtcctgtcctcgtctggaggtcctcctgtggctggcgaaggtgagtcgagtccccatcttcagtttgtcagagtggacaaagcctacgacaatggccagtaccagctattaggcattcccagtctttccagttggtggtactggagcttccctacccaggatttcagtggattccaagggtacaactgaacagctttgttattccaactgctcttatttgaagaaagggccgatcctatgatccaacaattccagtacttggtattcctcaagggaaatgaatgcacgtgtccacaaaaagacctatacaagaagaattttcgttcatcttgtccagcaagtggcatcggtttcctatcagcaggagtctgaacacttctggccctagcctcttggtatcagagtcgccaaggaaatacaaggcagtcagagactggacgggagaacaacacattattcatacagagaggagacagagcggggtgtgggctccgcttcagtcttgggcgttggtcccccatggccagcaggtccctccatttggcctgcacacacagcctcttgagaagcagaag

SEQ ID NO: 479669 - DNA, 1000 bp, Homo Sapiens
cccttacctccagggtctgtatctcctgctgggtgaggtcgttggacacagcgcacttggtgcacagcccgcacaggctgccaatgaagatgacgatgagcttctggagctgcccgcactgctgcagcgcccggctggccgcagcccctgtgccaccctccgtggccgccgcatcacccccaccaccgccctccttcttctctcccatcgcctccacaggcagcgccactctatgcaggccacaggggcctaggcaaggagcctggggcgccggcgcctaggcaaggaatccctgagccaggagagctggaccaggagcacccctcagagctgcccttgccaggacgccagtagagctggcagccgagtctgccgctcccgccctcagagccgtggcggcggggacaaaaatcctcggcggcgggggcaaaacgccgcggcggcaaaaagccacggcggcgggggtaaaaagtcgctgcgggcaaaaagtcgcggcggcggggacaaaaaggcgcggcgggcaaaaagccgtggcgcaggggggacaaaaagccgcggcggggggtggggaagccacggcgggcaaaaagccgcggcggcgaggggcacaaagccccggcgggcaaaaacccgaggcggggtggggtggcggcgggggggcaaaaagcggaggggggcaaaatgccgcagcagcgggggacaaaaagccgcggcggcaaaattcgcagcggcgaggggtcaaaaagccgcggcgggctaaaagccctggcgccggggggcacaaagcagcggcgggcaaaaagcccgccccaatcctctctgaagtcctggttgtgaggggccaagtcccaaagtctgctgctccgcctctctgtgtgcagagccatggggccttcacaggctgcagtgggtcccgagcccccagggctgtgcctgctggtcctgaccaagatcgcggctgccgaggtcagtccagcgccaagggcacagggccagggca

SEQ ID NO: 479670 - DNA, 1000 bp, Homo Sapiens
ggggaggaaattggaatccagcagcggcgagcagcagctgggcggtcacatctggaaatggaaagccgacctccccctcctcctccacctcctcctcctcctcctcctcctcctcctcctctcacccaggatcacttccgaaaccacttggccttcagcccctgcctcggccagaggtttcatttttaactgaatatttacgaaagctgaaagcgtgcgaggggggtggggtggaaatagcggctgcttcttttccaaggatttatttaatggggatgtgttcaaggcaagaccgaattcagaaggatatcgacgtcgtgatccagaagtccagagctgaggactgcctgtttgcaggtgagttcttgcttttccagaacctcggacccagcgcccccttcccagttctctgaccgcgacgtgtgtggctgggggtggggtggagggtttgcacgtccgcattccggggttcatttggcaacagctgctgcaacgaacgcgggagccaaaagcgggagggggcgccagcctcgccccttcccctccccccacccccaagtctggggcagctaccagctttgagggcagaacccgcgtggcccgagcgggggtctaggcgaaggggcagtgcgtggtatttccagccccacgtagtgcccaaagcctgcaagcacgcctcctgggttccagcagcggcggcagagcggggttggttggacccaccaggtttgcgtaatgggctgagcggcggcggccgggaatggagcctgctgcgctgcgctcgtaagctgcgcccggcgccgaggacccccggggggcagcgctcggcccatctccggccccttcggctccatctagtcccctccgactggcaaagagaagggattcctcggattcccaaggcacccagcgcccctgcctggggggtcgcctttcgtccattttgctcccccaggagagagatcggattttgctttcgctgccgcgagccgggctgggg

SEQ ID NO: 479671 - DNA, 1000 bp, Homo Sapiens; identical to SEQ ID NO: 347101

SEQ ID NO: 479672 - DNA, 1000 bp, Homo Sapiens; identical to SEQ ID NO: 347102

SEQ ID NO: 479673 - DNA, 1000 bp, Homo Sapiens; identical to SEQ ID NO: 347103

SEQ ID NO: 479674 - DNA, 1000 bp, Homo Sapiens
gaagttagagatgacaattttgagatttattctttatcaggagatgcaaactcaaatacctccagaatgaaggcaggtaatgcaaatgaggattaagtataattaaaaaaaacagcattcatccttaataaatggcatgtaccactttgtctcagcagggatgcagtaggtaaaggtggagactgtggtgagctagaggacataccccctgtcttaggggccagtcattgccaaatagaagtgtgggatcagtgttaacagatcttctggtttttagagagaaactatagatattttcattttgacactttctaattattaaatgttcacaatgaattttttaagtgcttaaacactatacagacaaaaccatttgtatctatggtcagctttgccttggggggttctaatttgtgacttctaagctgcacagatgggattcaagagagagagttgagtaaattgagaagaaatccaggggctgcactgtgaagaacgacggccctcccaagcacccaagcttgcctggcggtgagcccagggcttagagagaccctggttcttttggccactgggtgtttggtgagctcccatgttggtggcagcaagtgaagcctgcacctgccacagctatttctgctcatcagctggaaatcatgtgggtagcctctgaggtcctgatacctccggggttagatgccaccttggggaggggcctgcagccttcactccaccactctgtatagtcacttttatcccaaactgtgaagatgctctccatccaggagtgtctgagtcctggctggagcaggcatcttgtttaacacatcttagacacccactttgtatcaggaaattcttctgttgtctaatttaagtgctttttgtacaatttaatctttttttgcttcttctatcttcagagcaggtggtggaatgggttactctttagcttccagattcttcctcagccttcaatagggtctcaaaaagccccagg

SEQ ID NO: 479675 - DNA, 1000 bp, Homo Sapiens; identical to SEQ ID NO: 347104

SEQ ID NO: 479676 - DNA, 1000 bp, Homo Sapiens; identical to SEQ ID NO: 347105

SEQ ID NO: 479677 - DNA, 591 bp, Homo Sapiens
ttcacaagagaaaagcatgcaaatttatttaaaagtttaacatgacataggagcccttggaaatgaagacccaaacaaacaaggaaacttgtgcatttttatgcttagggttgatgagtggacaacttgtggaaggatatgactggacaaaggtctgatctaacggtaacaactgggggaaattggtaaagcctgtttgttcagactcttctctgtggccctgtgtcttcagagataaagatgtttctttcctccaggtacagggaaggcatctctcaaatgagggtcttaagactaaatccataacgaatggatgacttttagtgctgtctgcttactatccttcaatagccatacatttggactccaggcaagttcttgctcaaaggtggctgacaagtcattctagctccagtgtcagctttacggcttttctccgtcctcagcttggaatgaggaacatctttcatttcacaagaggttcaggaactaccagtgtgaaaagaggctacgttcaagctgctggagggccagttccacctaggcgcagtcaagaagggcgcctggctttccggcttcacgtccctggaa

SEQ ID NO: 479678 - DNA, 1000 bp, Homo Sapiens; identical to SEQ ID NO: 347107

SEQ ID NO: 479679 - DNA, 526 bp, Homo Sapiens
tttttttttttttgattccccagtgcagaagggatagtggtcatgagaatgcctcattttttctttctttcttttttttgagacagaggtgaattatttgcattcagaattatttgcatatggcgtggattgaaacaacagcttgagaatagaatagaaagtcatccaaggacgaaatcccgagaaaaggatgcaagaatggataaacagagagagaagacacccagaggagaccgaatccatctgaaaggagtggaacgaggcacagatattcacatgaggaccctctctggcttcccaaaccatcgtcatactccaaggcttggctggaattccacatccttgacgatgtgaagccttcagacactccatactcacagggacagcttccaccccacatgtgtctctatcgccccatatatcaaacacaacctggtatcactataccacacgctagctcttgggggagaggaacatgtctcattccgttgcaaatgacaaaaaatttcaactcaaattggcttaa

SEQ ID NO: 479680 - DNA, 1000 bp, Homo Sapiens; identical to SEQ ID NO: 347109

SEQ ID NO: 479681 - DNA, 832 bp, Homo Sapiens; identical to SEQ ID NO: 347110

SEQ ID NO: 479682 - DNA, 834 bp, Homo Sapiens
cgctcatgaggttgcagtcaagttgtcggctagggctgcagtcatctgaaggcttgactggggctggaggatccattccaatactgctcatgcacatggctgtgggtaggaggtctcagttcctcaccatgtagggctaaccctagagctgctgcttgagttttctcatgatatggcagttggctttccccacagtgagacagaagagagggcaaggaggaagccacaaacagtgcctcttatgacccggtcttggaagccttacactgttgcttctgctttgttctattcattagaaatgagtcactaagttcagtccacactcaaagggaggggaattaggctccacctcttgaagaaaggaatgtcaaagaatttgtggacccatgtcaaagccatcttagagagcttcaggaccctttcctgcagaagggaggtggagtggaatgtgtttggtacttcggaaactgcgatgtgctggctggatgtgagtgggcagtggttatgactccctacccactttgaggagctcaattgccgcttaagtccgtggctagtggctgccctaaagttcagcaccgccacggagctttgggtccacccggactgtaaaaaggaagcacttccgttagcatgacccggcctgaagtagcggcggaacggaagtcgcttgtgtatgaacgcagcggcggacctgtgaggggatccgacttgccggcagaacttacgctgcgggaccccgggcactgttgctgctgcgggaggtgagcagcgcggccgccggggtgggctgcgcacccgcttttgactggcgcgctgttgttccagcctcat

SEQ ID NO: 479683 - DNA, 1000 bp, Homo Sapiens; identical to SEQ ID NO: 347111

SEQ ID NO: 479684 - DNA, 1000 bp, Homo Sapiens; identical to SEQ ID NO: 347112

SEQ ID NO: 479685 - DNA, 696 bp, Homo Sapiens
tttctttttctgatttaataaaaaatacatttacttctaaagtatcttttaattttcaacttcaaagcagtcccactctatatctgagatgactctaacttctacattataaaatccatactctttctccattatcttctttggaagatcattctctcccagatcttcccggatttccttgtatatgggcacacacacacacaaatgtgtgcagttgtatgtttgcatgtacacacacatgcatgtatagaatagtgctgtcttaggccaggttgcttggagcagagcctgagatggggatttggacgcataggatatactgagagtgggctccgagggaaagggagtaagagaaaaagaagagggcaagaaaagagttgggcaagggttggtttcaactggagcatgaattgcaccacccagatagtttgaccttgagtcaagggagccagcctttgaaccctggtaggtgaattctgggctgccctgggaggtggggggatgggcaagcggcccccattgagctgagaagctgggatgcctaagtaactggaggatgagtgcattgacagtgtccactacagatacacacctcccttccagttccagctgacggtgactttttgactggtaaccataaaagaattcattcaaaagggcagttgttcccagcagccagtgaggtccttcctgcat

SEQ ID NO: 479686 - DNA, 557 bp, Homo Sapiens
tgagcacactttctcttttaatcctgcccctcctcccaaagcctgccgcagctttccatttcccttaaaataaattctgactggctaccgggggcctcggagcctccgctcgtacccggggctgcggcccggaggccttgcccacctccccggccgtggaggaagctcggccgcccgccgtcgcttagctgcgggccctcctcgcgtatactccgcgtgattagtgaccgagggcgcgcggtgtgtgctttttttgcttccgtcttgaccgtgaacatcatcagatcacggaccaatattgggtcttgtagttccagctcctggggaggtggaggcagaggcgggaggatcacttgagcccaggagttggaggctgcaatgagctgtgattggactactgcacgcaggggtggcagcaagaccctatttctgccctgcagggtagacgctgtgactccccatttgacagaaggggaaacagaggcccagcacgggggagtcacgcagagaagttgcagtctggcctggtggcatcctccacaggcttggggccgcat

SEQ ID NO: 479687 - DNA, 1000 bp, Homo Sapiens; identical to SEQ ID NO: 347113

SEQ ID NO: 479688 - DNA, 1000 bp, Homo Sapiens
acagctctcacagtttattatatacagcgaaaaaacacataacacacctttgcccacatttacatgtattttacggaccatgtttcacatcagtccgcatgcacatctgcacgtgtgtgcattcggcagtatttaccaagcacctgccaagtgccagggcctgtcctccgcacccggcgtgaactgtcctggaccagtcccgggagccgcggttctgaccagccgtgctgaccctggacgactccatgagctgttttgtgagaaagacacgccatttgtttgcagagttctgacttctgaggggtcatgtagcacatgtttggtagccaaacgctgtcattcacgaccaggagcgatggctgcaatgcctttttctttgctttgctttccggtgccgggagccttgcctcccgccgccacccctggtcagctctgcgcaagaacgtcgttctgtttggcagccaggccgagacgcagcctgaatgtgagcaggaactcggagaagggaagggagagaatcagaaagaaggcccgggagggacccgggaagcagtgggaggtctgcgccctggagccccgcgagagcccgccggtttggcacgggctcctcccgggccgcccggcggtccaacaaaggccggccccgacacgcacccggtcttttgtgggagagaaacacaaagaagagggaaaaacacggaggaggccaacagcaccaggacgcgggggccaaccaggaactcccggagccggggcccattagcctctgcaaatgagcactccattccccaggaaggggccccagctgcgcgcgctggtgggaaccgcagtgcctgggacccgcccaggtcgcccaccccgggcgccgggcgcaggacccggacaagtcctggggacgcctccaggacgcaccagggcaagcttgggcaccgggatctaatttctagttattcctgggacggggtggggaggcataggagacacaccgagaggtactcag

SEQ ID NO: 479689 - DNA, 739 bp, Homo Sapiens
agttctccgtaaatcttttggtcaatacgaaggtcatacaggggtgtcctatatatatccacactggaaagtgcacatcgagagaggggcacatgatgagaaggcccaaggatgaaaattctccggggggcaataatggctctagcaggtctttttgtagactgtacttgtgaaagccaaccttctagctgtgcattcagctgcggtcctgaggctgtgtaccagctcccggcgtgactggcttctcggcagaccactcggttggacatcttggtgcctgtgccgcctatggtgcacgaggatgaatgaggaggcggcggcggcggcggcaggagcggctccgcgaggggacgagacaccgcgggcccagcccaggaggaggcggcagcggggaggggatcagcccggcccaggaggaggaggaagaggaggaggcggcggcccaggaggaggagatggcagccgggggggtggcggcggcagcaacaatcaccacaaactccggcgaccgccggaagatggggcccacggcggcctcacctaagcccggaaagccctggccccggcccccggcgtccccgctgctgcccagccggggctggttcagccgagccgcccccacggccccctcccctcccagctttgccagtaacatggcattcttccagggttcttctccttccaaagtccttttgtggtctgaaggactgaatgtccacagccgttccctcatctgcat

SEQ ID NO: 479690 - DNA, 424 bp, Homo Sapiens
ttgctttattggtttggcttccaaatcatggagagcaaaacatcacaacaattcagtgagcaaacacacagaggtgcttctaaaccatgaggcagaaaaccatttatgtttattttcataattggttttctggataggccaaaaatataacagcaccattcccttctatagcatgagggaaaatcaagatttcttttttttcctcttctatgttcatttccttcttcctccagtcactctttttgattgctatgattgtatccttggatggctcaattgcagtctgatgcatcacagatgctgcagaccgaggcctggagaaaaaaagggggacttgattccctttgatattgggagaagtctgtttcccaagctgtggccactgaaatgaaactgctgagatccccatacctaagaaggaact

SEQ ID NO: 479691 - DNA, 663 bp, Homo Sapiens
atttggttcttggtttcagtgagaacatgtaaatatttcattcctgggtatggctttggctattaatttaatatagagattctgtctcatattgagaaataatacttatgttcttggttatgctgcctgcttctcctcgcctctgataataatgactaaactaatagtagtaatagtaatgatggcagtagtaatagtagcaatgatagtagtagtaatggtggtggtggtagtagtagtaacggtaggagtaaatagtagcagtagtagtaatgacagcagtagtagtaatggtggtggtagtagtagtaatgatagtagtaatggtggtggtaatagtaatgatagtagtagtagtaatggtgatactactagtagtagtaatggtaggagtaggagtagtaattatagaagcagtagtagtaatgatagcattagtagtagtaatggtggaggtggtagtagtagtaatgatagtcgtggtaatggtaatagtagtggtaatgatagtattagtagtgatggtagtgatgatagtggtggtagtactaatggtagtggtaatagtagtgacaatagtagttatgttattagtagtagtaatggtagtagttttgatagtagtggcagcagtagtgatagcagctagcatttactaagcac

SEQ ID NO: 479692 - DNA, 734 bp, Homo Sapiens; identical to SEQ ID NO: 347115

SEQ ID NO: 479693 - DNA, 1000 bp, Homo Sapiens; identical to SEQ ID NO: 347116

SEQ ID NO: 479694 - DNA, 450 bp, Homo Sapiens
tcagaggtcaaattcctttttctgggcccctctttcctcccagctccactgggacgctgcctccaggggacttctcacagctgtctggaccagacctgcctctggcctcagtctccacctctgtaaaatgggctggctgaactggaagatcccggagggtcctttcctctctgccattctgttgtagctggaaaaggaaaacggggtagtgccaacatcccaccagcagtcctggggctttgcaccctggcagattgggaccagaggcttcactgccacatggcactgtctgggtgtctcttgactcttcccagaccccctctcaggctcactgggggcctggaagagctcactgtcacagtccgcgtggcatgcatgccctgcagagcggtagaagccagttggacagagcagaaggaagaggatggcttctgtccagccacaccccat

SEQ ID NO: 479695 - DNA, 886 bp, Homo Sapiens; identical to SEQ ID NO: 347117

SEQ ID NO: 479696 - DNA, 1000 bp, Homo Sapiens; identical to SEQ ID NO: 347118

SEQ ID NO: 479697 - DNA, 1000 bp, Homo Sapiens
ttcataaaaggatcgtaaagtgtaatcacggcaatgaagcaggcccgagtggaggggaggtgacctttccggccactctctggaggaaatgtcacccaggaacagcaggtggtgggggccttgcctccaaggagagcctccctgctggtctggccttggcggggtaggggcaacctcctacggggggaccctcgctgctgctcatggaaccctcccgccatgacagagcaggacacctcaggcccgctgctgaccgcagtctggagaggagatattatccttgctgcagtggagatggctgcacctcactggaggcctccccgctctggcttgctgtgttctcaacttcctgggggactgtgtccctgctcgggcagagcccactgactccaggcctgctcagtgcagaggctgctccaggctgagtatctctgggacctgtggcattcagttaggctctggacaggccaggtgtctgccccagcaggcagcttccctccaggcggggcatccgggcttccaagataactctccatttgaccctcattctccacctggagaggcatgggtgatccccttgtggggctccagaagaccccagaaaatgatggctttcagggctggagttggtctctgataagccgaggagctcccaggggcctggggggctccaggcagcccacaccatggatgtctgtccttggtcatgtgccagtgccatgggtacctgggtgctcagcaggacagcagggtgggctgcagagaccacctgctcccaagtgctccgttggccagagctgtcagccagggtgtgtcatggtgtctggggtgtgcaccctggggtggggtcttcccttcaggtcccatggtttacataccatctccatgaccctaacttcacagagccccacccagctctgatacccgccacactggcagagtggggtccaggacctctgcagagctgtggacctggggggcatcctccccctgcgttgtc

SEQ ID NO: 479698 - DNA, 689 bp, Homo Sapiens
ttttctattatgtcctttattttataaacttatttttgacagttgcatttttcaaatgccttttaatatcattactttgaacacaaattcaatttttccactttgttgatcactggcatttttgttaatactttctctttctggttcttcagtctttatttttaccacctgtgccggtgggcttctctgccggaagctgcagtgcctggctgaggctgtccccgtggtgctctcaggctcagccagcacgtggccctgggctggctgcatttctcctctgccccggggctgccggagccccatgtccctgcccatcggtggaggctgggctgaaccccacatgctgccctgtgaggtccgtgctatggttgggatccatttccacctagatttacccgttgaagccttgacctaccttgcagggcacctttactccttccagtttaggcgtttgtgttgctttcttcccaggattcagtggcatggcggccttcactgggcagagatttgtggtcaagctgagtccggctgccacgtcccagcctcgcccttctctgccagacaagactcaccctcactgggtgtctgtggccgcgctgtcccccacgttcagcacttgttctgaacttgttggtagcctggagattttattcaatgtaaatttaaagaagaaaaagccgagtgccgaa

SEQ ID NO: 479699 - DNA, 1000 bp, Homo Sapiens; identical to SEQ ID NO: 347119

SEQ ID NO: 479700 - DNA, 683 bp, Homo Sapiens
tggagctaaatgacatttatagagttatagagtacttcacccaacaacaggaggaaacacattcttttcaagtacacatggaacatccaccgagaaataccatatactggctcaccgtgatgaagtgggtgacttgactagtccaatacacagcaagtgcagacagagctgggcttaaaatgcaggtctccttgggaatgtccgtgaagtctcctttcaagtacatccactgcctttcgggaagaagagggatctctacgcagtcaggagactggaccgggatcctgtccttaaaaataataagtccagaagtggggcagttccagggctggttaattaagcagtttaatgacatcggcatgggcccagatttcttctgtctttctgttctgccaccttcagtgaattttattctcaggctctcctgatgttcccagtatggctcagagcttgcttccagggtctatgctcctaatggctgattgggtcacggggtactcactcctaggtccaaggcgtggcaaagagatgactgtttgggggtcagaacggacggagcttggactagcaagccggaatgttccatgaggtcccctcctcgcgttcctcaaacgcgaggtgggggacgaggaagtgcagagccctcccaaaccaccctcctgttctagcacgctcccctcact

SEQ ID NO: 479701 - DNA, 1000 bp, Homo Sapiens; identical to SEQ ID NO: 347120

SEQ ID NO: 479702 - DNA, 600 bp, Homo Sapiens
tccttgttgggaccctggaaagggcaatttattgtctccacttggcattagaggaaactgatgctcaaagagatggacctcctggaccaaggacaaagagcacaatctggactctacacagacttgtttaggtgcaaagattcctattcaataaagggaagggaatccaggaaactgcatctccctacctccctgcccaatatttgtccatcaggctgcccaggtccccatgctgtggcaggagcgccgatgatgagtgctgcagagaccatgggaggaatgccagcctcaggccaggatagcagggcaggctggttacgttgggaggcctggagccagccagccaggccctgatagcttacagctgctccaaatgcaggaggcggaatcagagcctgccccagccactggagagggacgcctccatctgtgcttgtgttcttgggtgctgccagccccttcctccacgggagctgcatcaccgtagtgactccccgacagctctgtccctgcccggctcagactctcctatgcagctaggagtaagcccaggagagcatgtccctcctccgctcaagagcttccaagggcttcccatca

SEQ ID NO: 479703 - DNA, 832 bp, Homo Sapiens; identical to SEQ ID NO: 347122

SEQ ID NO: 479704 - DNA, 1000 bp, Homo Sapiens
cagatggagtttcactcttgtcccccgggctggagtgcattagtgcgatctcggctccttgcaacctctgcctttccggctcaagcgattctcctgcctcagcctccccagtagctgggattacaggcgcccacgaccacgcctggctaattttcgtacttttagcagtgtttagtagaaacggggtttcaccatgttggccaggctagtctggaactcctgacctcaggtgatccacccacctcagcttcccaacgtgctgggattacaggcgtgaaccaccatgccgggccatatctacttttaaagacagaatataaaatacacagacaataaaaagtaagttgaatcaatgttgggaactggctccaaaactggccataaataaaatctctgcagcactgtgacatgttcatgatggccataacgaaacccgaatgagggcaaggaacacctggcctgaaaaccgcttaaaggcgctcttaaaccacaaacaataccatgagcgatctgcgccttaagggcatgttcctgctgcacagaactagccagacccacccctttgtttcagcataccccttcgtttcccataagggatacttttagctaatcgaatatctgtagaaacaatgttaatggctggcttgctgttaatagacacttgagtaaatctctgttccggggtctcagctctgaagcctgtgagacccctgatttcccactttacacctctatatttctgtgtgtgtctttaattcctctagcgccgctaggttagggtctccccaaacgagctggtctcggcaaatcaaggctatgcaggaagaaaaaacagattaaaaaaaaaaaagagcctattattgactcctcaaagagataagtgaagacactgggattgttaggcagcatagagagatcacttgcaacgggtgacgatgataaatttaaagtgacaccagtcatatagccatgtttttctccagttacaatgagctgccca

SEQ ID NO: 479705 - DNA, 1000 bp, Homo Sapiens; identical to SEQ ID NO: 347123

SEQ ID NO: 479706 - DNA, 1000 bp, Homo Sapiens
tttttttttttttttttaaagatcttttctgcattccgatgcagatctgggggcaaggcgccgtgtccacaccactttggtgatctcaatgagggaagagagaaagagaggttgagagagaatttaaatgggaaacctaacgtgactggggctgtgagtgtcccagcccctaaaccccgagctggagccctgcttaggccttgactcccgcagtgccaggcctctgagggccggggagaagagcaagccgacaagtgcaagcctccttggaggattccgggcggcagggaggccctgggtccggcgaggggccaatactggctcacttagccagagacagccgtggggtagcaggtcttcaacacgacgactggggcagaaaaatattcctccaaagggaagacctgccaagccccatttcagtgctctctccactccatatatatttcctctcctcctggccatgagtccttctccacgcagctgaaagctctgggcggtcattcactgagggcccagaaagagcccaaaggttgggacacaaaaacagacacttcatgttttcttcccgatccctttctctcgtaggggaaggattataggctgaagggtgggagggggaaggggcaggaggaggaagcgggggaggaaggaatgaaaaaggggaggggagtgggtattgtgccgcgtgtggggggagaattcctacgggtgggtttccgaatattgtgttcaactttttgaaagcagctcgtgaccccgaaactgcatcccccggagccggggacccaggcgccgggcgggcgggtgaacccggtcagtcccctccccgtccccgaaacccccgcctccgggtggtggcgacctggcctctccctgccactgcccggccagccccggagggaggctgggcaggtgctgcgggctctgccgaaagcgctgaaataaaaaaccatcgccactcagggagaactgaggcaagtggggctgagactctggc

SEQ ID NO: 479707 - DNA, 1000 bp, Homo Sapiens; identical to SEQ ID NO: 347125

SEQ ID NO: 479708 - DNA, 1000 bp, Homo Sapiens; identical to SEQ ID NO: 347126

SEQ ID NO: 479709 - DNA, 556 bp, Homo Sapiens
aatgtttcaggttcctttattttggccaaaggggtcttgtctttagacagttctgtcctgctacagagagagaatgcagtgccagctttttgtcttttgaagaggttttcctgtttcttcccctccacgaaactgctcaggcctcttcatcttaccatttgcggggaactgccccccaacccctaattccgcggggtgaacagcgggagcacttccaggcagccagagcccgggcaggcccgacgtggcctgcgcgcagaagatgcctgtcctgcaaaatggtcgcagccggcaattgtttgttaatcctctcatcagaaagcagcccgacgagtctgcggtccctcaggccggctgtatccacagggtgcacccaagcacagagaaggtggagatggagggacgggagggggttccgctgccctcgatccccgggtccagacgttgttggagagcagcaagcgcgccctagtccgcgcttcctcgccacgactccgcagagcgcgcactcttgcacgctcaccgcctctccactccctgcccaatcagccaacat

SEQ ID NO: 479710 - DNA, 945 bp, Homo Sapiens
ttgagagactttaaaggagttttttttaagtattttaaaaataatctcaaatttatagaagtcttggaattaaagtacgaagaacttttgttttgctaaatgatttgaaagttcctgagctgacttcttataacccctacatactgtgtgtcttctgtaaacaaggactgaatccaataaaattgtaatatagctagcaaaaatcaggaaatcaacattactatatttctaccatccaaccaacagacctattcaagttttgccaagtcaggatccagttcagaatcaccactgcacttatttctcacatctctttcatcttcagtctggaacagttcttcagtctttccttaactttcatgacctttaacacttctattacaggccaattattttgtagaattttccttaatttgaatttgttgctttaggattagattccaattatatattattggcaggagcatcatagaagtgatgctgtgttcttcttgctagactatcaggaggcacacgattgcaatttgtcctattactgatgatgttcattttggttacttgattaaggtggcacctgccagatttttccactgtgaagtgacttccttctgtaactgatgaatattttgtgaagagctgcttcgaaattacgtaaatatctccgcagctgcggggcctgaactcgccaaaaggaggttcctcctgcacgcgcggcttcaccctccctccagggctcccgttgcatttcacgccctgcctaaggtcgcccgccggtgagggcggaggaggaagaaccgcagctcccgaggacagaatccgcttcaaggcaccttgaccgtcgcccacccacaccctggctgcggcccgccgccctggtccccatcgcgctgtacggtcttcccttccaacaccgagggcgttacaaggccgccctgtccccggcat

SEQ ID NO: 479711 - DNA, 1000 bp, Homo Sapiens; identical to SEQ ID NO: 347128

SEQ ID NO: 479712 - DNA, 1000 bp, Homo Sapiens
ctgactttggtgatttaattgcttttcccttaaatatgagaaataggtgtaatttctccttttgttcttttactacaaccggagtggtaaatactacctactgccaacaaacacgggcatccactctgtcttcaatgcctcttccgtgagacatttgaactgaaataagagttgtatcatctagaatgaataaccaagggggccaagaaaggcctagactgaagaaataagtcaacatgtgcgttctccggcacaggcccctccatggagccggcagtcggctatgcagccaggggacgcagatccacagctctcgggctgattcaggactgtgcaagcaccgcagaagccagggagctggtgtcctgggcatcctggcagttcttttcacgttggcgcaaatgagcaatgcgcacgaagctgctccatctcctctgctgcgatttcgctgccgaagagccgaggaaggttaggatgcaattaacagagcggagtgacctgcgacggggttaacctgtgtcaggcagcagcagacacacttgagaacaccttcaattttccttacattttcctgcttcttgaaagaaaaatgcatcttttgtctgtcctctccccctttcttcccaaattctctagagttcttcctgcaagtggttctgtgtgactcaaaggcagacaacagctgaatgtgagacatttccatttagaaagagcccgtgaactcagccctggccctctctctacctggtacctcttccttgagcttccccaaaactcacactcctttgccaaagtgcctaaaaagagtagaaaatgaaatgattaaaactgaagaactcaggaggagggcatgggccacaatataacatgttctgtactcagaatccaaatatcagagttcaaaaaccacactcacccatgaccagctgtgcgaccaggaaccagcctttttacctgagtcccaattttccatgcttatagcacagaggttcccaaattc

SEQ ID NO: 479713 - DNA, 1000 bp, Homo Sapiens; identical to SEQ ID NO: 347129

SEQ ID NO: 479714 - DNA, 1000 bp, Homo Sapiens
gaatcatcagcaaatttattcatttactgttttaaacaatacaaaattctagcgaaaggtaaaactattaaaatatatcttattgtcgaaattaaacctgctggaaataatcgcttcagttgaaataaggtcaatacaaaaattgtgcagtaaaaagcgtatgtaatttgaaacaaaaaaggcctttattagagacaaaactcgagaggacaaaaacccacaccggacatagatcacaaaacttcctagaactctcctttaaatcggaagaaatttgtaaaatgtgatatgaaatacaactctacaaacatccaaaatacatttctggtcataattaatcgtatttgacattttcctctaagtttaatgcaactttaaataatttaggctttttcctaacatgatagatttttttcagtatcagaaatggacaagaggaaactccagtaaagagaaaagcaatgaatttaaaagggtgcagaatctgaaaacaaactaaccacaatgtacatttaattgtacttaattgtatatttcatttaaatagtccttctcaggggtttaataatttagaatcaatagttcccttcaaaacataataaaatatttacactttataaaatattaaccgattaacaatacagccgtgttgtttataagagtgtaactgaagtcctgcaaatcatgctgttgacacaagcctgtgaggttagcgaagtgatccttagcaaaatgtaaatgaagatcttcagacagtggtgtttataaaatagctcattaatgacttaggattgaatcgctccaaccattcgcatcatcagatataataatagtgacgaatcagacaggaaagatcctggctaaaccatttgcatttttttccagaagtactgaactcctaatatcaccaattcttctaagttcctggacattgatccggaggaggattcgcagttcaacatcaaggtaaggaaggatacagcattgttatcgttgttga

SEQ ID NO: 479715 - DNA, 1000 bp, Homo Sapiens
gcatttcttaaagggatttagtgcagttattttaaataatttatgcacgcacacacacatacatatatcccccgagtacatattttttccctttttacttgtgtgcaatcagtagctacaatgactgaaatccacttctttggactgtgacatttaagcaaatcttgtatctagaaaccgaaatgcccagagtctcgcacaagctgttcgtctgggccaccaactcacacagccgccgcccagcgcctcggcacgcgtgctcatcttgtgtaaaagtaaaagttgctcatgtcattagctcggctctgagtttgcatgagaaaccagcgcagctctcgagccacgggagaaaacacgatctgctgcggagcccagtgacctgaaactgtagcagtgactcgagacctgtcctctcctcgacgtcgccctataaccctcccgctttatttaggatccgcttttccgagagcagccactcaggcaacccccggaaggtttgttaggagtttctccttgaaacgctttccgattccatcttttgaaatccagcaggcgagagtcacgacagactccaggacctcttgagcgctgtccgcagccccacggtaggagtagccctagtgcacgagacttggcggtggctgaaaagctcgcccaaacgcacgcaccacctctctgcggggttgcggattgcgggttgcggtctttgtccgctcgcccttcctccggggccgcacactcccgcatctggccggcaggtggcgcggttggctcacgatgagctgcggccggggctggagaggctcctccacctcccagcggccgcccggccgccgggacccaggctccccaggaaaactcggccctgctctggagggagtcagaggaggggcggcctgggaaggggaagggaggcctcattgctaggaatcagtgcccctgccagcgcctggggaaatgcaccgagtggcgttggggaccggtccctgggacaccggct

SEQ ID NO: 479716 - DNA, 1000 bp, Homo Sapiens; identical to SEQ ID NO: 347133

SEQ ID NO: 479717 - DNA, 1000 bp, Homo Sapiens; identical to SEQ ID NO: 347134

SEQ ID NO: 479718 - DNA, 1000 bp, Homo Sapiens
tcagacaaacttaaattgagggtcattctacaaaataaatgccttgtaatcttcataggtatcaatgttgttaaggtttaaggactaaggaactgttccatattgaaggagatgaaactttattaaatgcaaagtgtgattttgaactggaaacttttgctataaaggacttcatggtgcaataggaaaaacctgaatggggtctggggatggcatcagtgttaatttcctggtataaatgattgtattgtgattatgtaagagaatatatagactatacttgtctgtagaaaatacacattaaactttttgatagtgatgggtattatgtcagcaacttactcttagatgattcaggaaaagttctttgtattatatttgcaacttttctgttaaatctgagaaagtttcaaattaaaaactttttttttcagacgagtttggctctgtcgcctaggctggagtgcagtggcgtgatctcagctcactgcgatctccacctcctcctgggttcaagcaattctcctgcctcagcctcccgagtagctgggattacaggcatgcaccaccacacctggccaatttttgtagttttagtagagacggggtttcaccatgttggccagggtggtctggaactcctgacctcgtgatcagtctgccttggcctcccaaagtgttgggattacaggcgtgagctatctcgcctggccctcttgatcacattctattaacttttttatttaatatattttactgtccgtgacacagccctcaggagatcctgaaaacatgtacacaccctcatttttaaaagatctcagaaacttaccagcagttagtcacgttctcacaagcaattagttacttgcttctctgcgatcatatagcattatgttcacaactccattatggccagtcatactttttatgtttctgaaacagggtttcgctctgtcgcccaagctgaagtgtagtgagtggcgcgattatagctcac

SEQ ID NO: 479719 - DNA, 529 bp, Homo Sapiens; identical to SEQ ID NO: 347137

SEQ ID NO: 479720 - DNA, 1000 bp, Homo Sapiens; identical to SEQ ID NO: 347138

SEQ ID NO: 479721 - DNA, 518 bp, Homo Sapiens
ttggccttgtccattcccctgatgaccccaaaacaccacagtcatcatcaacagtcccggagcccatgtccacatccttctagtgacacgttcatgtcttctggccattgcatcttaaactctggagtcaggtttagacggcagcctccacccagggggacagggaagcagccctgggaagctccgcagcgtccgtgtgaataacgagggcagcgcagcggaacagctccccccggacctgctgctcccgctgctccccggtttctcccactctctgtctgggagccgtccttccttttctttcctctccctcccctgcctgcagctaccgcgctccctcctccgggtggtggcgcagcgctgtccttccgcctccctcctccagcgcgcgagctgcccgtgctactaatgagcaggctcgaggctcctcccggtctggggtgcgcacaagccccacgccagaaacgagttcgcaggagcagagctgtggatatgccttgtgcggccacatgcgccat

SEQ ID NO: 479722 - DNA, 590 bp, Homo Sapiens
tggctcctcaaagctgtccacatatgaatccccagaacctgggaagatgttactttacaaggcagcagggacttccttcgtggatgtgattaagttaagggtctggagatggggggaggatcctgggttatctggtggatccagcgtaatcacaagggtccttatgcgaggggcagtaggaggaacgaggaccgaagaagaggtcagagacagagactggaggatgccaagctgtggctctgaggatggaagagggggcaaggagctggggaatgcaggtcacctctggaagctggggaagcacaggagacggagtttcccttagagcctccaggaggaaccagcgccaccgatggcaccttcattctgggacttctgatttccagaaccattgaagctttaggattctgagagttcaggggcgattcttcctctgtggccctggccccttgctgggaaagggtgtagagagacttggttctgccgtctccagggttgagagcactcatgggtccaggttggtgtcgtgtagaacacagagagccagcatggaatcaggagctcagaaaacaaggtgaccggaaagatgt

SEQ ID NO: 479723 - DNA, 1000 bp, Homo Sapiens; identical to SEQ ID NO: 347141

SEQ ID NO: 479724 - DNA, 1000 bp, Homo Sapiens; identical to SEQ ID NO: 347142

SEQ ID NO: 479725 - DNA, 1000 bp, Homo Sapiens
tatgaagaagcaattttaatatagtattaagatttagaaattggagaaaaaagatttaaccgaattccttgaccttatgaagttataaaatattttgtgaaacatacacataaatagataatattaatataatgtactaagtgcagcgacaaaggcaagcatgggttaaataggaagaacagaaaggggcagctagcttggtttgaggggcctggtcagggaaaattttctggaggcaggaccaactacagaggcatgcaatcaggtagcttagggccttaccctcagaattgttagtgcttggggcttaatgctctgtggcccccttttgaaatttttagtttcatctttgaatttgtgttttgtaaatgaagtccaatgggacaatggagcacatgatgggcacttgaagcctctgctcatcttgtgctattcacttttggctgcctccctcctccctggcccatttacagcctgctagaactctagggcaggaggaggccatcatcctcctttttcccagcagaggccacagcatagaagcatggaggttcaaggtcaggtttggccatcactctttttccccagcaggggccacagtgtagaagcatggagggtcaagctcaggtttgtgcgccacagtgtccggggcaacgcaaggcagcagttgtttctgccttggctggcagagcaacagccgtgtttggatcagcagggacttctcgcctgttcccaaatcagatgccaagtgtttccctgtgcaaagtctaaatattttggattgggatgacctcctgtggaagggatatgttgaattccacctgtgagattttcgttttttattttgcactgggccacccaaattatgtggccaccttgcctggaggcagcgatgatgctcaaattgatttgtgaaggatgagtagaaattttccaggtgaaaaaggtgggaaaggggttgaaagggtctactaaggagtgggaaggaaacaaaagattt

SEQ ID NO: 479726 - DNA, 768 bp, Homo Sapiens
ctatcagggtccaagcctctgcatgtgctggcttgtttggctttattttagaaaccaaccaacatgtttcattagcactgacacagcaggggtcccctgctgccacctgacaatccagcgtcacttacactgcacccacgcaggccacaccttcaatggccacggcacgctagcccagagttagccacacagaaacacacttctcaccgcacaaaactcccttttgaaaaaaccaagcaatcgtcaggtcggaggagaatcactagccccccacagcgagaggggacaaagcttggtggccgaggcccaggtccttgtggcccctcccggtggggtgaaggtgcccgggactcctcggggttgcatggctacagccggggcgctgccagggcctcctctgcggctgagagatggaagggatccttcccgacgcccgcaggtgggggcgagccaccgggaaccgggcctgtcaccagcatccccgagcccccgcagaccggaatgcaaatggctccgcgcccacgcggctcccggtctgctgacgagggctgcctgctcccatttcttctcttcctcttcattttttttaagggctgccagttctggaaactttttctggcttctcagacaactgtggcaagatggagtagagagaggccccggccgggcgctttctgctgcctcgcggaggggcgggcacggggagtgaggggtccccaggcccagcgggtgcggggccgggtgaggagacggaggggcggtgggcat

SEQ ID NO: 479727 - DNA, 1000 bp, Homo Sapiens; identical to SEQ ID NO: 347145

SEQ ID NO: 479728 - DNA, 1000 bp, Homo Sapiens; identical to SEQ ID NO: 161545

SEQ ID NO: 479729 - DNA, 1000 bp, Homo Sapiens
agagcatttaaaggtttttattataatgaattctgcaatgaacatctttctatataaatttttgtgagtactttgcattatttcctaaaataaattagaagaaggaatgatgaatcggagaatgtaaacacttggagcttttgaaacacacagtttttataaattagagtctgtagttttaattcagggagattgttgtgtctcagaagatatttcacggtgaagtctcacctgacggcacttcctcgtcctccacagagccgtgtgtctagggcccggggtgcggaacgggcagttcttcaacacagtgagcggcagcgggcgtcccgaaggttctcaggccttgtctccgtggagggcattttgtggcctctcccagggcagccggcaggagccaggcgagaacagatgcgtctgtagcaggagggcgttgatgcctctgaggttgtagcgaggttggtatttaccttttcctcctggtccattctgaagctccaaagaacggtcagtttaatacagagacacaattacagcaagcatctagtgtgaggcgagtcacgcattttggctagaattactcagggcgttggaaaatcacaaaccttttcaagtaacttgcaaattgctagcattctctctgcaagacaagaggtgctgtctgtgccctgacccctgactccacaccccagcttgttctgcccctttctgattgttctaagtaactgacatacttagagcagtttagagccacgtcgtggcctttcgaggccggcgtgctgtgatattttcctacagagcgcggtcacttccagaggcgagagaggcacagaattctattctgagaatccctgggacgcacgccgcggtggctgtgagtatgaaggcagatgctgtggaacagcctggaaaggaggcggggtccgtggcccctggcagtgcccggagctgagcagccaccttcctggaggagaagccctgggccagatgcctgagaatgaca

SEQ ID NO: 479730 - DNA, 1000 bp, Homo Sapiens; identical to SEQ ID NO: 347147

SEQ ID NO: 479731 - DNA, 650 bp, Homo Sapiens; identical to SEQ ID NO: 347148

SEQ ID NO: 479732 - DNA, 721 bp, Homo Sapiens
ttcaccaagttcaggagtcccagttctcagagagaggcagccagccatgactgtaagacctgcctgtggatagcagagcttctgaggccttgcaaagtattatttcttgtagagacagggtttcaccatgttggccatgctggtgtcaaactcctcacttcaagtgatccacctgccttggcctcccaaaacgctggtattacaggtgtgagaaaacgtgcctgacagagggctttcattcttgatggactgctccatagcctcagagacagtcggactggtttcttcaaccagagcggagcagacaggcaatttctgttcccattggttttccttgtctcctacaggcagagagctgatcaaaacagcaaaagcaaagcagtgcccctggcccagttctgaagccaaccttccttaaccacgcagacccatccctggttaggacttgctgtggattctcaggtgactccatctcaggatacagggactgagagggtatatgcaatatctcagacccagaaaccgttgattctgttgttacatctgccttgccaggcgcatggtaggcgcttagtaagtatttggtgaacgaatggcttgtttggtgacagtccaaaggctggaggacagagggaaagctccctcctgtcgggccccagacgggtggcgctgatggagaggcggctgggataaggcctccaggaccgaagcgcgcacccat

SEQ ID NO: 479733 - DNA, 517 bp, Homo Sapiens
tttttttgtttgtttgtttttgtttagttgtttttttttttttttttttttttgcatttgcatatgtatttattaatctattatctctatcttgaaaaccgtgagtttacaacaatatgccgaattccaattcaacaccacgggggtcatccttgttttttcctctgctgtatttgtaacttccttctccaacagtgaaaaccttgtctttcattttccttaagataattactagtttgatcaatcttctatggaaacaatctccaatttctgctaccacacccactccggcccagatgcccatgttttcctgcttggctctcactctcctttccaggcagttctccgtcgtggatggcctccttgcaacgcttgggctctgaaagcccacaccatgcacaggggtgctgtcctctccctccctgggccctggctccatgtagcaatcttgcaaagattttttaaaaggctctaaggtcatacagatctggttggttttgaaatttggctctgacat

SEQ ID NO: 479734 - DNA, 1000 bp, Homo Sapiens; identical to SEQ ID NO: 347149

SEQ ID NO: 479735 - DNA, 1000 bp, Homo Sapiens
aacacagatgaaaatactgaacgttttctatgaaaagtcacccgattaaacactgccaagagggaaaaacagtgcaagtccagtaaagcacgagacacgtagaaaattcaagctatgtagccaaatcgctctctctgaagaaaacagcaagccaactgaacccagcacggagtggaaggcgtaaagagctgtcatcgtggcggtaacaactccaccgggcggctgagcgtctagaaagaggctgcggttcctggttccacatcaggaggcactctccacaaggtctacaccgccgctcccgggaaggcacctccagggcggccagcaagccccccgagtggggacaggcagtgccttcctcgcctcgtccccgcgcggcgtggcccggaggtggcccactcgccccgcccccgcaggccgcggctccagggggcgtccggccgccctcccggggccccgaacccgcgccagccgcaccgcgcctgccctcttcctggaccccgcgaagcacctgcctgggcccctcttcgaaagactgggaggaaggagtcaaggagctgccggggaggctgacagagccagaggctggagctcccctacgggagccgggagcataaccctgctcctcccgccaatgggggcgacaaaagccgtggaaggttgctcaggggctggatctcctgctgtccgggccccaagccctctcagctgtggagtttcggttggtgcacgagggctcgaatttcctccgcacaccggagacccaagacgggacggtgttgcgacttgggggctggggtgagggagggctcggcgcgagcggacggcaccgcacaaaggaagaggggactgaggggagacgaggggactgaggggagacgagcgtcccgttacctcgatcctcgaccctgttcttcctgatgtcgctaaggttgcagccacgttaccacgctcccagagccccggccgccctcagcggaacctcaccaaccccgcgcga

SEQ ID NO: 479736 - DNA, 773 bp, Homo Sapiens; identical to SEQ ID NO: 347150

SEQ ID NO: 479737 - DNA, 954 bp, Homo Sapiens
caggatctaatcaccccttaccattccccacctccaacattgaggattacaattcaacatgagatttgcgtggggacacaaatccaaaccatatcaatattctagggagcaatgtaacaatatttacccatattaagtttaggtcttagccaaagtttcggtctatgacttggtaattctgatcctaggtatctctattctccaataattcaaatagcctttaacttccctactgtagtaataagttgaaaagtgtccataattgagaaaatagatggaaaaaatatggtggtttggtatctcattgtactactttgcaagtagaagtaataaactagatatccaagtgacaacacagctagatcttaaaaacagctttcagtggataaatacaatttaattctctaaattcaaagtaatcgtatgcactttgccaaaacccccacacaaaaaaatcatagacagtgtctacagtaggaaagatgaatggaaacaaatgaagatataaaacaaaacagatgtcttgtgagaattttccaggagctgaaaaccagcatttttccagaacctgagaagaatgatggattcgcacttgttcatctcatttttccattgtctgttttgtggcattttcaaagtgaattctttcagcaggctattttcatgatttggatttatcaaagaaacaacttgacccagagataatggagaaaagcaaggcaggacaatgggccaccttgtgactagctgcaaacaaccagatgagctttgtctgaatgtaaacaactccaaatgcatctctctccatggcttgagcgttcttagcacattatctacattaccattattcaggttcttgtagaccatcttgctgttactctccttccctgggtgggtcactgagctactgacgctagctttcatgctatcatttgttccaaaaatcttgtccat

SEQ ID NO: 479738 - DNA, 1000 bp, Homo Sapiens; identical to SEQ ID NO: 347151

SEQ ID NO: 479739 - DNA, 1000 bp, Homo Sapiens
tagtctaagtaccgcatataaatggaatcatacaatatttgttgttttgtgactggcttatttcacttagcatcatgccttcaatgttcatccacgtagcatgtatcagaatttccttcctttttaagttgaaagctgtacttttgagtgacacctattattccacctgggcttccctggagtgatccagttccctcattactttcatggctggtccagcacagcacaggtgactaaacttgacttcagggggaagcaatgaggttgaaaacttcgtgtcatggggtgtcccacgagctctgtttcctgtggtgtcagttggctttgctggccataatgaactcgggcccgctgcttgggcgtgcagaggggaccttgcaggcttctaggttagagcaaaccttttccctgccacacagcctttccggtacccacacagtctttggcatgatcttttgaaggagatttgcccccgtttcagtgggtgcaagtcaactcatcattccacgagatgattttgataagccttgagaattcactccaatgtcaagcagtctgtcagaccagaattaaagtcctttcataatgaatctgtctccaggagaagtgattgttctggcagctgaagattcaccatgcacgcagttgcattttccagaagcagttgcatcgtgaggcctgcataactctgcctcttgcggctgcatcatgtcaatctctgcctctgtggtcacatcactgcctccttttctctgtgtgtctcctcctccgtgtgtctgaaaccagtcccggcaactccctgatgttggacctccagaccaagagtgttcactgcattgagctttatctgggtcagcgtgtgattctgggtgcagtggagagatgaagacccagctgccgtgggacttgggagggctttctgtagagaaacgtagagactgaacataatacgaggagctagtctccccctgagcagggagttgaggagcggtccagcgtc

SEQ ID NO: 479740 - DNA, 371 bp, Homo Sapiens
gtctgctggagtttgctggaggtccactctagaccatgcttgcctgggtatcagcagcagtggctgcagaacagcaaagattgctgcctgctccttcctctggaagcttcatccgagggtggcacctgccagatgccagctggagctttcctgtatgaagtgtctgtcaacccctgcaggtgccaggtgaccccactgctgatgacctggggcagagcttctagaatcacagctgtagaacctttgggaatcaaggattcttgcaaaattatcacaattgttgcgaattgtaacagacaaaagtagggagtttgaaaaaaaaacacaccagtaaggactggcatttgacaatggctgaaatattacttgaa

SEQ ID NO: 479741 - DNA, 1000 bp, Homo Sapiens
ggcaacccgctccggtgtccttccatgctgtggaggctctgttgtttcgctctttctactgcttactcttcgggtccacactgcttttatgagctgtaacactcaccctgaaggtttgcaacttgactcctgaagccagcaagaccacgagccccagggaggaacgaacaactccagacgcgctgccttaagagctgtaacactcaccgagaaggtctgcagcttcactcctgagccagcgaggccacgaacccaccagaaggaagaaactctgaacacatccgaacatcagaaggaacaaactccagacgtgccaccttaagagctgttaacactcaccgcgagggtccgcggcttcatttttgaagtcagtgagaccaagaaccaaccaattcgggacacaataccaactctttcatgccaggagaagcctccttaaaaaatttcggtgattaacaagcagcacatgggtcaaaatctcctgaaagttgagcaggggagctgtagaagaattcctccttttctcgcagatgaaatcttatgatatagcaggggttacctggccaagaaggtaagtacagaggagaacaaagaaaattcaaggaactaaattccttctccacctcaaccaccagcattgatactccatcacttatgtactgcatcaagccgtcctcagaggtgaggaaggtgctgtcaagactagaagcatgtgtccctctctccattgcaagatgggacatagagaggagaaaagtggcagacagaaggctaatctcaactggaaaccagaaggctagaaatcttactgatgtgatgtccagggatacagagcatatgaaggatgcagagagtgggtcaaatggaaggaatgtagcaaaacatgtaaacttgagtaagtatttgatctctttgagcctatgtttttcaatatttggattccaacagccagctcagtgctgacagagtcagcaagttcttgttgagtgggattgtgtcc

SEQ ID NO: 479742 - DNA, 1000 bp, Homo Sapiens
tcaaccgccccctagtttatcccgacccttgggagacagcggcgtcccgcacggaatgcgcagccgcggcgccgcgctcggttccctagccagccgggggccacgcctggcccctgacacagtggtggggcggtggcggggacctagtgcggtggtgcggaccgaggaccaggcgcttctcgccccgacaaacttgctccggccgcgcgaagttcggattgcaagttgcgccccgcgcccggctcccttttggcagagccgcagtgcggccgtgaggcttttcccccgcgcctgcgacctggatgggggacgtgggaagatgtcgcggcggaggctccgggtgggttgggagcgcgcggccgccgcagacccggtgtctgcgagccggaagaccccccctttcgtttcattcacacggacacctcccctagttagccgtctcccacccaacttctgggcgcagcgtgctaaacccccgcagaggggctggcgccctggggggcgtggcgtggggagcgtgggctttccagcgtgggcccctcggggaggggggcggggccgagaccccctccaactggaggggccgggaatgggcgagcgggtgcggcggccgacccagcagctgcagccgccggacgggagagcggtcggcgctgcggaaggccgagggtcgtgcaacgcccgcgctgggcgcccgccccgcagtccccgccccgcaggccgcggcttctctccccgccgcagagctggcgcggcgcgtgtgggcgtcgatctcagcgcgcaccggcgccccaccctcgcgccgcgacgcccttctgcccggcgctgataaggacgcagctggggctccgcgcggcccgtgggccgcccactcgcgttcagtttgctgaccccagcgcggctccccggggattcgcggcccagccggtggcggctgagccggtggcttgttggtgagtggctcgggcggggaccggggtgccgggttggggatgtaagg

SEQ ID NO: 479743 - DNA, 1000 bp, Homo Sapiens
acagcatagcgctttattcatgccatcatacagtcgatctgtattcttcaagtacattttgaatttataatgagaacagtttaaggcataactcttcccactcaaatctaggtctttctcaagtgagacactagagagagtagaaagggaggaagagatagggcgagaagaaaaggagggagggacagagatgaggacgagaaagaagaaaaaagggaaagagaaaataccgtctgaagtccacaggcttatctatcccaagcatgtctaccccacgcatgtgggcatcatatccaggttgtaacaaagaggtgaccatggcgtttatttttggctccagacaggcggattcagcctgcattgcatgcatgcatgtctgtcacctcatctaagtccccattccttccggagttgtgagctccagatccaagagtgcccagtgcacggtgctgggcacgctgtcccttggcgaggctgccacaggttcctgagtgtgcggtcaggggcgttggtgcattgatacgttaggcggagggaggagtaccatctgccagagtcttatctcgagtcccacgttttctggccatcgcggaggagtgtgcgaggacaggtagccctcgcagtgacaaggcgcgcggagtgcggtcgtgcaaggcgggggaggagcggggtggccctgccgaatcttaaccggggccccgggtgtttgcagacccaaataaagccgccttgggtctccacggtgtcctccagaagctgctgcctgagaactctgagcctcagctctgtcttgcttcgggatcctcttcctcctccttccccaccccctacctggcctgaacggcggaacgcgcggctcgggggatcccctctccctgggaccggccctgtcccgggtcgcctccacctcccgcagccgccgcgccccggctcgccgcgctcccgccggcaccatggaggaattcctgggacaaccgcctgcagccggcgacttttcccc

SEQ ID NO: 479744 - DNA, 879 bp, Homo Sapiens
tcatgatctgaagtctaaggtttattcggaattggcggagatagcactggtaaatatatatgtttttttaaaatgaaggatccaaaaatacgacatttccctaagcattaaatcagactgagaaatttgtaccagtgatttggagcctgggggtaacgaggcaaaaacttcatgagcttattccgggacccccacctgagtcaaggcctcaaagcttaaggatacaaagttccagtgacggcttgttgccaataacagagaaggcggaatcatgagcaagccggctgtctgtccaccgaacagagtgctcgcaaatgcttggcaacactccccgcctgtgttattccctctttcagcctggagggctttccacgttcacagcgtgcatcctcttgacattaaagacattatcccagggcgcttaccctgagcaaagcttcctcttctcagctcctacagtttggctgatgctgctcaagagtcccccacagtcctggcatctggtttccttctgggaggcatctgccctgctgaaagacaggaggcattgattaaaggcctttaggttggattctgacctggagatagtgtccactgacttcacggcagtctctcttctgcaaataggggtagtgctttgcctcatccttatggaaatgatatagtgggatgtgaaaacatgtggtttccccctcgaagttctaaacattccaaaagtgtcatttactcactagatccttaatagatcttcctctttgctgatgagacctgtggaggttttcatcgcagatgtttatttacacggagaagaacccctgaacacggtgaccagatgaaaggcagctcagggctgagctctcgggactcagctctgccatc

SEQ ID NO: 479745 - DNA, 874 bp, Homo Sapiens
taaaaaaaagattgaacttcaaaaccattttcttacatactcagtagaagttgttatgagccaacattttttgtgagctatactattttaaacatctaaagtaaattatttgacatataaaaagacttcttcatttaaaaatatatcttttaaaaataattttacaagtgatggcatctcattttagaagaagaggcatcaatgacagcagttacagtaactcaatgctgaatatgtttttaaatacaagatgctgtgttcagcattgtacatacattatcaaattttattctgataatatgctgcatgatgtattaggctgggttctctcagacagaacctacacgtatacatatatatatacacacatgcatatacatacacatacagagagagagagaaagagagagagagagagatctctacatttattagaggaattggatcatgcgattatgggggctgagaagttccaggataggttgtctgcaagctggagaaccagggaagagagtagagtagctttctccaagtcctgaagcttcagaactagggaactgatggtataactctcagtcagaggccaaaggcctgagaactcagacagccactttgcaactcctggaatcccaaggccagagagcctggagtttggatgtcccatttttgttttatccatacccctgaccaattggatggtgcccacctgcattgagggtgggtgtccctctattaaatattttaactttaattttaactgtgatataggcactgaattcttgttgctaataatctggtaagatccatctgaactatgaagtgagtacctggaggaactcctacattttaggcacacttctccaaaatgtatcat

SEQ ID NO: 479746 - DNA, 1000 bp, Homo Sapiens
gcagctagccttggtgtaagagctcccaggcactgctaaactggtcatcgctaaaccctccgttcagggaaaagagagtcgctgcgacggatcgactggccgttgggtggaactttctttggtggcctagtgactagaaaataaaaacgaaaacgaaataaaaaactgctactgacattactcccacgctccctcctcaagtcagtggcttcaggcttaagaaaacctgtatttttcttggctgatccgtgatccctaattactgagggccccgcgacccaccaagtgcgattcgcagagggaaaggagctggaataaggatccagaatgggacggatttggctcatgaagagagtttctctaaatgaaaaatgtttaggacattcaggagaggaagaaccaattaaggaatgatctccacagcagagacctccaggctcttgtgggtgcagggcacagttccagtgtaaaagtccgcagggacagaatgagggtccccactggtgtgcctcaggctccttccagcacagtgttccttgaagcgggtagtgtcgcaggcttgcagaaaggctggggttcctctcgtttccgggttccttcctgatggaaccctgggttttcagcagcttccgggggcggcctgaactgcagagggcgccatgggcttgtgtccttccacctccgcaggcgctggcatctccaggctgcatcaggcagctttggacttcgccgtcggtagcatttgcgtcttcttgaggtgactggagcccgtctgtggtttcagcctttgattcctcgacatgggagtctcgaggccgtttttggcccctctcatctccgggaagggctccgtgcccggtggaggcgcggtgcagccgccagctcccagcagagctcccgtagagctgatggcattggcaggagtggcggctcagcacagggaagttatccagtgcccaggcccaggcttgctctcggttcaggtcccgtggtatatggg

SEQ ID NO: 479747 - DNA, 766 bp, Homo Sapiens; identical to SEQ ID NO: 347154

SEQ ID NO: 479748 - DNA, 1000 bp, Homo Sapiens; identical to SEQ ID NO: 347155

SEQ ID NO: 479749 - DNA, 1000 bp, Homo Sapiens; identical to SEQ ID NO: 347156

SEQ ID NO: 479750 - DNA, 1000 bp, Homo Sapiens
ttgtttctcaatacagttattaaatatatttagactacaatacgcattaccttaaagacaatttatcatgttttaaatgctggagggctaattttcagtaggagtgtgtaattagcaaaggcgccagaggccataagacggtagaatagagctgggagaggcacgggaggaaagccggatggaaccctgttgtctttctgggtcagggttattctgtaccggttaaacggtgaaagagaaaaggtcagcgcaggaatgtggtatttccctgacatctccagatgaaagtccgggctctaggacttctgtagactgtgaaagcagcccacgattctaacttgcatgcacctaagtggcagtaggtttaggatgaaagtggtggggcggaggccggcggtcctcgcccgtgccctctgcacccctgtcccgaggccgggatggccgcgcccactctgggtaaatttcaggagggcctacgcggggctggagaactccaccgggctatgcgaacagaatcctgcgaaggtcggcattaaaggaatacgcaaaatcagcgttgcagcccccgcggcttaaccgcatctatttttatatctaagccaaggtcactctttaataccaggccattgccctgagctgggcgtcgcgctgccgggtgacggcggccggggcggagagagggggcgcgggtggcgaggcgggggccgcgtgacgcccccgggctggccaagcccgcacctgccgggccggcgcctgaaagccggggctggagggaggcagggcggcgtcccaggctccgaggaggggccgctccgcgctggcgggcggggggattcgcggtgggcgcgggcgcggagcggaagcgaaggctggaggcgctgcggcgctagtgcgtcacgtcgtcggagggcacggtgggccgcggccgacccgcgacgaggagccgggcgtccggggcgagcgggaggcagccgcactcgccctggcagccgcgagctgt

SEQ ID NO: 479751 - DNA, 1000 bp, Homo Sapiens; identical to SEQ ID NO: 347158

SEQ ID NO: 479752 - DNA, 1000 bp, Homo Sapiens
ataaaaatatccagtttatttggatacgttccaagtagattgattgtaagctaccaacccctaagtagcaccaataaaggtgctattccattagcaagactacactaggcaccaggaatgcacagatggacactccaagaaatcttccagaacaggaaataaatatctacagtttagtagaacacaagttaataactaatacttcctggaagatacctcatgcaaactaaaagtggcataacaaatatccagtatcacgaccaggagtttgggagtggggcgattcagcctgttacagacaaatcatatcactaaagttaccagtccaattagagctattccttactgaggagcaaataatatttttttagaaattaagttaaaagggatcatatgagaattcacatcacattatttatggagcaatataatgcctcattcaaagaacactttaaatccagtttatacagagcaacattgtttatttaataagatggaaatagcacttacacaatgcatttctcagacagcacacagtgctattggcagtatgtattggcagcttaattaagaagtctgttgatgatgttaaaaaaaagctgacacattttcaattcagatggacactcctcaagacaaagacatgtctattgttggctcatacatactaaaatgtgtcatagacactacataaaatgtctggtatctacagttatatcagtgtctttacactgggaaaatcatgacacacttattctcaagtcagaaataaatttttggaaaaattagacagtcatttaacttatggaacacgaaggacaatgaatacaatgaatactgaaataattacttagccaaattttcatagagccgttgcccagatggattttgttccatccctatcctatcttgggtctctgagtaccatcacccacgtttgatccagatcttcctcttcttcatgctaataactcactcagaatggcaggcccctagggct

SEQ ID NO: 479753 - DNA, 944 bp, Homo Sapiens
tgcctggtgaggcaggatttggccgagtctcgtttctggtgcccacgacgcacggtccagggtccgagggcggctgggccggcggactgggcatccagtgtgcctgcggtgccctggcgctcgctgtcgctggtctcccactcccttcgtctctctccgcgttctccttccctcgccctatctccctctctccgcctgctgcctctgccctcgactccctgcctctgactctgtcaatacagcgtggccatttacttccacctttacctgagggcgtgttggcgctaggaatgctcgagctgagacaaacttttacgccctcgcgagtcgaggggcgggcgggcgagcgcggctcccacccccggcggcggcagcggcggctttgtcactccgcgcggctccgcgcccgcctgagcctgcctaggggagcgatctcaaaacgaggggggtgcgagtatgcgattggagaatatgtaactaatagaagtatcattttcccccagtacgatctttcaaggaaaaaaaaatccattgaaagaattttcaaagtgctgtcttcgtttggagaaaaggcacaggctgcctgcggggaggggaggagggactcggctgtgtgccgcccgggagcggctcccgtccgctaggtggcagccggagccagcgattcctgcaagccccgccgcgggacccgctcctcccgcctgcccctcctcccgcgaccaatcaccttcaggattcaggaatcggggtctcggtctctctctctctctctctctctctctctctctctctctctctctctctctctctctctctctctccccctctccctctccctctcccctgtttctacttgtttcagtcagtcgcctttgattatcagttgccagcagcccttctcttggctccttgacacgagctccatataaggcagcgatctccat

SEQ ID NO: 479754 - DNA, 874 bp, Homo Sapiens
ttactgcaagtgatgaattgagtcaaccagttatctgagggaagcacattccagaagaaggacagcgagagccaagtctctgaggcaggaacgtgtctactcctctgtcagaggcgtttgaaccagagtaactccatcttgaataggggctggatgaaacaaggtgagacctactgagctgcgttcccgggagtttaggcattcttagtctcaggatgagacaggaggttggcagggttgatatcacaaggtacaggtcataaagaccctggatgtttcttacactcacaccatgcccacttagctggtcatatatttccttagaagcttcaagggccgaattctgacacaacctaggcaccgccagaactctctccccagctgaagatacttcgagggcggagttcactcccagccactgacaaagattttcaatgagatttttacctccagccaattcttcatcctttcttgtcattctttgaaaccgaatggtgccccagtcaatgttctctctgtttctccttaatccatccatagagttaatccttactgcatcaggttaaagattagtagtaagactctttttaatccactgatttgaaatttgcttctttcccaatatcagaggatataggagaaaggtctgaacatccatcttcaattaatttggttcaagtgatcttgcttctaggagatattcttcagtagtcagtgatgtggaatttagctgtctgctgcttttgttgtagatataatttttcctttctatttggctctttttgttcatatagttccatgtggctagggaagcctcacatcatggcagaaggcaaggaggagcaagtcatatcttaactggatggcagcaggc

SEQ ID NO: 479755 - DNA, 1000 bp, Homo Sapiens; identical to SEQ ID NO: 347159

SEQ ID NO: 479756 - DNA, 662 bp, Homo Sapiens
ctctggagacttccctgtgagagaaataagagccgcagacatagataaacatggggtttaaactatcagtcaatgcagatctcatgaagatgagaatgcagccaacagatgtgacccaaaccgcaccagacagggaaatcacaacgaggcagacaaaaagctatgtctctgtctggattgtatgtgatgggttggaaactgacatattacaatccagatttcactgcagcagctgtcatgttgctgatccacttgtgtatttctttcagctcactcagcctccttttgtggttcttcaaatgtggcgggatcaattgcctttgattccattgtcttcatcattcctcagcttccatctgccctgtagaagccggcctttggctgtggctggcacctgctgctgttgattggcagtcctctgggtgagtattcacctgggcagacacagtgccaactggactctggccatccagctcaagctgcctgctggggccgtggccctccctcaatcctgcacacatgaagacacaggcttcgaagagagacttcatctctcttggcaaaacttttttcggtccatcctgagcactactgatcttcctgagtagccattttagcattctacagggcatcttttgtcccttcaactctgctaatacagt

SEQ ID NO: 479757 - DNA, 1000 bp, Homo Sapiens; identical to SEQ ID NO: 347160

SEQ ID NO: 479758 - DNA, 1000 bp, Homo Sapiens; identical to SEQ ID NO: 347161

SEQ ID NO: 479759 - DNA, 765 bp, Homo Sapiens
tcactggcgcctcagcaggacgggcagccagatccgcggctttggagaaggccagcccacggtcgtccgactgaggcgacttgagcaagaccaaaggcagagccgcccgagaatgaaagcagcgaagcccgagtggcggtgcattctgggagttgtagtccctgcgagacaacgccgtcccgactccaccaggctctgcactccatctcccagccgaccccgcgccgcggaggaggcgagcttggtgatgagctgccccagcggtagggggcctggggcggagaagccgctacagccgcggccgggcgacgctgacatctggcatccctggggtctcagagacacgggtggacagcgacgagggccttgtggccgccgtgtgtacccgtgcttaccctctgtcctccctacaggcgcgcggcgtccgccatggaagcgcatccgaccgctggggtctctgggtgccgcggcctcggctctccggggcgatgagggactagaggcgccctgaggcccgcctgcctcccgcgctctggccaccccggcgggaaaaggatcgggcgggcgggcggtcccacagtgcccgccgccgtccgcgccagccgccccgagccgactgcccttctgcccccaagatgtggcacagcgtcgggctgactctgcttgtgttcgtggccacgctgctgatcgtcctgctgctgatggtgtgcggtgagtgggggcggtagccgcgaggcagttccacacgccgggtcgctgattcat

SEQ ID NO: 479760 - DNA, 1000 bp, Homo Sapiens; identical to SEQ ID NO: 246659

SEQ ID NO: 479761 - DNA, 682 bp, Homo Sapiens
cacctttttatggattcagttttgtgtcccccaaaattcatatgttgaaatcctaatcctagtacctcagaatgtaaccttatttggatatagctttgggaggacctgaggcagagctgtagggtgtaggggaagctgtggatgcttcctggttcctctgggtgtgaatgtggctgacgggttcagaggctgaggatacctcgccaggatgctgaggaaagaagccaggattttagtggttctgcactcagaaaccagggcacaagaacgcagaggcagatgccctagtggacagacgaccagggagggccagcggttcttctccatgcgtggacacaggagcggtcttctcttcatgtccaaactgagataccatctgaggccaatttgtggaatttgagaagtttgacttcacgatatccagtctcctcttggtactcagtttcacatacccaggacctgctgactttttaacactatcccttatcagataaattctgcaaggcaaggcccttatctgtttcacatttgcatacttgaagtaatgaagttcatgcctgaaagacaagcttatccacagttctgttttctgcagtttgagttgctcctggtcaaccttggtcttgttctcagaggccattcccagacccacagcagctggtatgatggctgcaggcctcat

SEQ ID NO: 479762 - DNA, 829 bp, Homo Sapiens
ccgaggcgggaggatcacgaggtcaggagatcgcgaccatcctggctaacacggtgaaaccctgtctctaccaaaaaaatagaaaaaattagccgggcgtggtgacgggcgcctgtagtcccggctactcgggaggctgaggcagaagaatggcgtaaacccgggaggcggagcttgcagtgagccaagatcgtgccactgggcgacagagcgagagactccgtctcaaaaaaaaaaaagtaataaagaaaattgagagcttacgtttttcttttattaaatatttccacatttatcttttatttcctactttttaaataacaatactccaaaggttaatgagctcgtcaatttggcgacgccattgaagttttggaatccggagccgtctttgtcttccagctccatcttttccaccttttgcttaggcagtcccccgagtcgtgtcaaggcgggcaccactagaagaacccgggatgaaacattttctcccgtgtcttgactctctcctttctttcaccgctgctttaaagggctgccagaaagccacaaagtacaaagcgaggcatttagagaccatagtagatgcaggtggcgagggaagacaggtggagaaacgcagacgggttcgtgtcggtgcagccactgctttggacccgagcctccgtcccgccgggggccggggtgctgagcccagcgaggcgcggactggggagcgaggaagaggagcacccgccagatcgcgccccctttcgggcagaatccgctcccggtccggtcccgattggcagaaaacgatacgagggcggtatacactcaacacgcgcat

SEQ ID NO: 479763 - DNA, 876 bp, Homo Sapiens
atgattatgaggcattttaataaggttttacgttctctgaattacagtgtttcaaaataaggcgtaactatgattcaattcacttctaaaacactttggatgacaaaactacgtagtacaaggcaggggccaattcctaaaccaacctcgttctcccacagaccttcctaaggaaactttaagggctgcgaaggcaattgagtctggactttgcgaaaggccttcctgtacggggccctggatttctcatctcatttctgggccaggaacgaggagtctttccctctatgattagggctttcgtagatgtaccgcctctgaaacgaagacaagacaaataataatgagttcactcttttcctcccttgtgaagttccgtggagacactcggtcccctgaagtggatgaagggcgaggggaggaggtctcaggatttttcctcgcttttcttagaagcaacaggctcaaaccaaacggttggccttgcttactcctgaagtcgagaggcttactccctggaatccaagtggatgtggagcccatggcgtcctctggcgctctcggtctcttcgacccctttttactgtgttgatgataaatggggcaggattcccctcctgcaccacctgcagcatcctgtccaggatccatctgggagctgagaagaagcaaagtgtcagggatcgggggttctcgggctatgctgagaagcaaggaatgctgaagaaggggcctgagggaagggcttatggtgatgtgggaatgggaatgaaaggactggaaaggggcgacagtcacttgggtgaaactgaaagcggcgacgcaccagtcccacaaacggtgcccaaatgtttctcgatttaggggctcagacat

SEQ ID NO: 479764 - DNA, 592 bp, Homo Sapiens
catagtcaaattccttgcatgtaaaattctctgggtataaagtagattgcctccctcttgtttttctttttcttgagacagggtctcactctgttgtctaggctggagtgcagtggcattatcacggctcactgaagcctttacctcccaggctcaagtgttcctcctgcctcagcttcctcagtacctgggactacatttattttttgtttttttttatttttttgtagagacaggattttgccatgttgcccatgctggtcaagctatctgccctccttggcctcccaaagtgctgggattataggcatgagccaccaggcccagcctgctttcttctgttttaccaagatgcttgacagtggatatataaaatgacaacttccctttctcatatgtggcactgagagatgggcagcctctatttcctttatcagtcctgtattgtgttcagtggcaaagccaggcttggtgtctgttccatctgggaacgccaggagtaatggtcccactccttgctgctgagggtacagcatgaatttgggcagcaccatgaaataaagcaaatgtaagaagatcctctatcagttgc

SEQ ID NO: 479765 - DNA, 604 bp, Homo Sapiens
tttctttctcctggggattgggattcatagatactaattagtctctgtttgttcttgaagtgaggctgggtaaacctggattacgttcccaaaaaagcagtgaaaacagctctgccgagattataaagcagctttgtagagagaagcagagatggaagaaccaatttccattactgattcagctacagctcccctttcccctccaaaaaccaaacgtgtcagctgtaggaagaagtgcggctctcctagcctgggcatagggactcgcctgggcatagataatgtacttgtggctctgtggttgggagtggagacaaggaactccccaacaccggtgggggagaagagacaaggaagttgccccagacaaggggctgggggaggggcatttcccaaaagttcctgtcaagagaccagtataccgggtggaactataagagttgtttgggtgtggcgggaccaggaagagagagagagatgcccagggagttggcaaattggggagaatggctccccggaatcgcccaggagccagagcggcagctccagggaccttgactccgacgcccccgggaagccagagctccacttccgcgtttggcat

SEQ ID NO: 479766 - DNA, 667 bp, Homo Sapiens
ttttttttttactagcgtcccctcttccgttcctgacaagcagctctttccttacacagtacagtgaggccagaagaacatggagcctgctgtcaagtccccaagtttttcaagtttccaaattcaccaagggaatggaagactaagagatgggctgggcaccgtggctcctctttcctactgtttaaaccccatggctcctctgtcaagtcccagcataatagagccgacgctctaggctcttgtcagagaaaacctcttcttccagaaggggtaagacttggcagttcccaagcacacattcctcacaggggcaataaatggtaaatctctcaggaggagagtgctgccccgcttcagggagctttcgtcaaatgccgacgggaggacaggtgcagccccgacatgtcgttcttcttcacagtgatgcatctgctcaagactcctgactcctgcccaccccaaacaaagctgtgctgtgtggcctcctgtttccgacacgttgagggagtacaaagaacttttcatcagctcaacggagcacttgggaggccagatgaggagagaaataagaatgaagttctgggatgagaaagtggtgccacaaattgtgagtcaataaaagggatccagatatcctgaaatacacgctggacaaacagtcttc

SEQ ID NO: 479767 - DNA, 486 bp, Homo Sapiens
ctattgttccagccagagacactcagcagctcggtagctgggatgtgccccctccgctgcggactggatcaattctgaatcccggtactgaaatgacagctctctggctgcgacaggtctgcgagttggtcgccgccagccccagcggtgggaactgaggatgcaaaaacctcccagacgcagaaaataccgctttcgggacgtgcttgggtttgagtagccgtgacgtgcaggcgaaccgcggccctggctggagctccgtggagcccccctcccgccagcctctcccccgccctcccgccgggactccctcctctcccaccccgcggctcccttcgccttctctctcacacacccgcccgcgcccccggcaggcagaactccaggaagtcgcagcggccgcgccgcgcgagccgagcctctggcgggcggcggggcgcaccgcagtatctcgctccctctcgcgcctccctcctcgctgggcat

SEQ ID NO: 479768 - DNA, 673 bp, Homo Sapiens; identical to SEQ ID NO: 347164

SEQ ID NO: 479769 - DNA, 944 bp, Homo Sapiens
cttttattttctttttattttcatgggtgatggcctgtatttgaatgagtaggatggagttacaagagtgtcccatgttcacgaaacagtttttgttttgttttttgagatggagtttcactcttgttgcccaggctggtgtgcaatggtgacagaacgagactccatctcaaaaaaaaaaagcacataattacataatttatattgcagtgtattaggtataacacacatcaagataaagtccccaaataaaacagatacaataatgaccacacatatataaaatgtatatgtaaacacaataactaaaagtttgtgccaaggaaagattggatcagggaatcttctggaggcaagaaaatcactaagatgtttcctttctttctaaaatctgctgggcaaatgttcagcagacagcttttttggacatgcgctgtcgtccttgactgcatccatcctgagctgcagggcagcactgtcactgtatgtcagggacacaggaggagggaggcctcagcctgtctctcctcctgtcctctcctttcccactggtgctgcccattggccaaatccatctggaagccagagggcggaagcctggtgatgcagtttgtagaggtcagcctcccaggcacagagctgagcagagaagggtgagcacatatcacgagggtccaaggcttcattcttgaagtcagcgagaccaagaacccactggaaggaatacattcaggacatacaggtacttgaaaggaactattcttcatgctgggcaccaaatcttctagtttatatgcatgtcccattgacagaatttctaaaaattgggaggattatttggtgcccagaaaatgagcaagtctctcagtgggtccagagtgctctgaatcttcattccgaggctctaactgaggcggctggctctcctggttctgcaccaagct

SEQ ID NO: 479770 - DNA, 637 bp, Homo Sapiens; identical to SEQ ID NO: 347165

SEQ ID NO: 479771 - DNA, 559 bp, Homo Sapiens
ttttatgtgtataatgagattaaacaactttgcaaattgaagtcactcaagaaagtgtaaaagctcacaaatttgaagtttatagttgaaagcttgcctgtgagttttaaaaataatcttaatttaatctctgattaccttcagcatttctttatgtccaatatacggagtgcttagaaaagtatgatctgtctttggagagctctcaagcctggaaggtgtaggatcctgatcaacatggtccacttctgacttctggattttctcttccttctcaaagctggtggtgttcaaaccacgttccaaagactctaggattccatgtaagaattgttttgttggaggtgcatccttgagattttgagtaatgtcatacatagctttgtcaccgaggcaaagatgagagtcttcctttttcctgctataatactggaccgtctccttccaaaccaagccctgcgctaggctttccattccattccattctgttttaattcattaccgtcatctcctgtcccattattctccacatgcccaaatctcctaggagtcaaaaaaa

SEQ ID NO: 479772 - DNA, 575 bp, Homo Sapiens
cgcagggacgaagcattccagtagcacttactgcagttgaccactcagtacaaattccttaatacatggacgaacagccatcatgaacactagattgtgtttcctggttcgtggaatgcagcttttccttagcaatttgatgttgtctctaggaatataaactctcaattctcctaaatataagcacttctgcaaacacagctccccagaattaattccagaattgtgcactttcaaagcaacagctgaatagtaaaccaagattcttagagatttaaagtgacatgacatcatgagcatgtttattattttggcacaggtaacagctaaaaaatgaaatgagattccataaaaggataccaataaaaggggggaaagagaacgaaaaaatccacaaaaatagctctaaaactctatagtcttttgttatatgcttactcatactttttctcccctgacctcctcttttgaaccttaaattcccttttgtgtcttttaaattctacctactcttccaggcccaattcaagttactacttatggagaacttaagcacaaataaaatgtcatttagg

SEQ ID NO: 479773 - DNA, 1000 bp, Homo Sapiens
cttcgtgacagagtctcgctctgccgcccaggctggagtgcagcggcgcgatctgggttcgctgcaacctctgcctcgcgaattcaaacgattctcctgcttcagcctcccaagtagctgggaccacaggtgcgcgccaccaagcccggttaagttttgtatttcagtggggacggggtttcaccatgttgcccaggctggctttggactcctgggctcaagtgatcggcccgacacggcctctcaaagtgctgagatcacaagggtgagccaccacgcctggcccggggctagattttattacagaagcaccaggtcttcagaagcttcaaagaagatattgtacactaaacaattggttaagatagtaaattttatgttctacttttttaccaaaattaaacagctttaaaaattatcttaaaaatatgtgtcttgctgggatctgcccaattcggattggcaaaaagactctgctcattaaaatctttgcattttaatgcaaagcattgaaaaccttgtctctaaaatcacaacctgtgaggcaccttgctgatttagaaagcacatcagagagattgaccctgagctccccttagaacagtgccccaccaggtgtggggatggcccaggggactcagcagagcaggttcaaatgaaagctccccatagctactaactgccagcgcttgctttgggcctgttccccctgggcaaggaccagccatccttccaagccgcgcacaaataccccctcccatgtgtgtccctcatcttcccacatgaaggaacaccctcctgctccctgaggcctggatccacagtgatggagcgtatccggatctccctgtgtgacaaatgctcacacatttctttgcttctctactagaagcatgaggtctttgagactatactagatctgtgtacagcttttgagggaaaaaagccctagtggcctactgttgctcaattggaatgtgatcaattgtgtttcccatgg

SEQ ID NO: 479774 - DNA, 1000 bp, Homo Sapiens; identical to SEQ ID NO: 347167

SEQ ID NO: 479775 - DNA, 1000 bp, Homo Sapiens; identical to SEQ ID NO: 347168

SEQ ID NO: 479776 - DNA, 1000 bp, Homo Sapiens; identical to SEQ ID NO: 161549

SEQ ID NO: 479777 - DNA, 432 bp, Homo Sapiens; identical to SEQ ID NO: 161550

SEQ ID NO: 479778 - DNA, 1000 bp, Homo Sapiens; identical to SEQ ID NO: 347171

SEQ ID NO: 479779 - DNA, 539 bp, Homo Sapiens
ctgcaggcagtacagagagcatggtgctggcatctgctcagcttctggtgaggcctcaggaaacttacagtcatgacaggcgagaacataactccctgaagatttgtctaggttgttgtatcaatcattttttcctttttattgctgaatactattccatggtgtgaatgtaccataatttgtttaaccgttcacccattgaagggcatctggttgtttccatattgggtattgccaatagagctggttgtctcatgagctcctcaacccattcttcatactgcagccaaagccatcttttcagaatgtaaacctgatggtgccactcctctctgatgaaatcattcaggggcttcacatttcctttattaacaaatacttgcatggcagttactgattgcagatactgttcttggtatgctgcgaatagtaactcaaaacttctccaaactgaagacaaagctttggtgggtaggttgtaagatgacctccaacggtccttgccttctggcattcatggcctcatcctcgtgtaatac

SEQ ID NO: 479780 - DNA, 1000 bp, Homo Sapiens; identical to SEQ ID NO: 347173

SEQ ID NO: 479781 - DNA, 740 bp, Homo Sapiens; identical to SEQ ID NO: 347174

SEQ ID NO: 479782 - DNA, 757 bp, Homo Sapiens; identical to SEQ ID NO: 161551

SEQ ID NO: 479783 - DNA, 541 bp, Homo Sapiens; identical to SEQ ID NO: 347177

SEQ ID NO: 479784 - DNA, 725 bp, Homo Sapiens
tttaggaagattgtttaataatatagattccttgaacccccatacagatcatctgattcataggtctgggttggggcctaggaatttacatttttgcatacttcttctggaccatgttttgagacctttagactcccatttggagagcctaggataaaaatttaggaattgttgaaaataccatccttagatccagaccggaggggctcctgccctggggtctgtgatttagaaggccctgctctggccctcccctggccatgttggtctccatgggatgaggagtctgggggctctaggggatatgccaaccttgagactgtgagcagacttccagactgtgatacagttctggaggttggaagtctgagatcaaggtgttgatggagttggtaccatgtagggggctgccccaggctgctgtcctggcctctgatgaattgctggcaatccttggcttgtagactcatcactccaacttctgccttcgtgttgacatggtgttctccctgtgtgcctgtctgcacccaaatttccctttttttttttttaaatgaacaaactccttcagagggggtggattgtatagtttctggcatgtgagctgcattccaggaggttaaggcattcctagtcacaggatgagataggaggtcggcacaagatacaggtcacaaagaccttgctgataaaacagcatgcgtaaagaagctgtccaaaaccca

SEQ ID NO: 479785 - DNA, 1000 bp, Homo Sapiens
tgccctcttttcctaccctctacccccaacccccgagctgctctcctgtctccttccaacactgttctctttgggaatatgcatgtccaacttcccaagcagtctgggatctggagtaagatgactcttggtttaatggagtttttccacagtgcttgcatgtgccccaagggtttggaaggttggagaactaacaaaaagcaaagcgccatcctgtgtcgtttcggcaggtctgtgttctgttaaaatatggaagaattaacagaagaacgaagaaataagggcagaaactccacaggggagtacttgtctaaccctgaaaaagttcaaggctgttgttcaaggtctgaatttttcccttgagatttgcttgtagtccttaaagtcatcttcagatctatctgatcaaggcagcatccgcggaaaattataaggtgggtggctgcactggagcctgtcctggctcaggggagccggtgaagagtgatttttttcccttggcgttgggggatcagagggggtgccctctgctatgcaggaagccctccttgcccactagatagttgtcattcctcaggagatactctgtgaggggccggtgtgttttctccatcttggcacttaccctcagaccctcctaaatacccgggagggccgtgtttttcatcggaggttgaaatggaacctccccctgggtgcccggggagagtaccttgggggcagcgcccctccttccggagggcagcatcccggcgggggcgggggctcggctttgatgccagggcaccttttgtccctggagacgctctgccagccaggtgcgtggagggagtgcagcccgccctccggggcgacgcgcggggctggggcgggccggcggctccggggagtggcggtcgggagcccgcgaacgcgggtgggcgccgtcgcctcactaaccgggcgcctccgggaaatccgggcggggtccgccgctcgcacataggattagcgtcctcta

SEQ ID NO: 479786 - DNA, 1000 bp, Homo Sapiens; identical to SEQ ID NO: 347179

SEQ ID NO: 479787 - DNA, 1000 bp, Homo Sapiens
aagtaggtatttttatctcaaattaacagttgaccttactagagcaaaagatagtaatttgagttactggatatgactcaaatttgggtaactagatacaaaccaaggtctaaaatctaaaacttgggcttttccagctagtacatcatatttagatttgaaagttatattttatttcattgcttttggcctaatgttgtagcctgttgagactgttttgaactttgattctgacatctatcaaattaattatccctccaaactttgggtcatccgagagagacatcaattttgctgagttggggggtaaagatggaggaaggatgttttaaagtagaaagagagcagcaggtggccttgacttgtgaggtaggcggcaaggttatctgcgcaaagtaaatgcaatctggatgttaagtggacgtaaaagtcgatggaataaatttgctgctaagaatgatcgtgtaggcaggtggagagtaaagaatagaaaggagttaagaaccaggaatggaggcagtgagaagagagagggtggtgtgggtggaccaaatactgctattaaggaaaaagagagggtggaggaaacaaacaatacagggaaggttgacccactcagcccttctattcagctggaggaagtcacagaaaaggaggctatattgaatggtaagattggagaagactggttagggaataggaagataagctgttgtctaaaaaacgcagtctccagtaaaaggaagaaattgggacatttttttaaaaccccacataggtacactggaaaacatgggccacagggataaaccttccatttttacttccaaccttaccatgtgctcacaaaaaaaggtgttaaatacatgtaagttttgacgaggttatttaaaagtgtaggatataaaccaagaatttttcacaccccaaaaccccgcacaaattaagggattacatatctgagtgacaagtacatacaaacgcattacttctagagata

SEQ ID NO: 479788 - DNA, 1000 bp, Homo Sapiens
cacgtgaacctttgggtttattttaaacaaaaataggatgagtctgctaaataccatgctccaacaccaggcgcggcggctctcacttgaagttccagcactttgggaggctgaggcaggaggatcacttgagtccaggagttcaacatcaacctcggcaacatagcgagatctcatctcttccacacaaaaaaaatatttaaaattagctgggcatggtggcctgtgcttacaggtgggaggctgaggtggaaggatcacttgagcccaagagcttgaggctgcagaggctatgattggcctaggtgacagggtgagaccctactcagaaaaaactaaaacacacacacacaaaactgcactgcagcttgtaggtttttcacctggtactgctacactccccaccacaaggtagtgtttctgggaggaggtcaggggtcaggctgctctctcctccctctcagcctgtccccggctcccagcacgtcgtgatgtccgaagctccatgcaggcattcatggccgggctctgttctctctggcaggtggccaaggtggaatacgtcaggaagaagccaaaattaaaagaagtccaggtgaggttagaggagcatttggagtgcgcctgcgcgaccacaagcctgaatccggattatcgggaagaggacacgggtgagtggctgccttcgtcggcatcggtgttggagaacaggtcttcagagccttgcttttggggtgttaggtggcccccttgagcgcaacgcttactgctgtgagcatctgggctgctgttgaaggattcgttgccctgctcccgggccagatgcctgcgggggagacggatcccacacctgcaggtgtccggtggggagggtggcccaagctgcggcactggcaggagaggagattcaggtctcactgagaggggctgggagtgcataagacacccaattcattagtgggctgcggggctgagctgagaagaatctgcagaagggcct

SEQ ID NO: 479789 - DNA, 1000 bp, Homo Sapiens; identical to SEQ ID NO: 347180

SEQ ID NO: 479790 - DNA, 823 bp, Homo Sapiens; identical to SEQ ID NO: 347181

SEQ ID NO: 479791 - DNA, 1000 bp, Homo Sapiens
gcgggcattttcccgtgatatccagctggctgctgccactgccatagagcaactctgcgagagaactcggccccctctcccttcaagtgttgaaaagagcaagaagtacaggctactccataggcccagtgcccaaggccctgatggagctatccaattctcactgttagcctgggcaccctccaggacaccaaacattctgtacttaggcagccctcaagaagaggcagtagaagaattaagcacactttccaggttaaaaactccttgtgttgcagatctcaggacaggccgaagctcttctggggagtatttatccccattaatgcattgtcatcaagatggggtgtataacatttcaggtcctggtgctgtaactcgcccctttaatcccagcactttgggagcccaagtgggaagactgtttgaagccaggagttcaaggccagcctgggcaacacagcaggaccctgtccattcatggcagaaggggaagcaaacatgtccttcttcacatggtggcaggaaagagaactgatgctgtagaagaaccgttcgaatggcgccagggtcagacaaaacgtaccccgggggctcagatggtggcctaaatccagctgaagagagagaccaacctccatgcagtcgggatgaagagttgtagaccacaaggtggaaatggctgttggccatcggagctcaaccttcatggagactggtgcgccactgccctctcaggtcaccagctggatgctgccctggagtagactagctgggagggttatgcagggtagggacgcagccaaatggagctgccaagaaccagagaaattactgaagatggtgtcaagtcctctgaaacagtctccctttccatagcccctggcttcatccagcctcacccttggagatcagcacgtgctgcaggcaggggatctaactgctggaggtcacattcatagtggcaaggctgggaatagacccatggccttggaattcc

SEQ ID NO: 479792 - DNA, 1000 bp, Homo Sapiens; identical to SEQ ID NO: 347182

SEQ ID NO: 479793 - DNA, 1000 bp, Homo Sapiens
tgtgattataattttaaaaatcatatttaataggatccatttattattaaatgaacattaaattacttaatgtataataaatccttaacacaatgaaaactcttaatgcagagtgagaccaaaatgaaggtattaactgttttcttcctaatccttgctttacttgttatttccaccagaccgtcactttatttgaaggatattgtaataacacaaagccctcagctttgccattagagagatcttccttaaattatctttgttgtaataaaggtcatctggaggaaatactggtctgaatacaataataaatgttaagctttctagtattttccacttttagacacaaattgaaagaatcatttataatgtcaaaaacacttttttctaactaatctattctatgcctaagacactactagcaattaaagtagatagatcaaatctaaatgtggagagaaaaagtaatttctacttatgtttaaacagatgaaagcatgaataaattgaaagcctgaaatattagcttgggggaataacgtcacttttggggagcaggagcaggatataccagcctttagctctacaccctccccgcaagaaaaaaatatatagatagttatgtacaaaccaaactagccctggcagggttcaagggaccatttaagaaactatgacaacacagtgaagacaaaaaaaaaaaaaaaaaaaaaagagagaaagagagagtgaaagaaaaaaaactagccatatagaaaaaacagctgctgaaatcagcatacctgagatgccagaaacatcttttttggctagaaacaaaaacagaaagggactatctgtatcagccacaaggtggaaccaccaaggccctcagtaacccactctggcagaagacactggcattttttgccactggagtaagcaacatccctttctgacagaaaacccagagaaaaagatgaagaggtaccatctcctcccacatcccttttccccacca

SEQ ID NO: 479794 - DNA, 1000 bp, Homo Sapiens
tgggtcatctttctttgtaatgcggaaaaattaactcatccgcacctgcctagtcccgagagagctgggcggcccatctggtctggctacaagtttgctgcggagagaaaagcctgctcactaaagcttccccactgcccaggagcgcggacctcgggtctgggcccggaagagggattaggctcagggcagcgcagccgactcgcactcctcagccagtggccacagtctggggctggaagcgcctgggccgggcggagggagggcaagcaggagagagaaaagggtgagggaagttgacctctacgggcggagccctctgcgcagcgggcaggaggcagcgggcgcgacggctcttttcacggcgtcccctacggcgtggtcgacccgagggaaaggcccgctcccgctccagagtccgaggaaaggagagagagctgagagctggtcttgcgcagagaccccagaatgcgcccctgaaaaacagaatcaaagcgcagtgttagggaggcgggagagaggagggggagggtggggagagggacacgaggcgggagggagcatgcgagggatacaaggtgacaagaggacaggaccccagtcggccggtcgcgacctccgtccccaggcttcagggggacgcggaggggaccctgagcccacggagcgcggggcccgcagcccggggggagggggtggcgcgatgactgtaagcgcaggtctgggctgcggaagtccagaggagggtgcatgcgctgcggatactgccgcgtccagagaaacgatttcgggagctggagcagtgaaaacgagtccgcagatggtccttctgtgcagtcccagccgttcccgcattctgcaccccctttcccagcctcaccccctcccttggaccacacgccagacccgcactctcgaatctccacccctcttcgtttaggaccctgcaaactgcaagaccggcaagagaatcgaaacgatcgatgagagaaagaattac

SEQ ID NO: 479795 - DNA, 1000 bp, Homo Sapiens; identical to SEQ ID NO: 347184

SEQ ID NO: 479796 - DNA, 749 bp, Homo Sapiens
taaaatttcacattcattacttactagcactgtgtccttggaaaacgtacagtttcatcacctgtaaaacaagggcaatggtattttcctcctgagcttgctacaaaggtaaacaaatgcctgacacagagtgagtctgaaatacaggggccatataagaataagcaaacaatgatcagaggtcaagcaacttgcccaagacaccaacaaataagagccccatagcctggactacctccatgacagtgtgatgatttttgcaaaaagtaggcatgtctctatacctctgagtctttccaaaacaatttaggtaaataaatataaaacaggaagacaatagtcactatgataataacagacactgcaaaattgacttatctcccccagaatgggccgtctttcctagccagcatcattaaggccagctatggattcagcaacagcagcttcatttctcttcctggcttcatgtggattggttttccagtcgatctgtgacactaattctcctctattaggagctccgtgagtcagtggcaataccgaggctgagtcatgttgggtaagcaatgatgcagtccagcaatggttcttgtgcaacattaccctgtagttttctccaatcaaaaacttctggcactgccttttctcttctaaacctggttctccaatcctgtcttccttacagtcagttcccaacatccttcttcaaagcagggagatggacatgctgagcttcaacaaatagt

SEQ ID NO: 479797 - DNA, 1000 bp, Homo Sapiens
gctttcaatgcaatttatttcatgctcattggtctacaagtctgctgtggctttgctatcgttggctgggctttgcagggtcatcctggcttgattgtaggctgctgttcaggttcaggtttgctccatatctctcgttctgaggcccaggcttaagggcactgattgctcacagtattcttttggcagaagcacaaaagggctggaagaaatttgctgggtcttttaaggctttgcctccccactggtacagagtcacttttcactcacattccattgactacagcaagtcaaatagccaaatccagtgatggtggcctggggaaatcttatggggaggacagtagggtgaatatttgctgaataataatctaccacagcctcctaattgctcttcctgttctttctcttgtgcttttcagtctgttttcaacatagaatacagaatgttccttttaaaacacaccaagatccttctgtgcgaaaaacccatcaatgactgctcatttccctcagagtctatacagcagtctacaaagccttagtcactcctgcatctggtcacttttctggcttcatgttctactattgcctccttcctctctgagtatcattaacacaggcctctttctttgctaagctggaacaggccaggcaaattcctgtctcaggcctttgcagttgcaatgtacatatctgaaacattattctgcccccccccacccccagttgtctctcatgctgttcagatctctgctcaaatgtgaccttagtgaggtcttccaagagtaccttatttgtaatttcaaactttttgatactttctggccctcttctttgcattacttttctccagagcacttactatactttgttttatttattgtctgtctcctcccactaaaatgtgatatccaggttctaagggttctaaggatgctgttggagaaacagacttgggaaagtactgctccaagctcaagctgctctcactaatgat

SEQ ID NO: 479798 - DNA, 989 bp, Homo Sapiens; identical to SEQ ID NO: 161553

SEQ ID NO: 479799 - DNA, 1000 bp, Homo Sapiens
gttggaaaagattacgttttatttgggaaatactgaatttgagatatcagtgggatagcaagatatctcatttatatgtagtagtaaggagataagagagaaaacaaacagcaacagaagttcaataattcatcatttcaaccttgagaaacagaagttgtttcttgttcagatattcagatattttattaaagaaaaaaggatgctttgaccttgctggaatctgtctgcctgacccattttaattgaaacttacctcagaattttgttttgaacttccaaggaagcaaaagaaaatgaaaatgatctaattttgggtacctacatgaatcagatgtttgccagacattttacatatatatttcacatggtcactgtgtctcatggaggttgagtatcttgttcaggataacacagttaagtagcagagaaagaagatgaaaactcagttccaaccagctccaaaacttggattcttttcctgttacaatgtgacaattaactaacttcaatttcaacaatccatgctgacatgcaaattggcattatatattcatgtgttacttcaagtccttctgctgcaacagtgcttaaggcacagtgactgtggtgggaattccagaccccacactaggcaggttgagttgcaaaccattctgtttgaatgatgatgaatgaattccatcagggaatacttaatgcagtttgaccaagggaggtattatttaaagttgtttatttcatttacaactccttcacaataatggaaataggtaccttctaaatgtgctaatggatatctcagatccagaaacgtttctcgaggttatggggagcttttttccctaagtttactcttaagcacaacacacacttgcatgtccctttatattgctgggtacagctttattctatctgctttctccttgactacccatgttgttaatatggttcctgcatccacacgtgatgctttggaggtggcaagggctccttgact

SEQ ID NO: 479800 - DNA, 910 bp, Homo Sapiens
tcatgctgcctcgcgcacggccggggaccttgcgggggcccaaggacggggattccaaggcgcctgggcgcgcgctggggcgcaagcagccgccgggagcctgaaagcccgcccctcgcgccgccgcggcaggccgggcgtttctatggaaacggggcgcgcgcccccgcggtcaatgcccgaggcagcctgagcgcggctggggctcggaaagcgccaagcaggcagggaccgagaggggtgatggcgcgcccacccctgcagagccgcctgcgcggttgtcccgcgcgtccctgccggcgaaggctgtgagaagcaccgcggggctacggcgcctccatcctctctaacagccgcgcttaccagacagccagcctccagcgctgctaggctactccgagcaggggagaaaagacgccggtccgccggggaccaggagggagacgtgaaaccagaggcccgggggccccctctccgcctgtgcgacttgtagtctcgtaccagacgcgtccgcttcactgctgaatctgaaaacgtgggctcttgagagctgcccttggaaggagctgtgctttctgcctcatctttaacttttcgtttattcagcaaatatgtatcaagttccgacttcgtggaagagattgtgttagacactgggagtaatagaaacataattaagaagcaggggtcccggacctgaagggcctgagcgtcgggttctgaaggctgagaagttcaagagcaagtgctggcatctgatgagggccttcttgctgtatcatcctacggtggaaagggtttcactgtatctcccaggctggaatatagtggagatcatggctcactgcaaccttgacctcctgggctcaagcggtcttcacacctcagcctccccagtagctgatcctac

SEQ ID NO: 479801 - DNA, 1000 bp, Homo Sapiens; identical to SEQ ID NO: 347187

SEQ ID NO: 479802 - DNA, 702 bp, Homo Sapiens
aggccggccacgccacgtgggcgatgaagttcgtactcatcttattcaaagctcataggttagggatttttcaaaggcagtttgggggaaggggtgggggtggacaggtaacaggtgcttgctgctgagtggttggggcagagatgaaatcgtaatgggttgaagctgtcctcctgttgggctgaattgcttctgggtggagccataaggtccaggtggagtcatgggtgtcagacatgcaaaaaacctttgacagccccaagctgggtcttcatcctgagtctcaagatgcagtagcctcagtgaactcctcagcctccaagcgttcctggggtgatcctcttggtggggcttgtgaatctgggagcccgttattctgtccttctcatgtccactagcagcaacaggagaagcaaacagggcaggatctatggcatgggcagggtagatgcagctcctcagatgaaccaggtgaacacagagcaccaagactggctccattagataagatgttgtggggtacaagccagaagacataggtcagctgtggcaaagcatttttatttaacatgttttccaggtcttcaatggaacataaaaagtttaggagagagaaatgtccccttaaacattttttttcaatgagagaagggaggagtcaaggagtagagttggtcggccacatgaaagctcccttcagag

SEQ ID NO: 479803 - DNA, 1000 bp, Homo Sapiens; identical to SEQ ID NO: 347190

SEQ ID NO: 479804 - DNA, 1000 bp, Homo Sapiens; identical to SEQ ID NO: 347191

SEQ ID NO: 479805 - DNA, 1000 bp, Homo Sapiens; identical to SEQ ID NO: 347192

SEQ ID NO: 479806 - DNA, 968 bp, Homo Sapiens; identical to SEQ ID NO: 347193

SEQ ID NO: 479807 - DNA, 701 bp, Homo Sapiens
tccaggaagtgtctccctgacggactgggaagtcatcttttttgaaggcatttggccagagcgagaggcatccaggcccctgagaaacaggggaggcagagccagagggaggagagagtagaggccagagcccaggcaggatacagcaccgtgccaccgccacagacataaggggtggggttcctaaagggtggcttgtccagggaggccagcgttccagtgacagggactgttgccatctcccattcccggcttcctcttgctgactgtatcgtggtgtggcttcatttctcagagaagagccgtgaaaagatacaagcatcttctctggcgtggatccgctgctctcctgtgggacaaagagttcctctggggctcttgttctcggctgcagtgtactcatcttgatccccaaccaacaccgtccgggcaggcctgaggctgggatcccgtgctgcttcccccgtcccagcctggggtttcctcatcgtggtcggccctttgcgactcctggcatccggagacgttcccgtcgaccccgtggagaggtgaggccggatcctcagagccccgacacccaagcactgccacagagggctcctgctttgccaagcctcggggactggtttctaagacaaccatgggaaccactgtgacgggagaaaccgctcccgcctcgcgcatgcgcattggctgagccg

SEQ ID NO: 479808 - DNA, 683 bp, Homo Sapiens; identical to SEQ ID NO: 347194

SEQ ID NO: 479809 - DNA, 1000 bp, Homo Sapiens; identical to SEQ ID NO: 347195

SEQ ID NO: 479810 - DNA, 1000 bp, Homo Sapiens
caacatatcaagctgggtttcttcatcttctctttttctcttcttatctttgctctttttcttcttactgccatttattctggcatcttcatgaggccagactcctcgagagggttctcaagggcagtggcttcagctcactccttgatactttctttccatctcgcctaacaatatcaaaacttctgtttatcacggaggccaggaggaaagctcaatatttgcatgtacagtcaacctcaggcaaatcaggcagaggcctggagagatgcctcaagggacccaaactcgtgggtacggggtcacgggtcacccgcccgtctatcctgtttccagggtcgtccgcgcaggaggctgcccctctctgcacaggcgccaggaagggcggtccggcctccatccagcccagacagggtcagagcgaagcctgggaggccacgaagccggctctccgcatcacggcttccaccggattcgcgggggtggagtgcgtccgaaaagaactgaggaggctcccgccggagctgcaggacccagctcttcacctcggttcccttgagcacaagcttggtagacttcacataagaatactaggccatggctccgggagacttctgcgcggagaggctgaagccggctcaggaagagtatgtgacctggagcagcaccagggcggggaggaacagaagtggaggcgaagtaaacactccccgacagcgtaggtctgtccagaacccgcctccgtgcgcatctgctccctggcgccctctcgaggagcccctgaggattcgtgcctcccagaggtggggaaagcccgcccgaggcgccggtgctgacggtggcggggctgccgggcacgctgtggaactgcctcccgctagagctgcgggctggcgacggtcccgtgggggcgggaagcggctcagggtgccctcgccggcctgcggcggcgcgtctgggagcgcaggccactcgtgcgcgggtcactcggggctgtgcc

SEQ ID NO: 479811 - DNA, 1000 bp, Homo Sapiens; identical to SEQ ID NO: 347196

SEQ ID NO: 479812 - DNA, 617 bp, Homo Sapiens
ttttcagacatatttatttattagtttgtcagatttaagatttgagcccatatttaaataataaaatcaactggatgatattttctttctttgttgcgaatcagttaatgtagcagcaatatttgttgatcagaagtctgggttaaatcctttagtgagtccatcctgaccaggtgccacatgtgccactctgccttctgtagtagaattggaaggcaacatttcagttccagtgaaactatattgcctttatttggaacatctctaaattcctctttcagaattttcttctgaagtttactttttattttcacaggtagaaagtcactgccctttggagaatagatgtttaccttttccagaaacagtcggttctggtttaaacagcttatcaaggaagggcactgaagagggtaggaaagacagtcttgaattgctgacaccacccctcctccatcctccagcagcagccgcgtggtgaggagagagaatctgtatgcaagcagacctaaagagcgtttgtgcgtctctctcctcttggctcgagtcacaaccccataacgtaaatcaatatcacttttgaaaaaggctttcgctgttctcagcagcgtccgcat

SEQ ID NO: 479813 - DNA, 869 bp, Homo Sapiens; identical to SEQ ID NO: 347199

SEQ ID NO: 479814 - DNA, 1000 bp, Homo Sapiens
ctaagggcccccaggagcgggcgcaaagggcggcgggcccgcgggccagggccccgcagccagcaggctgtcgagcgtggccagcgcccagtgcagggcggccccggcgtgcgccagctgccaggtgagccaggcgcgctgcgaggcgctgggctgcgtgccgccggcgggccccgggaggaaggcgccccccggggcccgaagctcgcccagggccacgtccagcccgcccaggtggttgacgactcgcgagagcgggcacgggagggagacccaggcttctggggagtggcgtcggcggcgctttggggaggtgggtcgctcctcccggacgtcaacgcggcgttgcgggccgctcgtcctccctggcgatctaggccggtgctttggctcctccaggcgcctcgggctgggaacagaacctccgcgccccatcctctcggcccctccctgcatcctggggactccggtgccccgtccggggtgccctcccctccgcccattcaaacttgaagcacatctcatccctccaagctcccagcccctaagcctgcctcctctgcgctcgtgggggcgtcgtgctctgccggactcgggcttgtcgtggcctcgctctccggctggggctggtcgtggcttgaccttccgccctcggtttccggtttctctgccgggactgcgaggggagccgtcggggcttctccaccgtttgtgcctggacgcagaggcctcccggctgtgcccgctggaagctcgtcctctctcagaaccctcccggttcttgcgggtctccatcttcccctgctttccacagggaggtctgtcttctcccgtctcctcaagggacagcttccccatccaggaaagagctctgtgttcccggcgaggaggctctaccctctggcagcctgagcagcgcaagcggggaaatggccggttgggcgcagccggcgggctttgatagggagccaggaccccctgctgggtgttcccaggagga

SEQ ID NO: 479815 - DNA, 1000 bp, Homo Sapiens; identical to SEQ ID NO: 347200

SEQ ID NO: 479816 - DNA, 1000 bp, Homo Sapiens
aacatcctggcagattacacgacaaaaagacaggaaaatcagtggaatgagcttcttgaaactctgcacaaacttcccatccctgacccaggagtgtctgtccatctcagcgtgcattcttattttactgtgcctgataccagagaacttcccagcatacctgagaatagaaatctgacagaatattttgtggctgtggatgttaacaacatgttgcatctgtacgccagtatgctgtacgaacgccggatactcatcatttgcagcaaactcagcactctgactgcctgcatccacgggtctgcggcgatgctctaccccatgtactggcagcacgtgtacatccccgtgctgccgccgcatctgctggactactgctgtgctcccatgccctacctcataggaatccatttaagtttaatggagaaagtcagaaacatggccctggatgatgtcgtgatcctgaatgtggacaccaacaccctggaaacccccttcgatgacctccagagcctcccaaacgacgtgatctcttccctgaagaacaggctgaaaaaggtctccacaaccactggggatggtgtggccagagcgttcctcaaggcccaggctgctttcttcggtagctaccgaaacgctctgaaaatcgagccggaggagccgatcactttctgtgaggaagccttcgtgtcccactaccgctccggagccatgaggcagttcctgcagaacgccacacagctgcagctcttcaagcagtttattgatggtcgattagatcttctcaattccggcgaaggtttcagtgatgtttttgaagaggaaatcaacatgggcgagtacgctggcagtgacaaactgtaccatcagtggctctccactgtccggaaaggaagtggagcaattctgaatactgtaaagaccaaagcaaatccggccatgaagactgtctacaagttcgcaaaagatcatgcaaaaatgggaataaaagaggtgaaaa

SEQ ID NO: 479817 - DNA, 1000 bp, Homo Sapiens
tcagtgtaaactcctctgagagatatcaggaaaagcaggaagaagcctctgggacccttcgggaggtaactcctcttcgcagcggggcgcgctctcccagtccctgcagccgccgccgccctctcctgagcttcctcgagcggacgccaggcaagggcgggggtcgtagcggggcggagcggggctttgtccacggaccgcgcgaagaggcctcagggcccggcgcgggcgccggagggggacttgctcgcagggggaacgcgaaggttcctcagtctgcgggacgcagagctccgtggggccgcgagccggggccggggaagcgactctgcctagggggacgtcgcgggcgcggggcacagggtcctgcggggctggagggctacaggctgcggcgcgcgcgagccggaaggccggggatcgtgggttctggggccgcagcttcacgggttcgtctcccccgcctccccgggggagcaggatgtcagggggtcgcccccgcccgggagacagggtgtcaaggggcccccggggacgggggggtcccttggggatgcgcgcgaggaggcgccgtcccttcctagcaggggtccctggggacccgcggccgcctcccgcgcccctctgtcccctcccgtgttcggcctcgggaagtcggggcggcgggcggcgcgggccgggagggggcgcctcgggctcaccccgccccagggccgccgggcggaaggcggaggccgagaccagacgcggagccatggccgaggtgttgcggacgctggccggtgagtgcaggcctcggccccgggtgcccgcgagggagccgctaccgcagggaatgcggggtgcacccgacagccgggccggggtgggggcgctcagggctgcgaggcttcgggccggccgccgccccagcctccgagaccctgcgtcctggggagccggcgggcaggtgggcttggccgcgctgtgggtgcctgggacccgcagggaggatgggcgc

SEQ ID NO: 479818 - DNA, 892 bp, Homo Sapiens; identical to SEQ ID NO: 347202

SEQ ID NO: 479819 - DNA, 1000 bp, Homo Sapiens; identical to SEQ ID NO: 347203

SEQ ID NO: 479820 - DNA, 717 bp, Homo Sapiens; identical to SEQ ID NO: 347204

SEQ ID NO: 479821 - DNA, 676 bp, Homo Sapiens; identical to SEQ ID NO: 347205

SEQ ID NO: 479822 - DNA, 1000 bp, Homo Sapiens; identical to SEQ ID NO: 161554

SEQ ID NO: 479823 - DNA, 1000 bp, Homo Sapiens; identical to SEQ ID NO: 347208

SEQ ID NO: 479824 - DNA, 638 bp, Homo Sapiens
ggaagtctgcagtctacaagagcctactatagacattctacaaccaagcagaatcatggaacagccgacttcaagcaccaatggggagaagaggaagagcccctgtgaatccaataacaaaaaaaatgatgaggtagcaggaggcaccgaacagggtcttagcccccaaacagagcttgcaaaagacaaaaacaatagaatatctaacaataatagtgtattactacaggaagcatacgaaaataaattcaaatcaactggagaaggaccagtcccgagagaactccatcaatcccgtccaagaggaggaggacgaaggcctagactcagctgaaggatcttcacaggaggacgaagacctggactcatctgaaggatcttcacaggaggacgaagacctggactcatctgaaggatcttcacaggaggacgaagacctggactcatctgaaggatcttcacaggaggacgaagacctggactcatctgaaggatcttcacaggaggacgaagacctggacccacctgaaggatcttcacaggaggacgaagacctagactcatctgaaggatcttcacaggagggtggggaggactagtcaaacatggagaaaccaaattggacaaatcctcactac

SEQ ID NO: 479825 - DNA, 1000 bp, Homo Sapiens; identical to SEQ ID NO: 347209

SEQ ID NO: 479826 - DNA, 1000 bp, Homo Sapiens
tcaatgcactgaaaagaagcttctgagcaccatcgcctcatcctccagcggccccagctccccacctgcagcaaacacctgcacacaggtcccccacacaccctctggccctgcagtcccatcctcagggttgtgcacacaggtgcccccacacaccctctggccctgcagtcctatcctcagggttgtgcacacaagtgccccgtacgcaccctctggccctgcagtcccgtcctcagggttgtgcacacaggtgcccccgcacgcaccctctggccctgcaatcctgtcctcagtgttgtgcacacaggtgcccccgcacgcaacctctggccctgcagtcctgtcctcagggttgtgcacacaggtgcccccacacaccctctggccctgcaatcctgtcctcagcgttgtgcattgcaggaaacccgctttctccccttccctgggttgatgatgaccgggacagtcacgcttggatgaaaggtctccctggaggttgtcttcaccataggccggggtcccggagtgtgcggagcgatcatggtgggcactgatctgaggagaacaggccgcccggccgaggagaggggcctctccaggtgagtcctccaggcggactcgggcgtggcccatgctcttcgtgccgtcgtcaagttcacctctcgacagctcagagtcctggttcccaggcccaggtactgggacctgtgtggattccaactgtagagaccaccctgtggacgctgctccatccagctgaatctccctggtactcttcttcagtaatgcacctggcaccgagggggcggtgcccgtgacagtggcagtcactctgaagtgggaactggctctcccgtgctgcaaatgcctctggagctcccagcagtccccacgctcccccatgagcgggtgagtggtgaggccggagaggggagtcacggcagcctgtgtggtgtgtgtctggtgtgtggtgtgtgtgttagggggctccctgcag

SEQ ID NO: 479827 - DNA, 330 bp, Homo Sapiens; identical to SEQ ID NO: 347210

SEQ ID NO: 479828 - DNA, 1000 bp, Homo Sapiens
ctacaaggagcaggtgcgctgcagggagcaggagcactgaaaggagtgggagcacttcaggtaggtgcacagcaggtagcaggagcacagcagggagtgggagcactgcagggagtgggtgaactgtatgagcaggtgcacagcaggtagcaggagctctgcagggagggggagctctgcagggagcgggagcactgcagggagcaggagcactgcagagagcgggtacacagcagggagcgggtgcacagcacggagtgggtgcacttcagggagtgggtacacagcagggagtgggtacacagcagggagcgggtgcacagcagggagtgggagcactgcagggagcaggagcagttcagggagccggtgcacagcagctctgtccttagatagaagcccgactgggagacccgctcctcgttcccctgctctcaaccgaggcccagccgacgtccctgcggcttctgccttacatcccggccctgcttcccgctcagcggctttcaccgctgcctgcctctccctgcggcctggctgaggagcaggtgggctccgcctcccattagcagcattgcctccgtccagcacaaagaccaagacttgtctctgaaaagcgtccaggaaggttttcagcaaggcctgtagagacccagcggccagcagggaggtgacccagatcctccctgcagcaccagccatgtggtccatagaggaggcactcaaattaaaccatgagaactttctcagctgccccgccgcgggggccttcccaggcgagtccatctccagaccccgagtgtctgtggccgccaccctctctgcactcgcatcacccccacctctcccatccctgctgcactcagaagccactctggaaatgcaggaggatgctgccccttcctcgctgtgctctgccttaattcccgcatctgtgggtcccttggtcccgtgtctgtgagtcccctggtccatgctgactccgcatctgtgggtccct

SEQ ID NO: 479829 - DNA, 300 bp, Homo Sapiens
tcatcggaaatgccaggccaaggtaaggggccgcgggctggcgggcccgggaggacttgggacaggcctggctcggggtcccagattggagcgggggcgccggcggggcgggggcggtgcccggggcgtccctcctcctctctttgtttatgcaaagcgcctgggcctgaggctgactttctgggtctgagccctggaatcctgcactgacagctctgggccccctggggactccaggactgtggggccacagggcatgggccatagagtggcagggggccctggctctccctggcacat

SEQ ID NO: 479830 - DNA, 1000 bp, Homo Sapiens
ttaagaacagacagaagtcggcttccaaactctcctcgaaagcgtcccctccccaaagagcctagacctgaggccgcctcttcccccgcacaagtatccacactccccacctgctactgggtacgggcgggtgaagcgctccgacccttggcccctgagccagcagcggccgcagagcgctgagaggggaccagcgggactggccgcccgccctgctcgggccccctcctctcgcttgcctttctccttgctcgctgcctccgggctgctccagcgggggccggacagggcagcggccgctctccgcgacgccctcgcgccccgcatgcacacctccgcgggcccccacacctgcggcgccgccacaaagttccggtgagcggcgtgcgctcggaaccccggaacctcgcctccttccgcgcccccaaccgctctcccccgaaactttccgccaagatggcggcccccgagctggcctgccgcgctcccacgtgaccgctttcccggcgctctcagccaatgggaagtgaggaggcggctcgcgccgagccccgggctccccgcgctgctaccttcgggttggaagggggaggcgggtcgggggagggcaggggaacggaaggggtacccggggagcatcctaagggaacctcttcgcttaaaagggcggccgctgaagtggctccggagtcgcgccctccgaagctgagccgccctcggccagcgctgcaggtttgtttcgtgcgcacctccgggcggaattaccggccggctgggaccccgctcccggtctgagccacccaggttatagaaggggaatctcgggaagctttccaagtcactgcccacgtcttcgaacttcctcggggtgacgaggacctcccaaaagactgggggccccacctcatgatttcttccatagtttagagaagatgcctgcttttcttgtggccaagccatgagggtcactgccctatggacgatggaagacataacagaa

SEQ ID NO: 479831 - DNA, 1000 bp, Homo Sapiens
ttagtaggatctacccgagggggaggcactccgggctccgcgggacgagaaggcagccgagcccgcacccgagcaggagggaagcaggagccgcagcgtggccgccgcacagcttcgggggtcccccgacttcccagctgcgagtgtggaatttctcaggagaactagacagaagcccatctctgggcagcacgtctgcggctccttaaagaactgggcgcggtcggggctcgccccgcaccgtcctcgaggccccgccgccaacccaccccaccccaggaggccgcggccgcgctcatccatcccccgccgcaccgtcaacgcgcgtcctgcggggcggagagatcggggtccggtcgtccccggggggccccagagccaggtgaggggccccgccgccccctgcccagcggttcccacgacccgcgggtcggccgcgccctgcgcaatgagcgcgcggggcgggacgctgggcgggcgccggacgctgggggccgggggcgggcccgggaccgggctgggcggggctgggcggtgctccgctgcagtcgctgcgtctccaaggtaagcgggcgcggggctcggtcccgcgggcgcggcgcggggggcacccgggggcggagacgtcggccgcgccagggacaggtctgtcaccgtctccgggccctgtgcctggcgctttggcctttcttcgcggccacggacgcccctgcagcccttccctccagaccctccccagctcgggactcgaaccgtttccctattcccaggcaccaccgcgtcctggcaggtggggctgtcagaccgccccccgcagagcctccagctgccccgggtcttggctactgtccgcgggcctgtggcgatggagaggcgctgccgggacaccttcccgcaccctgttttgataggggttgggaggctgctgttttgataggggttggggggctgctgttttgatggggtctgggggctgctgttttgatgaggggttgggggc

SEQ ID NO: 479832 - DNA, 1000 bp, Homo Sapiens; identical to SEQ ID NO: 347211

SEQ ID NO: 479833 - DNA, 717 bp, Homo Sapiens
tcaggccacgagaacacctgaaggccccggccagcgtcctcccgtgaagacccggaccggcgtcgtcacccgccgcgcaggcctaaatctcaggtcttcaccgtcatctcccagcgatcgcagggatctcaggcactgaccgcgcccgtccctgcgcacccgagccccaccccacgcccccacgcccccacgcctccacgcccggcactctggacgcgcgcggacggaggggcagtgcctactacgcaggcgcacgctgcgggcgacaggaccaggcagcaacattgccacgcggatccgcgccggccaatcagcatggccaggggcggggcttccctgaggcgcgccgggaggcggcggcccacttccggcaataaccgcctggtcgccgtcaggtgcgggcccaggtggccggcgcgcccgttgggcactgggggacgcgggcgcgtcaggtgaagactgggggccgcaggcgcgcgggggcggcgggcgcgtcaggggaagacatggggtcgcgagcgcgtcaggtggggacggggcctgtgggagggtcaggtggggaccgggggcctcgggcgcgtcaggtggggacggggttgtcgcgggcgcgtcaggtggggacgggattgccgcgtgcgcgtctgctgaagtctgggtccgcgggcgcgtcaggtagggacgatgggccgcgggcgcgtcaggtggggtctttcccat

SEQ ID NO: 479834 - DNA, 1000 bp, Homo Sapiens; identical to SEQ ID NO: 347214

SEQ ID NO: 479835 - DNA, 1000 bp, Homo Sapiens
aaaatctccttatcatctacctggtaatatgaaaaacacatatctttcattcattcctttcaactgatgaggaaactgaggcattgggagttagtaaaagtccacattgagatatgagacccaccactggctggacacagtggctcacacctgtaatcccagcactttgggaggccgatgctggtggatcacctaaggtcaggagttcgggaccaggctggccaacatggtgaaacccccatctctactaaaaatacaaaaattagctgggtgtggtggcaggcacctgtaataccagctactagggaggctgaggcaggagaatcgcttgaacccaggaggtggagtttacagtgagccaaaatcatgccattgcactccagcctgggcaacaagagcaagactcttttcctggatacaggtcttgataggtctcttgatgtcatttcacttcagattcttctttagaaaacttggacaatagcatttgctgtcttgtccaaattgttaattcagcttaactatcattcagctcaggaagatgactcagggccttatccataccttcaagtttgctcttagcaagtaattgtttcagtatctatatcaaaaatggcttaagcctgcaacatgtttctgaatgattaacaaggtgatagtcagttcttcattgaatcctggatgctttatttttcttaataagaggaattcatatggatcaggatgtttgtctttctttgtatcggtgctcagctgagtctgcagtgcttcagaggcagctttcattttataaaaatctatgatttctccttccagttgttttttctcttcctcgagcttccttatctcctcctgttgaatcattttaagatgctcgaacttgtcctgcagctggctcagactcttgacgctgccctggctgccccaccagtgcttctgcccgagagtcacgtgaggctgagagtaggggcaggggcagcagtggtgccagttggggggc

SEQ ID NO: 479836 - DNA, 1000 bp, Homo Sapiens
ctactcttccaagacaagtaaaaatgtataaaaatcttcaacatgagactggaaaaaagggtatgggatcatcaccggacctttggcttttacagctcgagcagagttgaactccctcattttccgttccccagcattggcaggttctgggactggtggctgtggtggctcgttggtctttgtctcaatgaagaacaccaaattaacacgatccccgtgctgccctgaggaagttgaagctcctcgctgcttctggcacttcagcgggaagttggttggggcgggatcgcgcgccctctggtggcgccatggttcagcacagacgctcttgctcacagtttctcggcggatgtgcgccccctcctggctgtcctgaaatacctttcctcgggcagcctcggggaccatgaagccacagcttccccagtcgttcctgaggagctgaggagaaggaggctgggtcgtccctggccacggtccccaggtgttcctagagagccagcggcgtctcccgagtgggtcctgaggaggaggaggctgggccctctcaggtgtccctgtagggatgacggcgcctcttgcgtaggtcctgaggagacggctcggctccgccccctggagccgcaggccgtctgtgccggaacccgggcgccgcttgaggttctgtgaggcggcatcgcgccccctgacggccgtcgcaggcggtgcaggatgctcaggtgctcgcggtcgagctgtggcctcgccctgtctgggactctccacatattgcgtctgagtcactgaaggaaaagaatgtggggtctgtttgctgggactggacacctccataatcacatgctccatgaaatgcaggcaggagatctcgctttctacctctgggatgggagtgtgcagtttcagaatgagactagcccacacaactgaccagatgcgcttcatggcaaacgcgagcagatgaaggtcatgtaggagacgaaagaactcgctccccaagccc

SEQ ID NO: 479837 - DNA, 882 bp, Homo Sapiens; identical to SEQ ID NO: 347215

SEQ ID NO: 479838 - DNA, 1000 bp, Homo Sapiens
tagggtaatattgatcatttattcattttccattcattcaacaagttgtagagctcctactgaatggtacacctagttctggtgacatgaagttaggagggaacaaagcaagaagcctgctccaggaaaaccttcactctcatggaatatgcagagaaataaatgaggaagatgatctcagaaagtgatacacgctacatggaaaacatacagaggggttggggtagtaatgctttctgtatgggtggtcggggaggtgacatttgagctaagcttttaataatcagccatcctggcgagtccctgatgcaggaatgagctgaagtagggcaggccattttggctgaatgtcggcagccagggagaaatgacagaagctgcagtcggggcatgaaggatcttcaaggccatgggaagtgttcaaagtctttgctccagtgtctcccactccacgtaaacccatcggcccagggggtcctggtaatccacgaggtccaggcacaccaggatagccatcacctttgagtcctggagcacccactggtccccgagggccttggacaccctttggtcctcgaatagaaagtccaggttctcccttaaatccaggtatcccaggtcctcctctatctccctttggcccaggtggtccaggaattgatgttccaggcattccaaaagggcccataatgcccggttcaccctttggtccttcgggccctgggaagtcccctctgtccttgatttcctttgctccctttcttgccttcgtcacccttggggccaggctgtccttttccaggtggtccttctgggcctcttgctcccggaagccccgcttctccgaaaaacttggtgttaccttcttccctgcagctccatcttctcctggtactcctggttgtcctgggagccctattgagcctggctctccctttggaccttgtactccaattcccactggtcctcgagggcctgtaggtcccatttggcctacttc

SEQ ID NO: 479839 - DNA, 1000 bp, Homo Sapiens; identical to SEQ ID NO: 161555

SEQ ID NO: 479840 - DNA, 647 bp, Homo Sapiens
catttttttttttttttttttttgcttttttgcttttttttttttttttttttatttatttatttatttatttatttattttttgtagcccagaggtcctttattttttttttttaacacctattatgccatgaattcatagggaataggttccagcagctcaggctccttcccattggttctcacaaagtgtgcttctctgggtggagtaggctggcgctttagttgaacccaggtacctttctctttggcttctttctttttctgatcattttccttcacacgtttcaggaagctatctcggctcttagagtgcttaatgtgctcaatacgcacattaattctcttggcaagaatcttgcccttaacttgtttgtttacaacaatgccaacagcatgctgggtaacattgtagactcttccagttttgccatggtaacacttgtggggcattcctttttgaacagtacccattcccttgatgtctacaatatcacctttcttatagattcgcatatatgtggccaaaggaacaactccatgttttctaaaaggcctagagaacatatatcgggtgcctctcctctttccctttgtgttcgtcattttggcgaattactggaagatggcggttccggccgaaaggg

SEQ ID NO: 479841 - DNA, 1000 bp, Homo Sapiens; identical to SEQ ID NO: 347217

SEQ ID NO: 479842 - DNA, 546 bp, Homo Sapiens; identical to SEQ ID NO: 347218

SEQ ID NO: 479843 - DNA, 1000 bp, Homo Sapiens
tcagggcggcttcacgtcccctccacccacgcggaccgagctgcgcttcccttccccctgctcgggcccgcgctgggcgtcccagactcgacacttcctgaaggcctcagcttcagagtccttcagtttttgaactttttctttgaccttcatctcaaacacctgctccatctccatctccatcttcttaattttagctacttgctcccttctttcttcttccatttgtgccagagggctcttagtgagctgccctttattcttcttgttatcaactccatgataagtcacagctgccagttttctgattccatagttctcgtagtggacattattagtaacatctttcaagtcctgcgtgtgttctgtcataaataaacggcaagagtttgcttctattaatagaggctgccctgtgctgtcatgccccttcctggctgaagacatgctggctgtcccctccgctcctccccggagatgagcatctttcctgggcctcccttggtgttttgacagctgctccatgtccccgttcaactgcccatataggttctgcaggttccacgaagttctagaacttgtacaggatcgagcccacagcttctcatggaataaacacagaatcaagaaaatctggtggaagtcgcctggtttaactcctttgaggtcaatgtagtgttcttggatatacacggtgtggcaatactctgtattgtcagttctccctcttcccatcatctgttctatctcaaacttcctatatctgccatcattcatcttcaccactttactaaaactcccttcttcagcaacactccaaggatactgccttcctatgacccttttgccattaacttcaatgatagtattactacccaccacagcaagaggtaaatggtcctttatctttttaacaagttttttttcttcttcatcatctgtttctggaaattcatatattttaactttatgttcttggatttctttatctgagtacaac

SEQ ID NO: 479844 - DNA, 1000 bp, Homo Sapiens; identical to SEQ ID NO: 347219

SEQ ID NO: 479845 - DNA, 1000 bp, Homo Sapiens
tcagttgtggcccagacattccagagctcggataccaaggagcagcttctgtggggcaggacggctgcacacagtcagggaacctggctcagcctggcccaagccttctcccacagcggggtactcagcagcgagtgacgaggagcccatggtcatccatgaggaggagggggtgatgatgtcattgctgatgacggctttagcaccactgacactgatctcaagttcaaggagtgggtgaccgactgagagtggggacgactctctctccgcgtgggaggggccagtgtgaggcaaggggtcagcgtgggaggggcccgtgtgaggcaaggggtcagcgtgggaggggcccgtgtgaggcaaggggtcagcatgggagggggcctctgggcagggtgccagaggcatgagttgggcatcaacaggccaccgtgagggaggagctgggccgcacgcgggctgctgggaggcaggcagggacttgtccccgggaggctgccgtgggggcgagagctgggcctggagaggcccctgggcctggggagcttggcttgaggaagctgtgggccgaccaaggccgccaggagatgggcaggcgctgagtccaaagaggttgttgggaggcagcagtcgggcctggagacgcagccgggaggaagagctgggcccggagaggacgccgggaggctgcaagtgggtctggagaggccgacttgaggaggttctgggcccggagaggccgccggaagggaaaaactgggctcgaggaacttttgcacccggagcggccgccgagaggccggagctgggcctggggaggccgacttgaggacgacttgggcctgcagagggcgccgggaggctggagctggccctggacaggccgacttgacgacagtctgggcctgcagaggccgccgagaggaagagctgggcctggagaggccgactggaggaagtccagagcttgaggtcgattttggcctgcagaagccaccgg

SEQ ID NO: 479846 - DNA, 756 bp, Homo Sapiens
gccattcttgctgctctcttttaattaataaactctaaaaaggctaatccacttgggcactacttaattaacaatcaattagtaaggaaaagatatcgaagcagtaaacttaagtgacagcgaaaagttctgttgaccaaacatggattctctcctcctcagaaccaagttacagttggagttacagtaaatacttcgaacaggtccttcggtatcccaggctcaggtgaggcgagtgcgcatcttgggatgcagctggcgctggcggcgcttgcgctggccattgaggagcttctgcgcgaccttgcgctcgtgcccgccaggtgcaggccagttggtgcgcagcgcctgctcgcgccgagtccggcccttgctgcgccctgccccgcaggccgggaagtcgcgcaggtagtagtagtccaggcagtcgtaaagctcctcctcgtagcttatgggtggcggcggccgagccagagcctgcagacgtggaagcgcccgctctgcgggcgcttccatcctgcccaggcctgtggccaccggcggccacctgcccgcgtctgggcgctcctggaagacccagcagccccgcctcgagttccgatgggctccgcgtgaaggtgggggtgccttcggcgacgccacagaggcggacctgaagaagatttccagttctgtcagccgtctcccacccaacccccagaagcagacattcctttgctgtgggccatggacaggcagaaggaagcacctcctcat

SEQ ID NO: 479847 - DNA, 1000 bp, Homo Sapiens
ctacaaaggcggttttgagctgggcaggagttgagcccaaagagcttgcttacttgctgggaggcagggccgggagacgccgacttcaggacgacttgggcctgcagaggtcgccaggaggcccaagctgggcgcggaggagcccaccgaccggagaccgtttggggcctggagacgccatcggagggcaggagctgatcctggagaggccaccgtgaggcctgacctgggcctggggagcttggcttgaggaagctgtgggccgaccaaggccgccaggagatgggcaggcgctgagtccaaagaggttgttgggaggcagcagtcgggcctggagacgcagccgggaggaagagctgggcccggagaggacgccgggaggctgcatgtgggtctggagaggccgacttgaggaggcccggcctctgcctccctcatggcggcctctgcaggcccagctgttcctcctggctgcatctctcggcccagctcctgcctcccagcaggcaagctcttttggctcagctccctccagcgtttgtagaccccgaagtttctgcagccaagctcttcaggcccacatcctgcctcccggtggcaggccaccgtgagggaggcactgggccgcacgcgggctgccgggaggccgccgtgggggcgagagctgggcctggagaggcccaaaggcggttttgagctgggcaggagttgagcccaaagagcttgcttacttgctgggaggcagggccgggagacgccgacttcaggacgacttgggcctgcagaggtcgccaggaggcccaagctgggcgcggaggagcccaccgaccggagaccgtttggggcctggagacgccatcggagggcaggagctgatcctggagaggccaccgtgaggcctgacctgggcctggggagcttggcttgaggaagctgtgggccgaccaaggccgccaggagatgggcaggcgctgagtccaaagaggttgttgggaggcag

SEQ ID NO: 479848 - DNA, 1000 bp, Homo Sapiens; identical to SEQ ID NO: 347221

SEQ ID NO: 479849 - DNA, 1000 bp, Homo Sapiens
tcaataatacgggtgaggatatagtctggtgaggtatggatggggtcctgaaccttcaccttcagaagagaagcagacagatggcataggagctgtttccaactccatctccacattctcttcattgcacaacctgtccacaacatagcccggttcggaataaggaggaccccaaagtgccaggaaccgctggagcccaaactgtggcctttctggccagctcctcccttggaccttcactcccggagccacatagcagtagggtgaacgactgatgctacctgggcttttgattccactctggccttctcttttcctgacttccatgctcctcatgggcctacagtttcctgggtctggctcaaagtcttccacagtaaatatttcccatccagcagggtcgaccaccgagacgccccaaagaggctgtacggtcaagactttaagggtccctcggtgtttgtcataggcagccttttccccgagaccaggccggctctgcttgtaccattttcctctgcttaggcaggctgacagccctgacagccaggtgccccagcctacctcgcgaatgcccatgctccagtcgcaggacactggatgagatcccgaactttcaccttcaggagaaatgcagacagatgttatagaaggtgcttccagctccatccccgcattcccttcattgtagaagctgtccacatcatctccagactgtatccccagccccacgggacccgattccagcacaatgcctctttcaggaatggaatcagaagagcagtttccagcgcccacctcacagtctggaagtgcctcttcctccagtgggaccgaccatggagacagcccgaggaggccgcactggaacgcttgttctttcgagtcggtcgaccttttgtgcgcctctgtgtggcgccgcttgggctgtgaggctgcctgttttttgttttctccgcggttcctaaaaccgcggtgaagagcggggctgggtgagtga

SEQ ID NO: 479850 - DNA, 1000 bp, Homo Sapiens; identical to SEQ ID NO: 347222

SEQ ID NO: 479851 - DNA, 1000 bp, Homo Sapiens
tgaaggtgagaaaagttcatttttattatgtttccccaagagacgcactctattgttctcttgaaaacacacagctcatgtcctcctttagaacacacatcctctttaaagtaacatacaaacatgccaaaacaaggtaaaaaattacacctgaattctcacatttcaaacatatatgaaatatcaaataaaaatttatttttacaagaatttaggggaactactacatagctataaatgtaatatatatgttaactaagtatcacagataaaaaccatgctcccttcagcaacacgtgtaataatagatacaaagattgaaaggtaaaagatttaggatgaaaagaatcctctcttaaaaaggaaagcaaaattatacgtatgtgtatataacagttataacacccatcacacagctttatagaaacagcatctattcaaaaatagcagtatttcaaaaatatttaaaataatatttcaagtaataatatttaaataaatatatttaataaatatttcaataaataaaataatatttaaataattctatacccatgtttttcaaaataaaccaataaaatagatagtatatattagacgtgttagtatatatatctgagacatgttaaaaatcacaactgaattctcacaattcagtcacaaacctaaacagcaaataaaaatttctatcaccagaattatgttttttttgtggtggggaactaccaatagctataaatagaagagattattatggaagtatcatagataaaaagagtgctcgcttcaggagcacatataataatacagaaagaaatttaaagataataaaatatttaggataaaaagaattgtctcttaaaaatgaaaagaaaattatctttatgtatatataacaactataactctcatcaaaaaactacaggaacagcatgttttcaaaagtacaacaatttccaaactatttgaaataaatctatgaataattcaatggccaaca

SEQ ID NO: 479852 - DNA, 1000 bp, Homo Sapiens
tcactttttccacttgtagattttgtgcccaagccccagaaagatggctgggggcaggggctctgcgtactattcgatgagacccataacgtggctgtaactgtctttctcatactgcaagaacacggctggcagatccagctcctcgtatagtgccttcacccgggccaccttctcggcctccttctgcctgtaattttccttcaggatctggtactgttctggagtggcctgtagcagacactgaaccaccagccagctgcatttgttgtcctggaagtcattgccaactctgccagtcacactggggtccccaaagaagtcaaggtaatcatcctgaatctgaaagaactcttgaatctccagcaggatcttcttggcactggtgtgctccttcttgtcatccattcttgacatgtacatggctgcagctacaggaaggtagaaggagtagaaagctgtcttgtacttgacaacagatttgtgccttttttcggtgcatctgcgaagatccacattgccctggggggttgtgatgaggtcgagggtctgcccaatctcagtctgataagaattctgctggaagagctccatcaggttcaggtaatagggctgctcccggcaatacagcttcagcaggcagtagatacatgcttccagaaggatagcatcattgatggcatccaaacccatgcccagcttctgataccaggagatctgtccctggcaggtaagggatgaatccataatgtcatctgccaccaggaagaaagcttgcagcagttgcgcataccagcccacagtcggtgcccactggagactatcagcatccagtttcctcggctccaccagctcccggaacgctactagcaccatcaaacctcggtgatacttgcctccaatggcattgtactccaggacctccttgagccgggcagtagcatctcctgtctctgggtgccccatctcatcctcagtcagcaccctaacgatctgggag

SEQ ID NO: 479853 - DNA, 1000 bp, Homo Sapiens; identical to SEQ ID NO: 347224

SEQ ID NO: 479854 - DNA, 1000 bp, Homo Sapiens; identical to SEQ ID NO: 161556

SEQ ID NO: 479855 - DNA, 1000 bp, Homo Sapiens; identical to SEQ ID NO: 347225

SEQ ID NO: 479856 - DNA, 1000 bp, Homo Sapiens
ggatgcaggaaagtttttatttttaggtgtacatcggctcagtggaattgcatccagaaaatctaagcatagatcaaagaaaacgaatgtcttttaagcattttgaggcaggaattacgtgaagcaggaagcaggcttacagaagcaagaacaaagtccattaattatcttgtgacacttttgcaacatgtcttacatctctgggaaaacttagtatgcagcttatgcttatctgtcttgtgaccttgcagctgtacaaggagggaagaaaacacgagcttacagagcctacaaaatacctgaagggcagatatggttaatgtttcttgggactggcagttaatatccttctttaactctaacttcaggggggctacttaaattctttttagccttggttggtacagcaattcattctatgagctattatttctgttactataattttactattattacttatgctattatcctattttaattttccacttcattcccccctttggtgctctatataaatgttggttaatagcaccacagttgtttattttttcttgagtcggtacatattattcttggggcaatacttagtcaatgccattatttgagtagtagtgtatttggccacaactgcctctatagttgactgaacacttctgatgagaagaggtaggagacaagggagaattaggcaggcacctgtgataagcaggaacccacctattaaggttttgaacccactaaaggttgaaaaccatccttcaaagagagaatctggagaccaacctgaccaggtttgaactggaacttgggctaacttccacatcctggcagtaattcccatgacagctcgcctattgtctacgtctaaacagcagtttgttagattaaacttcccacatactcctccttctgaggctaggaggtaatctagtgccagcctgttttgatatatggcattccttatctgtgtagcttgtacagctagtaaatcttgatg

SEQ ID NO: 479857 - DNA, 1000 bp, Homo Sapiens; identical to SEQ ID NO: 347226

SEQ ID NO: 479858 - DNA, 1000 bp, Homo Sapiens
tcatccaggtgcacagtggggagcatcgtttccaggtgcacggtggggagggggagcatcatttcctcgtgagctggtgggcgggactcgaaggttgtcgtccaggtgcatgttggggagcgtcgtttccgggtgcacggtggggagcgtagtttccaggtgcatgttggggagcgtcgtttccaggtgcacggcagggagcatcgtttccgggtgcacggtggggagcgtcgtttccgggtgcacggtggggagcgtaatttccaggtgcatgttggggagcgtcgtttccaggtgcacggcagggagcatcgtttccaggtgcacggtggggagcatcgtttccgggtgcacggtggggagcgttgtttccgggtgcatgttggggagcgtcgtttccaggtgcaccgtgcggagcatcgtttcctcgtgagctggttgtaggttggtcaccactcggaggcccttaggtccctgcaggcaggggccgtgggggcccctttgtggctgtgtcaggacagccttgcatctgggtcccaccgcttggtgtttcttgatggggacaggggagctgttcttgggccaggctgcataacgtggccccctgaccttcactgtggagtcactgaggttggaggggtgggacgggggagagtgggcggggggcttgtgcccagggctgctgctccccggagcccctgcagagaagcccctgcactgtccgtctgcctcaggggcctgggccagtgctcctggaggagggcttccaaagcagaaactcaggacaaacaccaagggctccacggtatcctgcaggagcttgggaaacagcgagtttttgaggggtggaggcccagcctgccctcggaagtagccgctgagatagtgggcctcctctaccagccactctgtcctttgatagccatcagagatggccaggcctggggccaccaggggtgactggggggagctgggactgagacggctgcagaggttttgc

SEQ ID NO: 479859 - DNA, 1000 bp, Homo Sapiens
tcactctgggccagaaagagctgtgtcctggcaatggtggcagggagtcaccagcaggatcgggtaggacccatggtcaccacagtggctagtgctgtgaggaggatggagatgagggagagtttgctcccatagggcagcaccatggtggggccactgagactgagaccagcgcactaagggctgggctggcggtggcccctttgcacaggcagaagagcctcctggaagaggactcagtctgggcccactatgggggctgacttcttgtaaggaacggaatagagcaccaggggagaacacctcccacatgaggtggtgccagagcaagacgctggacctgacaacaaagctttcagtggtgaagacagcagagactccaagctccctgtgaaggaagtgactcatcccgtccctaggccagctcctttctgggaaatggtgaggggcactggggaatggtgagaggcactggggaatggtgagaagcactggggaatggtgaggggcactgggaaatggtgagaagcactgggaaatggtgaggggcactggggaatggtgagaggcactggggaatggtgaggggcactgggaaatggtgagaagcactgggaaatggtgagggccactgggaaatggtgagaggcactgggaaatggtgagaggcactgggaaatggtgagaggcactgggaaatggtgaggggcactggggaatggtgagaggcactgggaaatggtgaggggcactggggaatggtgaggggcactggggaatggtgagaggcactggggaatggtgaggggcactgggaaatggtgagaagcactgggaaatggtgagggccactgggaaatggtgagaggcactgggaaatggtgagaggcactgggaaatggtgagaggcactgggaaatggtgagaggcactggggaatggtgagaggcactgggaaatggtgaggggcactgggaaatggtgagaggcactgggaaat

SEQ ID NO: 479860 - DNA, 1000 bp, Homo Sapiens
ctaccagaaaccctcaccactgtcatgctccacgccggtggtgatggtgatgtcatcaatgtaggtggtgggtgttgtgtacagaagcacagaccgctgcagtcctgcatagttgaagaagtcaaagtctgtgttccagacaaagtaacccctgagatatataaaggtgttggtcatatcgtggttggtccctggtggcagggtggagggagtgagtgtgttgttgatggtgacagtgatgtggaggtgggagggcaggggacccaccaggaccaggctgctgatgttggcctggaaggggagacagcccctctcaccctccagcgcttcgatcccattcacccacatgatggcataggagtgggcactgccaatcctcagcaccactcttgtgtgcaggtcctgggtccatcgctctggcagggtcacttcctgttcgtaccacatctgggctagtggagccaggagttccttctcggagtggatggggcccaatatctcccaagacaggagcgagcccagggccacatcccagtccgaggcaagaaagttcagacgcataactaagaggcagatgacccactgcgggatgcccgtgctcccccactcccactccctccgccgggcttccgtgcgcctgacggccctgccccgagcacgcacctctcgcagccgaggaccgtaacactgctcctagaagccccggcgccggttgtcggagaagtaggcgctgaagcttcagaggccgtccagcttcttgagctcccgcgacgggctctcccgggggtacagcaacctgccctgcagcgccagcgcgcagcaccataactgcgccagaacgccgccaggataacctccagaccacgcttcccgctcctctgctcggcagcagtctgcagggcctgtgagtcctcccaccagggccccatccttccacccatcttccgtagatcctgtttcccttgaggtctgagctggggtgcccagtgaggggtcatcc

SEQ ID NO: 479861 - DNA, 1000 bp, Homo Sapiens; identical to SEQ ID NO: 347228

SEQ ID NO: 479862 - DNA, 810 bp, Homo Sapiens
ttactgtaccttcttaatattcctttgaaattccttatggcgcacaggtagtgtagaaaataactgcttcacgctgactgtcatccctctggggtgggggtagggggttttctggatgattttcccatagtgatcaaacaccagtcgagtcccaaccttcgccgatgcgtggcaggtagaaatggtgacatcgctcagtgcacacagtgagctcagagcttccccctgaaagccgaaagtttcaacctcagttaggtcggcaaactcttgaatcttacatgtgtgatgtttcagagttaagccttcaaagttttcttcttctaccccacatccattgtctgaaacttcaatgagatccactccatagtccttaagctttagatctgaccccacagttctagaaccattcccttgcaaagaaagggactgctcacggctggggatggagaagtgctgtggtaggagccctttcttctctttcttccccagctggattgccaaacctaccctgcggtcctcgtcttcctggccccatagctcctcctcgccaagcatgtcttccccactgcagagagctgcgggaggtaccaagagggccttgtctgcatcttctagttcctctgccagtctacccttcgatgacagggactcaaaccatccctcagagggtaagtagatgttgcattgtgcggccacttcctgtgtccgtggcagccttccccctctcgttttcccacattgatgataatatgcgtgggacttgcaggtctcatatcccacctcgctgctcctgcgcctgcagtcccccat

SEQ ID NO: 479863 - DNA, 1000 bp, Homo Sapiens
tcagttggagcagtttgggaacaatgaattgaggaggtggtcctcagtctgagaactcagggttcccagggtttggggagctggcacacaacatactccctgcacatgtttggaatcagttctgtgccagacgatgcaggagtcagtgccatggagccagacgtggagcttcattgccagcagcagtgctggaggatgctgcgaacacaaagaagaaggtgtggtggagggacccagggacttcctcttcatctgattacctgtttccactgaattcccgatctgcccatacttgagccccatgtctgccttcttctctttgctgcttgagatggggaacaccacctgttccaccttggccaggtactgcctgtagtcttcttggcaggccccagccctgcctctctggagcagctgggcatccaggaagaggttattgctgtagaaggagccctctcgctccctccccagcctctcgatcgcagccaggagctctgcctgctgctgcctctgctcctccccggcagcccggttgttgaaggcacagtaccttctctcacattcctgcaccaggtccttcaggctgaggttgtccatgtttgctacatagtcatccagggcctggctccctaagtcccccagctggatcaccagaagcagcacatggggcccgagggcagagagcaggtagcagtccccgatgttcttgtacagctcttgagtctggaccttggactcaaagatggagagcgtgtcgaccaccaggactttcctcccattccatgttcctgtctccacctggcatgtcctggttactgactgggcccccagcttgcactcaaacacaggctggccaaggatgctgttccctgtggtgcttttcccacagcccaactctcccgcgcccaccttttccctctctcctctagcacaatgaagcatgcaggcctgggtgaaggaatacctcctgacaactccgggaatgatggctatgctaata

SEQ ID NO: 479864 - DNA, 1000 bp, Homo Sapiens; identical to SEQ ID NO: 347230

SEQ ID NO: 479865 - DNA, 1000 bp, Homo Sapiens; identical to SEQ ID NO: 347231

SEQ ID NO: 479866 - DNA, 1000 bp, Homo Sapiens
ctagtttcctgaggccaaaacttagatgattgatttgagatgctttctctttttctaatattaagtatttggtactataaatttccctctaagctctgcttcataccacacattttgatgtatttttattttcactcattctgtgagtttatgtttttcaccacatttgagaagtattccattattacttattcaaatcctcagtcagtcctgttctcttcctgaaaatcgggtgggtctttggttattgttctactggttcctgaagctctgttcgttttttcttcctctgttccctcctccttccctccctccctcacttctccctttttcctctcctttctccctccctctcttcctcccttccttcctccctcctcccttcctccctccctttctctctctatggttcttattgggcccattctactgctgtgtcctcaggttcactggctgtgtcctctgccatcttcactttactactgagtacatccggagagttttgtttctgtgtttgtagttgttagctctgtgtattccctttggttctttctgataacttctgtgtctttgctgaggtcttctacttcatttgtttctggagagtgcattgctttgtcatggtgccctgtggtgacaaccctggcctcctggtcgtgtcctcagcctcgagctggtcctggcactggtgtcattcattgtcttttctcattcacgtgtgtgtcctccagcttttgctgtgatgagcagcttttgcttgtatcctgggcattttggccctgcttagagactctgagtcctgtggatgtactttattttcctaggccaccgccctgtaggttggcaccaggtcctggctggtgtcatgaactgtggttcctgacatttttactctttgggatgggtggtgccgtctgggtatccttggttgatctggtgctggcagagtttccactggtgcttcctgaggggccggggatttccccggccatgtggcagc

SEQ ID NO: 479867 - DNA, 1000 bp, Homo Sapiens; identical to SEQ ID NO: 347232

SEQ ID NO: 479868 - DNA, 1000 bp, Homo Sapiens
tttaattcatgatactttatttcaccccatatacccaaaatattatcatttcaatatgcaatcaatgtttttaaatgatgaatgagccagttcacattcttttttccatacagtcttctttacaatggggtgtgtatttcccacttggagaacatcctggtctggcctggccacactgcaagccctcggcagcctcttgtggtcagtggctgccccagtgagcagcacagctacagaggctcaggaaaaccaaccccaggagcgtggatgttcactgccttccttcaaccactccaggcaggtgcgtccacctttcctcctcattgcctcaccagggctgcaactgccgaacagccttttctcggcagcctgacagaatagctgtgtgttgggtttctcgcggcgtgagggatccctggcagtcggacgcggcagggtggctggtttctggggctgagtctggcccgacacaaaagaggagggaaaggagaaggagacggaaacaaaggcgcgggggaggacgaggaggcgcgcgcggtcgcggggcaaagcggcgatgcggtgcgggcgcgcgcagcctggggctcccgggaccagcgggcgggagcaggcggagcgggcagggcgatttgaatatcaggctctgccacactcggggcgccgctgacaacttcattacctccgcatataaaaatgactgccggggaatgcaaatagctcgcctgtctcagccgcctgcccccgttccgccgccggctgcaggcggaggccccgggagccgcggcggccggaggcgcagacgcgcccgcgaactctgacggaaaagcgggacccccggcctccgtcccgtgcgccctggtggttaaattggacgccagcatcccggcgccccgctctcgtctcgcctgcaagcgggcggcgggtgtgctgcgccctgctccccaggcctgcggccaccgggacaaggctgcgtcgctgtgcaggacccgcctcccgaacc

SEQ ID NO: 479869 - DNA, 1000 bp, Homo Sapiens; identical to SEQ ID NO: 347233

SEQ ID NO: 479870 - DNA, 416 bp, Homo Sapiens
cgaatattccataatttttaataaaaggcttgcattgttcacaacacattcaagaagtattatcattgattttgctttttgaaatgtttaaatattgaaacatccaaaatactaatgtggataaaatacaacaaacttgctttgtacccaccatgtgtttggtttctatcactttcccaagctgcagttccaatgtgcaatgctagcaataccaccggcagaggtgagccaacaatgcaatgaatatctggaaagctaaatctcacacatgcatgacatcctttcaaacttctgctggcactcatccaggactgaactaaataccaggttctccccaacttcatcccttctatatggtgagagaaacaaggaaataaatgtaaactgcaacagtgttaaaggcaaagtaataaact

SEQ ID NO: 479871 - DNA, 1000 bp, Homo Sapiens
catgggtggtatttttcattgtgccaaaaagttgccatgaccgtcattaaacctgtttaacaccaaataataaggaaaataaaataaaaaattcaggcttggtgcagaaactcactccaaataaattacatacgaaaatatttatataatggtagcaatattccaaaattccatattttgggatttatacacaaaagataaacaaattagaggccaaaaggctgccggaagggaaaaacggggcctggaaaggccgttgtgaggaatgagctgggcctaaagaggccactggcaggcaggagctgggcctgccaaagcggccgaaaggcaggagctttcgactggggaggccgcagtgaggcgagagctagctgggcgtggagagtccgctgtgaggctgaggctgggcccgtgcaggccttcgagaggcaggaagccgggcctgcaaaggccgactggaggtcaagttctgggcctgaagaggccaccaaaagtcaaaagcggggcctgggaaggctgctgagagccatgagctgggctgggccaaaagaggccactgggaggcaggaggagctgggcctggagaggctgactcgaggaagttttgcacctggagaggccaagaggacggagctgggcccagggaggccaacttgcagctcttccaggcccacttccaggccgacttgaggacaacttaggcctgcagaggctgccgggaggctggagctggacctggagaggccgacttcaggacgatttgggcctgcagaggccgccgggaggcccaagctgggcctagaggagcccaccgaccggaggccgtttgggacctggagatgccatcggagggcaggagctgagcctggcgaggccaccgtgaggcctgacctgggcctggggagcttggcttcaggaagttgtgggcctaccagggccactgggagctgggcaggagttgagccaaaagagcttgcttacttgctgggaggcagggccg

SEQ ID NO: 479872 - DNA, 679 bp, Homo Sapiens
ctatctttagctatcaaggatatctttgattttgttaggatttccaagtgggagggaaggttactctgcaggctggacctgccccagagccctttcttcctcagagtttcattcaaaataggtagtcttcacagtcatataatgaataggtcagagagccactttcaattatagaatatacttccctaaaatccaaagaggtccaaaaagcactgtgcctctttcttagtggtagaagattcaagatccaataactttcatttacttggcatgctccagatcattttatccagtacttggaatttcttgtctaccatgtcaaattagcctaatgtcatcaatatagttggtcagcatgattttcaagtatgttttccttattgaaatctgactcggcagtgacccaattccagaatcccaacatgaagggctgctttccagactctgtgtaacaagctgtcctggtttggcttcactgtgaaagccaaaccagaggtaaggacctgtatctggaccatatcttggcaaaactgttaagtgggcagggtttgctatggagaacgcccactcatctgaggtcctgtgttttatttcctggtaagtcattcgcattaaaatgaggtttttctttttcccatccttgctgccaattatttcatagtggcagatttggaacatt

SEQ ID NO: 479873 - DNA, 801 bp, Homo Sapiens
aagaagggtaaagaagccatgtcctgggctagatgactgtttctgctgtcacctgtgtctccttttgtactgagctcggttctcctcccaaactctccagattgtccaggtacaggctcccgtggtcctcctccatactctgggaagtggacaacaagtgccagcaagggcaaaccatttcttgaatgaggcagatggtaccagccactatgaacagaaagatgccgaagcccagcacgtagtaaggccacagcacggagaactgcagggggccgagcttcatcctcagagccttgatctccagggcatgcagcaccaaagccaggaaggcacaggcccctgtgaagaagctgatgcaggctaacacaaagttttgcttccaggtcctcgggaagaactcggatgcaaagggcatcatgatgaaggtggtgacgaaagccaagaaaactgcagagagcaggaaaacccggccgaggatgatgtaaatggataagggtcgaggcttccagcatttggcattgaagcagttctcaaataggccactgaaaaagacttcgtgggactcctcgtttgtcagtcgcacccagaagggaaagatggagaccaccagtataatcaggtagcctagggaggttaaggctgggactatggcccaggagaatcccttcatgtccttgtcctctaacgtcagcatcacaccgtggtgggtaagtgctggctggtcttgtctcagcttcatcacttcctagctgtgtgatcttggggaagttgctcagagtctcaggaccttgctttccccat

SEQ ID NO: 479874 - DNA, 641 bp, Homo Sapiens
gaggaaagacccagagtatggcagggctgcggttagcgagggctttggtcagcagctggagagtgccgtagtgacatggtgacagtcctcggcccccaggaggggcggaggccacccctctgggacccccagccctagaatcccatgcaggagtgactctgctgtcccatcacactcacagctgcagcaaggatgcctttccagcagtcacactcccacgcaggggtcagccttcctcccagggggagcagggtggagcgggagctggtcctcccagcatactgcaggcggacaacagtggcctgtttcaggtgacacctgtctttgggcccaggtcccacttctgtggttgtccccaggctgagctgccccctggaagggttttcttggtcagggactgcggcaaaaaccagcccgtcgctggaggagagggagagcagtgggcgggggagcagggagggagccaacccgctccaaaccagatcattccggttcagagcggcttcccctccggtcctaggagcctctccgacaaggcgcgctgggctgcgcagggaggccctgggccgagctggccttagtggggagggcctgagcccaccctggccagcaccccctccccagttccgtccggcctccat

SEQ ID NO: 479875 - DNA, 597 bp, Homo Sapiens; identical to SEQ ID NO: 347237

SEQ ID NO: 479876 - DNA, 1000 bp, Homo Sapiens; identical to SEQ ID NO: 347240

SEQ ID NO: 479877 - DNA, 1000 bp, Homo Sapiens; identical to SEQ ID NO: 347241

SEQ ID NO: 479878 - DNA, 1000 bp, Homo Sapiens; identical to SEQ ID NO: 347244

SEQ ID NO: 479879 - DNA, 1000 bp, Homo Sapiens; identical to SEQ ID NO: 347245

SEQ ID NO: 479880 - DNA, 1000 bp, Homo Sapiens; identical to SEQ ID NO: 347246

SEQ ID NO: 479881 - DNA, 1000 bp, Homo Sapiens
atggtgatatgtataggctttttactaggtgctcgacatgaatgatatcatttctgccccttctcctccctgaaagcccaatgatggtggttatttcacaggtgaggaacgtgacactcagagaatagacatgatttgcttaaagtcaatcagcctcggaatggaagggttgagatttgaggaagggtttgtttgtctgactctggatcctgaaattcttctctgggctacatggcctacattccctccaggtctcttagtaattccttgttttgtggtttttatttttagcgacagagtcttgctatgttacccaggctggtctcaaactcatgggctcaaacgatcttcccaccacagccttccgagtagctgacactacaggccaccacacccaacttctctctgtggtttttaacctcctcctagagagtaaactcagcctcaggaaggtgagataggaggctagttaatagtcagtggatagagtggtaggaggagggtatgctcagtgactaagatccagcactgagcctcaccctgttcgacattttctggtcactaggaacatttcctaggaagactggcaccacagcagcttctgtatgaaagaagggagtatccttcacctaatgatatggaaaccctttggttctctgaggcagctgtctaggactctcaactcaatggagctcttgatccccggggccacaattgctttatttccttagattgtccttatggctgcttctgcagagttcaatcaatccaattgcaaaaccaggaagcacagaatgtatgggtccagttgactcagcctcttagctcagaaatgtaatgctgtgtcagtgggtccagcaacatctgttccctgaagcatcagccttttccttgtcaataagagacatttgcaaataattgtgtattcccttgtgatgactcctgtcttatgacttgttatagtctagtcctccagactgtggactccttgagaaggcag

SEQ ID NO: 479882 - DNA, 1000 bp, Homo Sapiens; identical to SEQ ID NO: 347247

SEQ ID NO: 479883 - DNA, 1000 bp, Homo Sapiens; identical to SEQ ID NO: 347248

SEQ ID NO: 479884 - DNA, 1000 bp, Homo Sapiens; identical to SEQ ID NO: 347249

SEQ ID NO: 479885 - DNA, 1000 bp, Homo Sapiens; identical to SEQ ID NO: 347250

SEQ ID NO: 479886 - DNA, 1000 bp, Homo Sapiens; identical to SEQ ID NO: 347251

SEQ ID NO: 479887 - DNA, 1000 bp, Homo Sapiens; identical to SEQ ID NO: 347252

SEQ ID NO: 479888 - DNA, 1000 bp, Homo Sapiens; identical to SEQ ID NO: 161557

SEQ ID NO: 479889 - DNA, 1000 bp, Homo Sapiens; identical to SEQ ID NO: 347256

SEQ ID NO: 479890 - DNA, 1000 bp, Homo Sapiens; identical to SEQ ID NO: 347258

SEQ ID NO: 479891 - DNA, 1000 bp, Homo Sapiens
tcacagcgatacgccaaggtcccacttcctgggcaagatggggctagagaggccggtggacagggtaatgtggcttcctggggctttgtggaacagcgctgtggtctcagcacatctctgccccggcccacaggaggacggggagcagcacacggcgtgggtggaggcctggcagtggcagaattgctcacagcgctccccagtccagaaggcctccccagccgggtggtggtacctgccccccatggagcagctgcactggattgggggcacgcagtccatgccactgagcacaaagcctgggtcacactggcagccatcctggcatggtgtcaggcagctgtcgggcagggcaggctcggcacaagagctaggacaggaggagccgcagagctcgtaattgctgcggggaggacaggccagcttgcaggccaagaggtgtctccagggctgcatgggaacgctgcgctgctggctttcctgggcgtagctccccagtatggcacacagagtctctcttgagccccccgtggcacagaggtcatggatgcagttctccacatgcacctggggatccacgtccttactgcaggccctgtagggcccatcttgggtgcccagcaagccacagaaggcctggtatagggctgccttgtctggtgggcacagaggggctgggcccccattaagctggacggctccaaactgtcctgccagcagtgacagctgccatcctgccacatccacatccacctgctgggcccacatggcatcccacggctcctggcgcctgatctccacccagatggcataggcgctgtggtgtggccggcatgttctagccaatatctcccagccaggcccttgaacctgatggtgggtcccattgaaagtgtgcaggtgggggtctccgtacagccacagtgtcccgtagtgcatggggtagcaaccccagacacccctgtgctggcagcacagctcacagggcccaggcggatat

SEQ ID NO: 479892 - DNA, 1000 bp, Homo Sapiens
ccactgttgtcttattttattttaagaaattgccacagcctcccccaccttcagcaaccaccacctgcagcatcaacatcaaggcaagaccatcaaccagcaaaaagattacgacaatttagacattcccatgaatgtaacatacacatctttggaatgtgggaggaagctggagaactcagagaaaacccacgcagacatgggcagaatgtgcaaaccccacatagaaaatagtagcctaggctactgcaatcactgaaggctcagatgattgttagcatttttcagcaacaaggtatttttaaattaaggtatgtacacgctttttaaagacataatgctattgcacacttaataaactataatatagtggaaatgtaacttttacatgcactaaggaaagcaaaaaattcatgtgacttgctttattgctgtggtctggaactgaatctgcaatatccataggtatgtctgtacctactctgtaagattaatgtgaggaacataagaggtggcaaatttaaatggtccagtacagtgcctagcatgtagctggccctgggtgaacattcattcctatcccttttccactcagtgagtctcgtggatgtattgcaggaaggatagtggtgatgtggtaaaggagaggagtggagaatttcatcccaaaatcaatcatctagccattaggtgaaagtgcttgatttctcccatgatcggcagaaggaagctgccatgggcatgcgtccaacaaggggtgctctcagcctcttaaaatgttatacattcctctctactgggcatggccctgcagtgcctcagcaactcctcaccaacctaacttcccagaaggtcagctcatgttcctctacccatctccagaggcaggggtgaaacaaaaaaagcaacactccaaggagggagcctctcccagcctcaactcagaggcttgtctcagaggcggcctcacccattggactccagtgcctttcaacagttg

SEQ ID NO: 479893 - DNA, 1000 bp, Homo Sapiens
gagacggagttttgctcttgttgcccaggctggagagcagtggcatgatcttggctcactgcaacctctgcctcccaggttcaagagattgtcctgcctcagcctcctgagtagctgggattataggcgcctgccaccacgcccagttaagttttgtatttttagtagagatggggttttgccatgttggctaggctggtcttgaactcctgacgtcaagtgatccgcctgcctcagcatcctaaagtgctgggattataggcgtgagccaccgagccaggcctcaaagcccttctcgtcctgggtctccggcacgagctggggcatgggcagcgacctgccttcctggctcagcgacacttaggtgaagacactggcggccctgtagcgcttctgagagctgtccacaacacagtcggcatccaccaagacctcgatctctacggacttattgctcgtgaaggtcatgcgtccggagatggtcttgatgcagccttttctgatcttgttgtcaaaattaatggcctccatggaggctgtgacgaggttggtcttgcagtggcgtgcagccaagatcccggcgacctcgtccatgaccttcatggtcaccccttcatgcacgaagctgtgcagggtacagtctgaaggccccaccaggtggatcaagctggactggctgtagctgacagtgttcggctctgggttgaggactggctggacgatgtccccgttcctccagttggtctccatgcgctccagcttctgggttttgtaccgcttctggccctcctcctcctgctcctgccggaaatacacaacaggaggctcttcgaggaccttgtccacgttcgtcagcgacaggggcgcataccagagggtggccttattggtcagctttttggcacctgtgaggatgttttcggacatcatgttgacctgcacctccacagagtgcttggaggtgtaggtgatctccgcgctgacgtgggccacctcaccg

SEQ ID NO: 479894 - DNA, 1000 bp, Homo Sapiens
ctatgggatgacatctatcatctcccttgttgggaacgaagaggaagcttgcactttcacatcatcatacagaggtggacagttgaacacatcaattattaccctgtctgtttcagtgtcatgaaatacccgacaactgtttaaggaagtgcaggaaaagacaatctttttcttcattactatttggacttttagatcatatccatcgcctgttccaacactctgccctgaaaagtccaccttgggttgtgaccagaagagcaaagagaacaggagagatgggaaggggatgaagtcctccaaattggtgatggaaaagaaaaagtgaagaacatctaagggctggcaatcaatgggcaattccaggaggaggggcataccatgaatcgaataaataactaatctttttataaacagtgtttttcttggagggagattccagttgtagctatgtttcacttgtgcaaaatatccaacatatctattctgagaaggagtttctactccctgatatttagtgccattggttttatctgttcgccgttctccaaaatagtacaatctttcctctgcagttaaaaatatttcactggcaatcaggcaggcacaaaccatagttccggttcttcctttgcctcctttacagtgaatcactacgatgttttcagaatcttgagccatccactccaacacttccttggagaatgctaccatctcccgtagagtggggacattatgatcatcgatcatgattctactgaccctattatggaagtgcttaggatcataagctctttcacattcagtaatctgttttctatctacagtagcaaaatacagagtaaggtacacactgcatagattgtagactcgatagtggtttggatgtttcttgtctagaaactgtacgacttccagccttcttatcagctttccaagttgtctttttagatgagccagacgaaaaactcttatcagaatgataagtcgtagaagtcga

SEQ ID NO: 479895 - DNA, 1000 bp, Homo Sapiens; identical to SEQ ID NO: 347260

SEQ ID NO: 479896 - DNA, 1000 bp, Homo Sapiens; identical to SEQ ID NO: 347261

SEQ ID NO: 479897 - DNA, 1000 bp, Homo Sapiens; identical to SEQ ID NO: 161559

SEQ ID NO: 479898 - DNA, 1000 bp, Homo Sapiens; identical to SEQ ID NO: 347262

SEQ ID NO: 479899 - DNA, 1000 bp, Homo Sapiens
aatattttctttgtgctgttttattgccctttgttcatgtttatcattttgccttaaaatcattctttggtcacttcagccagaaatttccagagggaagggggtgacccaaatcttttactcatatttaacctattgagtggagcaagcacaaccttgagctatgctgttctgccatggctccttaagaggtcaggcgttccagggagactagtgcctgccttaacccaagtaactggagaaggaaggacaaggtccccttaggtctccttagaggttcgaaggaatatgagtatgatggccattattaagaggcttgatgtgtggctaggattaccaaagctgcctttggtggtggatcactcacccagtgatggtgctgggattggggtgggaggctcgaccgaaaaggtagcaggaaagaactctaggaacatcttggtatggcaagctacactgagagacctcccaaagcaggtctgtaggagggactttgtttaatctgtgtgtgagggagaatgtgaataggatatcactgagaggggcttacatttcttagcagctccttgtagatctcagcttgccactcagcctccctcttggacttcatttcattccaaaggtttcagagaattccacatagtatttcaattaataataactatgtatttccctgaatagcaaaatattggacattcccagagagaggcaaaagggccagagtcccaccacctcagttatgagcagctgatctcattgttagactcatgtgtggcattaaattgtagatttgtggtcactttctgtgttaataggacactttccaaaagccttgtcttcttttgacagccaaggtgattggcttcagtgttttcagaaatgcagtgggacacaatgaagagatgtagaagggtgacaggaaccaagggctggagctgccaggcttctgtggtgccgtccttggcaggaaaaagtgtaggagtcatcccctgaggaaaag

SEQ ID NO: 479900 - DNA, 914 bp, Homo Sapiens
aacaggttacttttgaggaaaaaagctgccttggtaacttccctcaaatgtttattttaaataaaaatagttgatggaagtattttttaaaccaactttggatataatatggcatactgcccatcaaacaaaaaaggaaatcaaaacttttcttccatttataatgagttttccacctttacttttaagattacaacttactgaccttttatgcttgtttggttttttgactgcctaatccaatatttaaatttttaaaagtctgcatttcaatgtagtaagagttctttttcaaataatcttcataagccagaatacagacaccagagcaacactctcaagtcacactgtttgactataatgaagagatgaaaatgggcggatatctgaagataggtattccctctgctctgaaggtgagcaagcttttaacatgtgagcaacacagaactcctttcctctggggctcctttcaactcagaatgcttcagttcagtaagtcaatatgttattccttggtggtcgtagacgctaatgtaggagatgcccacggccatacaccacaccacgaggctctcgatgtccgagaagctgggttcctgctccacctcggtgatcaccaggcccatgtgcacaggcagcttctccagggaagggccgtccgcgcgccagcgcacctggtggtgggctgcgggcaggcacgacccccggcgcgggtgcgggtggtgatggcggttcctggcagacgcctgggacttgcggagcgtgaagccgagcggcgctaggaccgcggcagaggcggcgcgccggcacagtcgccagatccagttccaagtgccgaaccgaacgcggagccaggaggtgagtcccgtggcgctacggctttttatccgcccctgcgccggcgcgggcat

SEQ ID NO: 479901 - DNA, 1000 bp, Homo Sapiens; identical to SEQ ID NO: 347268

SEQ ID NO: 479902 - DNA, 927 bp, Homo Sapiens
gttccatttattatctttacaaaacggtgcattgttttgttccttactaaccttcttcccataatcactcccccgacccccaatttctccaatctctgccctccctagcctgttactgtcaaactcacactaaatatacccactggaaactcagaaaagttgtaaaaaaaagaattctgcagactttccttaagttatttccaatcaaccttcctgccccccgaaggttctcctttttctctcaagttatggcttgttttagttcttgggaacccggaaagggtgagattgggtttctcaaaatgcatacatattcggcgctcttcaaaatacagcactgttttctgtttaatccaggtgtaatattaaggtaaacacggacatgtccatgccagatcagggtgttgtcttgtagcagtttgattggcaggtaaaaaagcgaaagaacgtgagggctccctgagcctcttgtcagcccaagcttgatcacttctcaccggacagaaccagttgaaggagcttgcagttcccctctcgtccttcatccaaggcaccgtgaatccatttcggcttttcttccccccagtctttccatcagcctcctgccttcacccacatcgccttacaccagcctccaagacctagcctagctttgccactgcaatccctggaatagaaagagaacatttcattcattccatggatggccacttttccgaagaaacctgtcaggctttcttccaaatactgaacagagctgtcttgtaagtgaggcctatcccagctgataagtcctgggactttccttatcagagtatcaaaattaggtaaaattataataggtgatctacacctgagaagagggaccagctgattccctgctgtagttggcacactgcccttttcacggacccaacgaaccgtcat

SEQ ID NO: 479903 - DNA, 928 bp, Homo Sapiens
cagcaaattaatgctgcagcagcatatgagactataagtaaaaggagcttccattgaaaatgccacaaagcattgcaaggccacagtggacaagtgagagcagaacatcccatgttccaggaagagcatgcaggcacacattatggtttataagaactcctggttctttcagttggcaagagcttgcttttagtccaaataacattctccagaagttcttgggcttcttggatcccccattttgcagcaacattaaggagcatttctacatcccctgcttccatggaggcagtcatgtttttcagtgttcctactgcaaggttaaaggcagcaccaggatggtcctgctgggaggcttgtctaaaccaatgcattgccttctcttcatccttcactacaccagctcctcccatttattccatgaattcgaagagtgtgtcttgtacttctggggcagatttgttccaagggtgtgtacatcagttgcttgggttcttccttgctgtttttgaggcatcaagagcagcagcatctttttcttcccctgctggcttccctgttctgtcttcctcagtagtagaggacttttgtttgttatgtctggcttggtagggactctccaggggtcccttattcttcccttccgcttccctcaattcctattccctttcatcctctctccaggtccagaagctggttttcctcttctgatttatgcctgaggcaaagcagctgtcgaggagacttcacgtggtctctagagccctgctaggggacccgggacgctaccgcgcgcccctcccctgaggtctcagctcctcctcccaggcacgtgatcgcagccggctggtaactgcgctcctgcagcgtagctcgctctgtttcttccctcccgccgcggtgcccttcttctcccccgttcccatcc

SEQ ID NO: 479904 - DNA, 921 bp, Homo Sapiens
tcaggaaagtcctgggggagggtggggaacaaggtgcagctgctgccaggagagtgtgatattaggggagagatcaggaattatgctgtgtttctcttgtacagaatacagtaaattcggtggcaacaaatgagagggggctggtctatcttgtgtaccagaagcagtcacaaggcagattttcagtgtggtgtagggcaggtgtgaatcactgtgcctgtcccaggtggcacagtaatagaatccagaatcattttcaattagattttgcagtatcaatttccagctcctcctcatgcttgcataagtaaaatactttcctctactgattcttgattccaacacaaccctggagtagtaggggtcatagtatggaagatgctgtggggccttccccgcctggtgcaggtaccagtggatgtagaaggtatttattacagtaagatcacaagtgattacagcagatgacccagctggcctggtgactgacttccttctcccttgcaagttggaagatttctgactggcgcatgccttcctctctggggtcttggaaggaaagggaccagatgaagaggagcagaagacgctttcaaaactcaggtcccactcaaacaggaagtgttccctagcacagaaggcagtaggaggagctggtcttcctgagtcacaggcagggagaagtgatggaggatctgtcttaggggactccccagccttcctcccagaggggtggtgtctgggaggacctgcagaggagctcctgcctctctgctcaggccccttctccagcgccatcttgtggcagcagagagcaggccctctgcagaagagagccaggggcatggagagctcaggcctccagcagagggagtgcagatgtggggaaagctgaccctggcgccagctggccagggccat

SEQ ID NO: 479905 - DNA, 406 bp, Homo Sapiens
  misc_feature (191)..(192): n is a, c, g, or t
acgttttccccacatcccgggaggaacccccggaactgtgccagccttcgggcaccccggcacagacaactgtgcttggcaggagcttccagacacgcccaagtggatgcgatttgggattggaacgcaatagtgaaacacggagacgggtttctcaatgtgagatcaaagcgtcctcccaaagcctgttnncaagctctaagcccgatttctcaaaatgttaccagtttagttaaagggtaaactacacctgttgaaggccaagttcagggcagctgttgtgatctgtgtagttaatgtatttattaatgcttgacttttaaaatcctgggcataaatagtgcagagcctcgtatgtttgtcagttcatgccgagatgaaataaatcacgcagaaagtgccagtc

SEQ ID NO: 479906 - DNA, 646 bp, Homo Sapiens
attgtcaacagtgtttttatttatacctacaaaaagaaaacaagatgatggtatcaaaaggacaatttacaaactaagaatagtaacatagctttcagcatcctgtgcctgaacattacacatctacaagtctttcaagtcttaatgcaacaggaatgtgtctggagaccagcaagaacatcaatagagagcactgatcccaagcaaaagccactaaccttttagatgagaagtccacacaacgaattgttagggaggattggggagaagcagcccattgcttaatacattggaaccctttccctaagttgagtttcaaccatgaatgcaataactagcataaaacgattcttctgctcattttctgaagccaacagcagaacctgaattataattgacagacatggaggcagaagagttaaactctgctagatttcagctttgctcaggccataatattttttgagtttttgaatttactgttattttatgattgcaatgtcccaggtggaaaaagggaagcaagcaatccaaataaccacttgctttcccagagacctttccctcaaacagatgctttaaacatagaggtaccaccacaaggatgccctactctctcgcagctcttgaagcatctgtttcggta

SEQ ID NO: 479907 - DNA, 167 bp, Homo Sapiens
catgtttaatttctttattttctccagaatatcttaatattgaaacccaagttgttactttgagaaagggaaagacagagaaacatgaagagacaaacatttcatttcatttaacttatggtattgtgagcagtcacttttgtaggcaacacttgttttctttgtag

SEQ ID NO: 479908 - DNA, 985 bp, Homo Sapiens
cccggggggtctgtgttgatgacccgctgtacgttggattgtccaggcccgggaggccacgtctgtgcgatcagatcccggtagatcttgacttgacctgctaggccggcaagcgtttcgttctgcttcatcatggagtgcagatcccacggtggggaagcctgactttgcgccaccatcatgcacagaatctggcaggtcttgcacgttgttggtgaagatgataaatggcccagtcctcgtgctcatcctggaagcgctggatcaggtggaccaggtaggcgtccttgaccttctcaggcaccagcaggtagcgctggtccagctgctccacggtgctcaccggggcctgtgcttcccaggaagaagggctggttggtggccagaccctgcagctcccggagtgtgtcggtcagcgtggcgctgaacagcagtgtctgcctgcgggccggcacagccgccaggatggcctccaggtccacggtgaagtcagtgcagccctgttccagcagccggtctgcctcatccatcaccaggaagcggatcttctttatactaaaagtgttggagctgcgcaggtgatctgccaggcgccccggcgtggcgatgaccacgtgtggtttccgagagagctccagcgcctgggccaccatgtccatgccaccgacgatgatgcagtctttcagccctagaggcttccccaggacccggaactgctctgcgatctggtaggccagctccctggtgggtgtcaggacgaggcagaagatgccatagggatcctcagacagcttctgcaagatgggaaggacaacgctgctgtcttcccactgcctgtcttagcacagcccaagcagtctcgaccctccaggatggcggggatgcagccgagctgcacgggcgtgggctgcttcaaacccagcctgccgacattgttccacgagccacgatgacagcccgagctccgcgaagcctgccatccttg

SEQ ID NO: 479909 - DNA, 1016 bp, Homo Sapiens
  misc_feature (97)..(150): n is a, c, g, or t
  misc_feature (412)..(463): n is a, c, g, or t
  misc_feature (926)..(926): n is a, c, g, or t
  misc_feature (934)..(934): n is a, c, g, or t
  misc_feature (940)..(940): n is a, c, g, or t
  misc_feature (955)..(957): n is a, c, g, or t
  misc_feature (977)..(977): n is a, c, g, or t
  misc_feature (982)..(982): n is a, c, g, or t
  misc_feature (995)..(996): n is a, c, g, or t
  misc_feature (1014)..(1014): n is a, c, g, or t
gcatggcgctctgaagacgccggcgcccgccgccttgaggagccgctgcccccgctccctgaagatgggggaacaatgaaataagcgagaagatccnnnnnnnnnnnnnnnnnnnnnnnnnnnnnnnnnnnnnnnnnnnnnnnnnnnnnnttgactcctttccgaggcaccatgctgacccgcctgttcagtgagcccggtcttctctcggacgtgcccaagttcgccagctggggcgacggcgaatacgacgagccgaggagcgacatgggcgacgcgccgtcaccgccaccgcctgcgcccgggccaggggctccggggccagcccgggcggccaagccagtccctctccgtggagaagaggggacggaggccacgttggccgaggtcaaggaggaaggcgagctggggnnnnnnnnnnnnnnnnnnnnnnnnnnnnnnnnnnnnnnnnnnnnnnnnnnnngcgagcggcccaagaagcgcgggcccaagaagcgcaagatgaccaaggcgcgcttggagcgctccaagcttcggcggcagaaggcgaacgcgcgggagcaaacccgcatgcacgacctgaacgcagccctggacaacctgcgcaaggtggtgccctgctactccaagacgcagaagctgtccaagatcgagacgctgcgcctagccaagaactatatctgggcgctctcggagatcctgcgctccggcaagcggccagacctagtgtcctacgtgcagactctgtgcaagggtctgtcgcagcccaccaccaatctggtggccggctgtctgcagctcaactctcgcaacttcctcacggagcaaggcgccgacggtgccggccgcttccacggctcgggcggcccgttcgccatgcacacctacccgtacgcgtgctcgcgcctggcggggcacagtgccangcggccgncggctngggcggcggcgcggnnncgccctgcggacccacggcnactgngcggctacgaganntgtatgcggcgcaggcgntg

SEQ ID NO: 479910 - DNA, 945 bp, Homo Sapiens
  misc_feature (5)..(5): n is a, c, g, or t
  misc_feature (7)..(7): n is a, c, g, or t
  misc_feature (38)..(38): n is a, c, g, or t
  misc_feature (43)..(43): n is a, c, g, or t
  misc_feature (45)..(45): n is a, c, g, or t
  misc_feature (76)..(76): n is a, c, g, or t
  misc_feature (166)..(166): n is a, c, g, or t
  misc_feature (568)..(568): n is a, c, g, or t
  misc_feature (570)..(570): n is a, c, g, or t
  misc_feature (573)..(573): n is a, c, g, or t
  misc_feature (576)..(576): n is a, c, g, or t
  misc_feature (582)..(582): n is a, c, g, or t
  misc_feature (589)..(590): n is a, c, g, or t
  misc_feature (593)..(593): n is a, c, g, or t
  misc_feature (596)..(596): n is a, c, g, or t
  misc_feature (621)..(627): n is a, c, g, or t
  misc_feature (629)..(629): n is a, c, g, or t
  misc_feature (636)..(637): n is a, c, g, or t
  misc_feature (645)..(647): n is a, c, g, or t
  misc_feature (657)..(662): n is a, c, g, or t
  misc_feature (668)..(668): n is a, c, g, or t
  misc_feature (686)..(688): n is a, c, g, or t
  misc_feature (705)..(705): n is a, c, g, or t
  misc_feature (708)..(752): n is a, c, g, or t
  misc_feature (764)..(765): n is a, c, g, or t
  misc_feature (772)..(772): n is a, c, g, or t
  misc_feature (782)..(782): n is a, c, g, or t
  misc_feature (784)..(787): n is a, c, g, or t
  misc_feature (792)..(792): n is a, c, g, or t
  misc_feature (794)..(794): n is a, c, g, or t
  misc_feature (805)..(805): n is a, c, g, or t
  misc_feature (807)..(807): n is a, c, g, or t
  misc_feature (819)..(819): n is a, c, g, or t
  misc_feature (892)..(892): n is a, c, g, or t
  misc_feature (929)..(931): n is a, c, g, or t
  misc_feature (934)..(934): n is a, c, g, or t
  misc_feature (937)..(938): n is a, c, g, or t
  misc_feature (941)..(941): n is a, c, g, or t
aggtntnaaatctcgaacgccgccagaggccatcgcgntctgntntagcctgctggagtacaccccatcctcaagntctccccactagaggcctgtgcgcacagcttctttgatgaactgcgatgtctgggaacccagctgcctaacaaccgcccacttccccctntcttcaacttcagtgctggtgaactctccatccaaccgtctctcaacgccattctcatccctcctcacttgaggtccccagcgggcactaccaccctcaccccgtcctcacaagctttaactgagactccgaccagctcagactggcagtcgaccgatgccacacctaccctcactaactcctcctgagggccccaccaagcacccttccacttccatttgggagccccaagaggggctgggaaggggggccatagcccatcaagctcctgccctggctgggcccctagactagagggcagaggtaaatgagtccctgtccccacctccagtccctccctcaccagcttcacccctttggtgggctttttaagaggattttaactggttttggggagggaananaanganagggtnttggggnnatnaanacctcctacccccttggccccctcnnnnnnncnaaacccnnaaaaaaannngaccccctcnnnnnntttttnccttgtaaataaaaacannncagcccgtctcttcttnccnnnnnnnnnnnnnnnnnnnnnnnnnnnnnnnnnnnnnnnnnnnnnaaagaaaacgtnnattcgcnccgtccaacntnnnnccccncntcctacagctntnactcccctcctntcctctgcccccaaggtctactccctcctcaccccaccctggagggccaggggagtggagagagctcctgatntcttagtttccacagtaaagtttgcctgtgtacaaannnccnttnnatnaatt

SEQ ID NO: 479911 - DNA, 415 bp, Homo Sapiens
ctgagaccagccagtagtcacagaactgctgtttacacagttctcaggaggctgtggtttcttagaatatgaccatgagccatttcacagaaaaaccatcccaccgaagatattgtctatcaccccaggggccatctgaaggtctctttgcatttctccatgcaaagaggagaaagcttttgctttcacactgtcccttcccaaatatgtgagtcatggaattgtcaaagtaagccttccctcaccagcaaattgtctcctgatctgaatgaatttgtctcttaatgcatccatagtcacacttatggctatttctgacgtatagccagttttcttccctccttgctattaaagccagagcggtaattccaaattatttttcagtaagacagttaatcagcattattgtgagagg

SEQ ID NO: 479912 - DNA, 1772 bp, Homo Sapiens
  misc_feature (680)..(680): n is a, c, g, or t
  misc_feature (828)..(878): n is a, c, g, or t
  misc_feature (1062)..(1096): n is a, c, g, or t
  misc_feature (1620)..(1660): n is a, c, g, or t
  misc_feature (1734)..(1734): n is a, c, g, or t
agtaagaaccagaactttattgtagcggatacactttctgacctatcatgagtatacacatctgcgaagggaaaccgcgcggcgacagcgtgaggacatcccctgggcgtgagcgtctgtccgctgtctaaacagagcagctacagggacgggacatggaggatggccacacatagcacagccaccagtgtcctcagaactagcagtcagggtcacagaacagtattcaaaatgattgcccacctgttttagaaatctaaaattttacatgtaactaagagcaaagtgctatgtgggttttagaccatgactgtttgtttgctctcctgccctaccaccaagcaaagcagcagggctcctgggggagagggattttcaaccccccctgttggcagggggtgctctggggaggagagaggagagaacaggctgttttggaaaaattccagcattttgatttcgggccatgcgtctctcctggacgttctgagtacggatcgctcaggcctcctgccgtctccaaaaggagtggtcagccggtctgcaggacacctctcagtttctccttttaccagcaggaaaatgtacatttaagcataaaccacaaggctgcacacggtgagaccaggccactgcccagggagctgctgtcggaggaggagtgtggaaaaggggccagnggaccccgccacccccacaccaaattaggaacaggtagaatcccaaaggcaaggcccggccacttgtagctaccctgatccagtctcttgagcagcacagctagaggcctgtggcccccgactcccagccatactcagacctgagcannnnnnnnnnnnnnnnnnnnnnnnnnnnnnnnnnnnnnnnnnnnnnnnnnnagggaggacccggcgggaagagcccgtgctcagagctccgaacttcactttacattccagtcccgggttacactagcacaaaggacacaaggaatccgatttatttacaaaatattaaaaagtcagttaatcatctacacagtaccccccatcctgccattatttatacatgcactagtttggnnnnnnnnnnnnnnnnnnnnnnnnnnnnnnnnnnntgattaccgggtgggagtgagcatgttttaccctttgtcaacgagcccagctggcatggcttttctggagtgcgaggggccagtgtcctctccccggggggagactccagacacaaacgcggggcctgaggcgctgggaggcccctgtgcgagccggatggcggccagagaggacgtgtcagctcctcgtgggactgaagagcgcgaccaggcagagggtgggcggggagcctagggtcctacacaccaagcacagcgacgatcgtggcggggaggggtctgcacacctactggccgaaatgactttgtacatcgtggacccttgggactgggagaacggatggcagcagagtcttcgaaagcagaaaccgaggtggccgggggcacgggtcagtagctgagggtggagtcatcccactccagctgctgctgccgggttgcgttctgggggtcgccctgctccccctcctcctcctcgctgctctccgactcggcgctggtgatgtcatcctcttcttcgccgnnnnnnnnnnnnnnnnnnnnnnnnnnnnnnnnnnnnnnnnnactgctgtgctggtcctcataggtctccatggggttgacggtgatggtcagggcagagtcgtcccagtccatcncgttctccttcccggtgtcctgatcccgcatggtccgc

SEQ ID NO: 479913 - DNA, 722 bp, Homo Sapiens
  misc_feature (48)..(48): n is a, c, g, or t
  misc_feature (57)..(57): n is a, c, g, or t
caggctctagacatgcgtaatgatccgcagggtgccaccaggctcggnccggttacntccggtcatgtgcgactgtgtcgacgcagaggacaccaagcagaccagctctggctcgcggcggacgtcccaagaggtctccctcaaaccgtgccacgtggaggagctcgcggtcgccggaaacatcgtgcgccacatcacggaccgcggtgcgcccacccgggcctcggagcctgcctcgaccacgaggcattgccctgagtggacagtcgtcttcgacctgtcggctgtggaagccgctgagcgcccgagccgggcccgcctggagctgcgtttcgcggcggcggcggcggcagccccggagggcggctgggagctgagcgtggcgcaagcgggccagggcgcgggcgcggaccccgggccggtgctgctccgccagttggtgcccgccctggggccgccagtgcgcgcggagctgctgggcgccgcttgggctcgcaacgcctcatggccgcgcagcctccgcctggcgctggcgcttgtcgcgcgcggcggctgtacgtgagcttccgcgaggtgggctggcaccgctgggtcatcgcgccgcgcggcttcctggccaactactgccagggtcagtgcgcgctgcccgtcgcgctgtcggggtccggggggccgccggcgctcaaccacgctgtgctgcgcgcgctcatgcacgcggccgc

SEQ ID NO: 479914 - DNA, 1175 bp, Homo Sapiens
  misc_feature (124)..(189): n is a, c, g, or t
  misc_feature (358)..(382): n is a, c, g, or t
  misc_feature (404)..(412): n is a, c, g, or t
  misc_feature (632)..(678): n is a, c, g, or t
acattctcttttattgagctacacaggaattttccattagtcagagaagtagactggcagtgtgtaagatatcacagaaacctcaccgattgggaatagaaaggcttacaaagacccgtgggcnnnnnnnnnnnnnnnnnnnnnnnnnnnnnnnnnnnnnnnnnnnnnnnnnnnnnnnnnnnnnnnnnngcctcctctttatttgaaatggctgtgactggtcttcttcagcaaagattaagtcttaaaagtgaaaccgtgaagaggtttagggtttgggtattagtcaaagtagaaatgacatagggattggtcatggaaaacgggcgggctttaatgtaaacactacattccatcnnnnnnnnnnnnnnnnnnnnnnnnnccatcttgtggtatttaaaaannnnnnnnngttctttttgtctgcagcacacacatccccacatgagagagcggacacagggcaccgaaacaaaggcaggggtggggaggggcgcacacacgaagggaggtgtcagccgggaccggaaatccaacacggcaaaggaaaaaaaacacaacccgtttcccaaagactaggaaaactgatctgtggggtggggggctggtaatacatagtactcggcgggacnnnnnnnnnnnnnnnnnnnnnnnnnnnnnnnnnnnnnnnnnnnnnnncccctacaaaggctatccttagaaagggggtcggtgggcagattgttttctatggggctggatttccttatacgatgggtgttctttttggcagctactggccagtgagagctgtgctttttctatacgaacctggagtgagcgtgtggcgggagtggcttagggccgccaggtggcgtctgtggtgtctgggcggccggcaggcagcagggtttgcagtggcctgtggccttctggaaagcccggcctgagcacactcctcggaccagtgcaccgcaccggagccccaggcggcagatgggccctgccccccagcaggagctccaggggctgcgccgcgaggtgggacgggggcaggcgtcggtgcagatgggtatgtttgttttgcaagaaaaagaaatatggatgaaatggtgagttttcctttttttaagctacaaagcacatgagaaatgttctgtttttcctttcaaattctaaatgtgaagactcaccaa

SEQ ID NO: 479915 - DNA, 766 bp, Homo Sapiens
ttttaaaaccaccaaacaaccaaaaaccctaggacatttgactactgttgggttgggcgagatggggcagcagcacgaggggtcaggaaccccatggaagcccatcccgggcacctggggaagcctggaccccccctgagaccctgactcgggtcaggcccacaagtccggccctgcccgccacgcgtgttcccctcgctccccactttcccacatgccctcttggagcggggctggtttcaactctgcaggtgaacttgagtcccctcctgtcagctgcttttagaaagcagaccaagtctccctgttctctgattcttgccatcttaacatgaataaagaaaactcaggagacagtggattggtcggagcaatgattcttctaaattcctgaaattaacaaccaccaccacccgaaagagaagcatccttaaattgttctgtttttgggagtgcagagtgaggagaggcttagggcttcggccatttctgaaagggtgtggaatttgccaagagcaggacggaactgagggcgcagaggctctaagggcgcaacacagagagctggctgggccaaggccagggctgttctgccattcacctgttctcagaaatggggctgagaggaacaccccggggctatcctcaaaaggagggactcccaaaccaagctcccatctggacatgtgtgagtgtgtgtacacacacacacgtgcatgctcacgtgccgtcccaggaaaacctccatgagctatgggatggtggt

SEQ ID NO: 479916 - DNA, 451 bp, Homo Sapiens
  misc_feature (24)..(24): n is a, c, g, or t
  misc_feature (143)..(143): n is a, c, g, or t
aaaaggaaccaacctccctggccnggaaatctgcctctgtgtcctgtggtcctcccctggcccacagaaggttgcccagcacctggtccctcagtttcctaccttccacatagtccatatttcacaaaggtaggaggattccnaagttgaagtgcatgaagtaaagcttgatccgaaacccatctgggacagtgatattcccaagtcacctctgaatcactgggataggagtctggataaccaggcgactggatctggccaaacatattgtttagctccacggtgtgggctgaagcctttgacagggagaagcacagagcataatagagaagcagccacctgaaagacatgaatgtaggtctcattttcctgccttgggtgctcccggctgcccggccttggtcctcccagcttgacttgcctgtgagctcgtgcccggtgtggtgtccgt

SEQ ID NO: 479917 - DNA, 882 bp, Homo Sapiens
  misc_feature (17)..(17): n is a, c, g, or t
  misc_feature (77)..(77): n is a, c, g, or t
  misc_feature (81)..(81): n is a, c, g, or t
  misc_feature (107)..(107): n is a, c, g, or t
  misc_feature (131)..(131): n is a, c, g, or t
  misc_feature (173)..(173): n is a, c, g, or t
  misc_feature (176)..(454): n is a, c, g, or t
  misc_feature (486)..(486): n is a, c, g, or t
  misc_feature (494)..(494): n is a, c, g, or t
  misc_feature (512)..(512): n is a, c, g, or t
  misc_feature (548)..(548): n is a, c, g, or t
  misc_feature (558)..(558): n is a, c, g, or t
  misc_feature (607)..(607): n is a, c, g, or t
  misc_feature (649)..(649): n is a, c, g, or t
  misc_feature (691)..(699): n is a, c, g, or t
  misc_feature (855)..(855): n is a, c, g, or t
  misc_feature (858)..(858): n is a, c, g, or t
  misc_feature (880)..(880): n is a, c, g, or t
ctttccaaggctcaccntcggggacaattccttgggcttctcctgaggtaatgattacccccccacccacggctgantctntgaggccccatcctttccctacgttntctcccatcttttttcctcttcantctcccagtcttctggtttgtttgtttctttgttcgtcactnagnnnnnnnnnnnnnnnnnnnnnnnnnnnnnnnnnnnnnnnnnnnnnnnnnnnnnnnnnnnnnnnnnnnnnnnnnnnnnnnnnnnnnnnnnnnnnnnnnnnnnnnnnnnnnnnnnnnnnnnnnnnnnnnnnnnnnnnnnnnnnnnnnnnnnnnnnnnnnnnnnnnnnnnnnnnnnnnnnnnnnnnnnnnnnnnnnnnnnnnnnnnnnnnnnnnnnnnnnnnnnnnnnnnnnnnnnnnnnnnnnnnnnnnnnnnnnnnnnnnnnnnnnnnnnnnnnnnnnnnaacaattgtttttgagcagatagctattcatnccaaattnccgtgtacccactctgtntcaggagctcttctaggtaaagctgagatcacaggnacagcaggtnacaggcctagctatagttaggaaaacacaagcggtaaaatcgagtcctnacagccataccacaaggtacgtccatttggactacaagaagngcttcctttaaagttcctatttcagcataaagaagctgtccnnnnnnnnnaggaatagtttggaccttgtgcctcctgtgggaggctgaggactgcaagaggagagctagcagatatgcctgttcacccctctctggtacttgtggcttgctagtatgtttttatgataatctcgggcattgtttgcattgtgtttattaataggnttngttttattcttcctttttacanta

SEQ ID NO: 479918 - DNA, 929 bp, Homo Sapiens
tttgcagtttcattttgtttcagaatcagtttggccataaaaatgggactgggttggggacaggcggagcgattgaaccactggagatgaggaggaggtggcaggcgcctctcctggggtggggactgagggctgtggagacagtaccatggtgaaggaccccatggcaatgggagtattgcactgagccaggtttcgggggaacggggacgtgtcgggatggcgtagggggacagagcctggcaggagacacatggaagtttccgccttgtcagtctcagagcaaacgccttttagtctttacagtacaggaatttggacactgcccacgttctcagtggacagcagccatcagaggtgacccaggaggggaagtgggcattggtcaccaaggtatttacagacttctatcatgggggacagcggggtgggtccagcagcctccctcgcgggggatctgagggagaccgagttcgctaaatattataaataggtcttgccgtcctcctgcccccgcccctcggcacagtcagtggagcacgtcagcctcggtttacagttctctgaaaaggaaccaaaaaacacaaccaacaccaagtatatctccaaaagggccttggagacaacacaagaatggaaatgaaatggtatccacagaggtttgcacatttctcctgcaaaggcgcgtcggccgggcactggtgtcccgtgtcactcagcggagggaggctgccctggacgcggtgccgcccgcccggggccacacctgctgctccgagtcaccccacaggctcttggcgtctctggtgccagggctctgggcagggcgactcgaggactccctgggaggactggtgtggcctctgggggttgggcctttgagatgacaatgcccctgtccctgctggccatccaggtcccagacccaa

SEQ ID NO: 479919 - DNA, 763 bp, Homo Sapiens
ccattctaatgacagagtaaggaaaattcttgcctgcaacccacaagccctctgcccgtcaattttaaccatgataatgaccaaggtccctgcaatgccaccacaccattttcttttccctcttttcactccatggaaacacatcaattccagatactcctggagattgagacattttcagtttgtcgaggtcaaaatgggtttaagctttcagattttgctgctttctccctgggcttcccccactttgttctgtagaacttcgcttgtgcatcttctttcaccttctgtcttgttgatatcaagacctgctaatttcaaggctaattcattgctgtttgccaacttgcagaggaaaccaggatatcatgtattgcatttcttctacctgtttcttcctgaagcaataaaatctgcatatgtagtttccacatcagtcattgctaccaaatatccacatagcacgggactgattggaaaccttcttgtctttaattcattgactatactagatctcttttttcttggagatgaccttcagatttctatcagaaatcacttctttggggaaaccagggcttctcagaaagtcaggaaacttccccggacctagtcagcgcaggtccccgcgcacgccgccacggccgcagtcccgccgcgcccgccgagtgctcggtcagctcgcgccggcccgcgccccacctgccagcagcagcctccgcccccccgctctcgagtcatcgctgtctggaacacgcgatga

SEQ ID NO: 479920 - DNA, 997 bp, Homo Sapiens
  misc_feature (7)..(9): n is a, c, g, or t
  misc_feature (33)..(33): n is a, c, g, or t
  misc_feature (41)..(41): n is a, c, g, or t
  misc_feature (47)..(48): n is a, c, g, or t
  misc_feature (147)..(207): n is a, c, g, or t
  misc_feature (213)..(213): n is a, c, g, or t
  misc_feature (216)..(216): n is a, c, g, or t
  misc_feature (931)..(931): n is a, c, g, or t
  misc_feature (951)..(951): n is a, c, g, or t
  misc_feature (959)..(960): n is a, c, g, or t
  misc_feature (978)..(979): n is a, c, g, or t
gtaaaannngatgagcgtgggagggtgggcggnaacatggngcgggnncgcctttcctcttgaagaacttccactggaccttgatggcgagcatccagtcgctgaccgagggcctctggcaagcggaggtgcagacatgcgcctggnnnnnnnnnnnnnnnnnnnnnnnnnnnnnnnnnnnnnnnnnnnnnnnnnnnnnnnnnnnnnttcggngcncggcgccgccggggagggtcgcgccgcgggcgcccgcgcttcacttgcccgccttctgcgccttctgcgccgacttggtgaccttgccggcgccgccgctcttcttctccacgttcttgatgacgcctacggccaccgtctgcctcatgtcgcgcacggcgaagggccgagaggcgggtactgggagaagctctccacacacatgggctttcccggcaccatctccacgatggccgcgtctccagacttcagggacttggggttgtcctccagcttcttgccagagcgccggtcaatcttctccttcagctccgcaaacttgcaggcgatgtgggctgtgtggcagtcgatgaccggggagtagccggcgctaatctgccccgggtggttcaggatgatgacctgggaggtgaactgagcagcctcctgcggcgggtcagacttgctgtccccacacacgttgccccgccggatgtccttcaccgacacgttcttcacattgaagccgacgttgtcgccgggcagagcttcgctcagagcctcgtggtgcatctccactgacttcacctcagtggtgatgttcactggcgcaaaggtcaccaccatgcccggccgcagatgccggtctccacccggccacgggcacgtgccaatgccggcaatcttgtaaagtctgcagcggagcgcaggggcttgtccgtggggccctgggggnaagatggtgtcagggctcancaggacanncgcttcgttgcctcttanntcaacttcagccttgaac

SEQ ID NO: 479921 - DNA, 880 bp, Homo Sapiens
gaagtctggggcctcgatgaacaccacgtaagggacaaactcggccgttcgtagcaccttcaccgcctgggggttgacatccagcacgcacaccttcccagcagcgaccacgccccggatggagtcaatacgtgtgccatacaggttgccctcgtattcgccatgctccaggtagcgcccagcacggacgtcagcctccatctccccacgggacacaaagctgtaaccctgaccttcgcgctctgattctttcggccgccgggaggtgtaggtcatcgtggtgccatagcgatctggatctcacatgatgagcttgttcttcaggttgtgccgtcgcacgccgtgagcgccaatcagtaccagggttttccgggggaaggggtgcatttgggacagcggcgccaaatgggaaggtcatgccgctggaaccctcgtttcaggtgcccacattcagcaccttgtgcgcctatttggtgaaagggccggcgccgcctctcttattttggtgtcagattggtgacgcctacggccaccgtttgcctcatgtcgcgcacggcgaagcggcagagaggcgggtactgggagaagctctccacacacatgggctttcccggcaccatcttcacgatggccgcgtctccagacttcagggactaggggtggtcctccagcttcttgccagagcgccggtcaatcttctccttcagctccgcaaacttgcaggcgatgtgggctgtgtggcagtcgatgaccggggagtagccggcgctaatctgccccgggtggttcaggatgatgacctgggaggtgaactgagcagcctcctgcggcgggtcagacttgctgtccccacacacgttgccccgccggatgtccccaa

SEQ ID NO: 479922 - DNA, 1119 bp, Homo Sapiens
taagggacttagaaccccggaaccaggactttcacccccgaaattttcaaggaccccagtgggggcaagccctccttccggggaatcccctggtccccccaaattcccccaaatttcattttcctccgggggattcttcctcccaggaccttttcattccgccggtaccaagcagaagaactctgcttccatcagtaggggaatctcataagcatcagggcttcaaaattcatgatgagggaaaccaaattagtacctgaatgaaacgctggggcccacttctccgtgatccacacggggagccagtccagactttccaagcccacaggacattgtcacaggcgaagtacaaggctcgattgaggtgactaacagtgatgcagaatctcaggacaacatctgatagggtgaacagctcttttggctgactcaagggcatctgctgagttacccaggcgtagaagctttcttccaaggctcaggtggctctccagttgtcgaatctgtttctgtaactcaggactggctccatgcctctgcagcgcatggccaagaagagagcaagcatactgggcggcccatttctccaggccagaggaagggaaaggcataaggagaaaaaagagtctagaaagggttggggagcactattgaatgttgagcaaattagagatttgacaatgatgaggcctgaaggggccagtgcaggccgcaggggtccatcacaagcacatcagcgtgagcatgtacgtgatcgatgagggggaggcagacagttggagggcattttattcctcagaataggtgaactgagagatttcaaggccctctagctgaatggagaccaaacgccagggcggaggcaggggagttcccgaatggcagcacggtgtggggacacggaaactgggagtgcctcctcagctctgggggcagagtctggggctatccaccgtggggcgaatgctcctcattccatcaccgcccagtgaggacactgtcggtcttatagtggacacagcaatcctgagcggcctccccgctggcccactcatgcctcagtttccccatctcttccgcgaacggaaaggaacatctcatcccgggaattccggaccg

SEQ ID NO: 479923 - DNA, 1037 bp, Homo Sapiens
  misc_feature (4)..(4): n is a, c, g, or t
  misc_feature (16)..(17): n is a, c, g, or t
  misc_feature (22)..(22): n is a, c, g, or t
  misc_feature (24)..(24): n is a, c, g, or t
  misc_feature (33)..(33): n is a, c, g, or t
  misc_feature (38)..(39): n is a, c, g, or t
  misc_feature (52)..(52): n is a, c, g, or t
  misc_feature (58)..(58): n is a, c, g, or t
  misc_feature (71)..(71): n is a, c, g, or t
  misc_feature (79)..(79): n is a, c, g, or t
  misc_feature (102)..(102): n is a, c, g, or t
  misc_feature (842)..(842): n is a, c, g, or t
gggnactaacaaaaannagttntnataaacagntgttnntgcctgcatcctngggccngacacccaccctntaagtgcnccccaccagctgcagaaggccanaaggtcctgctgctgccgggcttcagctcccccagcaccgccactgtgggcgagaggccgctgaccaggtcatcgcacactggttccaggaccatgagtagttcatcatcaaataggaccgcctggaagatgtcactcaaagctgtctgttgtggctcaggcagctccgcaaatggatggaaattcctctccaggagcagggtcgcttgctttaaaacacttaatggtccatcctgggaagatatcccatgcgcagcatctggcatgtctatgaatgcaaactctcgaaagaccagggggtccaggtagacagagtcaattctcttcttgttctcgaagccaccttgcttccctcggagaaggcagaactcgaactggccgtccagtttcacgtataactcaatgacaccgtaggcaatggtggtggcagctgggatctccagcaccatgttggagtccttggtgacattcccatcctccgtcgctgacacctgcaccgtcttggtctggatgcccacgatgccaccacacttctcctcgacctgcatgtgctcagagatcacacacttctgcatcgttgtgatcttctgtgtcaaaacgcacaggacctcattccttccctccagcacctgctggagcacagtgtttctcagatttattgttctttcggcagagtctctgatgagctgctgcaaatccacctcctgcttcctcagggttccaaatgaagactggctttntacgcggctgctgccccccaggttcagcttgaccttccccagtgcagtctccagggttcactcacgtggtttgcaaacttgccctcgtatttcacaaagtccgactccacgaccaccgcgcgcccgctgctgggtccccggcagccgcgccccctgcgctggcggagtcggaggagcctgcgctgggccggcggg

SEQ ID NO: 479924 - DNA, 510 bp, Homo Sapiens
tagtaaggagcatttagcaatgatggaaaggattcttggacctctacctaaacatatgatacagaaaaccaggaaacgtaaatattttcaccacgatcgattagactgggatgaacacagttctgcccgcagatatgtttcaagacgctgtaaacctctgaaggaatttatgctttctcaagatgttgaacatgagcgtctctttgacctcattcagataatgttagagatacgtatctctaacattagctcttactatgaaatgtatttgtaaaatcaatagtttggcatataatagttatctaataggataatgtaaccagttcgatataataatgaagagatgaagtaactttacagtgacgaagtaacttccaaggaatatacttaagaaatgttcagtgcttatatgaagcaaccttaagaagatatggagagacctgtcatgcccttggatgagaagacccatattataaagatatacattctcctctaagtaatgttagaata

SEQ ID NO: 479925 - DNA, 870 bp, Homo Sapiens
ttgggaagaagtggcgaagttacttttgagggtatttgagtagcggcggtgtgtcaggggctaaagaggaggacgaagaaaagcagagcaagggaacccagggcaacaggagtagttcactccgcgagaggccgtccacgagacccccgcgcgcagccatgagccccgccccccgctgttgcttggagaggggcgggacctggagagaggctgctccgtgaccccaccatgtcctctcctaccacgagttccctggatacccccctgcctggaaatggcccccctcagcctggcgccccttcttcttcacccactgtaaaggaggagggtccggagccgtggcccgggggtccggaccctgatgtcccaggcactgatgaggccagctcagcctgcagcacagactgggtcatcccagatcccgaagaggaaccagagcgcaagcgaaagaagggcccagccccgaagatgctgggccacgagctttgccgtgtctgtggggacaaggcctccggcttccactacaacgtgctcagctgcgaaggctgcaagggcttcttccggcgcagtgtggtccgtggtggggccaggcgctatgcctgccggggtggcggaacctgccagatggacgctttcatgcggcgcaagtgccagcagtgccggctgcgcaagtgcaaggaggcagggatgagggagcagtgcgtcctttctgaagaacagatccggaagaagaagattcggaaacagcagcagcatgagtcacagtcacagtcgcagtcacctgtggggccgcagggcagcagcagctcagcctctgggcctggggcttccccctggtggatctgatgcggcaaccagggctccggggaa

SEQ ID NO: 479926 - DNA, 1049 bp, Homo Sapiens
  misc_feature (114)..(114): n is a, c, g, or t
  misc_feature (313)..(314): n is a, c, g, or t
  misc_feature (324)..(324): n is a, c, g, or t
  misc_feature (336)..(336): n is a, c, g, or t
  misc_feature (340)..(363): n is a, c, g, or t
  misc_feature (372)..(372): n is a, c, g, or t
  misc_feature (378)..(378): n is a, c, g, or t
  misc_feature (390)..(390): n is a, c, g, or t
  misc_feature (409)..(409): n is a, c, g, or t
  misc_feature (432)..(433): n is a, c, g, or t
  misc_feature (451)..(451): n is a, c, g, or t
  misc_feature (453)..(453): n is a, c, g, or t
  misc_feature (465)..(465): n is a, c, g, or t
  misc_feature (468)..(468): n is a, c, g, or t
  misc_feature (477)..(477): n is a, c, g, or t
  misc_feature (479)..(480): n is a, c, g, or t
  misc_feature (486)..(486): n is a, c, g, or t
  misc_feature (676)..(676): n is a, c, g, or t
  misc_feature (701)..(701): n is a, c, g, or t
tcagtcttcaaatattttttattggaaggccatgcattgccttcatttattgtatttcaaatcactgtacatttacttttgtgaaaacactgcctgcattttctagtacaaaanaaacctaaaaattgtttcaggaatgtagagaaatatccaacttaaatagcgaaaaagtgcaccataattactgctgcactgcagtcatttctgcaattcccatgtttcttaaataactatcttgtcagataacacacaatataaagagcaattatgaaaaacagacatttacatatacttctaaaggtgttattggggnnggatcctgtnggcattggatanccannnnnnnnnnnnnnnnnnnnnnnnatcataggngcggcngcggtggcaggntatgcatatgcctgtcggntcataccattgtgcatatttggnncattacttccgtattgcngngtgctatcatanccnttctggtangnncctgtngggttaccagtcctaaaactggtctgtataccgagcggacacaaaattacttccaaagctcccattggtgtaatttgcagcactgtaaacaccattctgagtttttgccccaaaatctcttttaagcaggctagagtaacctctgtcataattttccctgtctctaaaggtgttaagtccacccctgttntgcccgcagagtatctgtcccgacntgtcatccttcatgcctcctctacccctggggcgacctgaacctctgtcttcgaccaactgaagcaacttgggattaattgcttgattagcttcacgaatcacatatataagttctctcactttgctttatgttattaggtgtaaagaaagtgtatgctttgcctgttttggtactgcgagcagttcttccaattcgattaatataatcctctgaggagttagggtagtcataattgatgacaaatttcacatcttccacatctgtaaggtgttgcagtgtggcaaaatagcaatgtacggagttttgcacaccacaacagccagaccaaaaataaaaagttagacaa

SEQ ID NO: 479927 - DNA, 1677 bp, Homo Sapiens
ttcctaagctgttttaatccatctgcttcaattggaggagctcacacatacccatctcgtccgtcagttttctggtaagctcatcacatcttcttttggtttccacaatacaatggttttattcgtccttctcactcatgatctcttccattagacgaataagtctaataataggagagagaaaggaaaaatcctgagttttaaaagaccattgctagggccacacatttatggtcagcaaacattaagttcaatttacatggctggaagtcaaagaggaaacgcctgctaatccacttatcgagcagttcgacccttggtccttaagtcaaccaggggacacatgaattccttctataggaaagctataaatggtgacagccattatttgaaggattcaagaaattttcaggattagtaggctaactaaatgaaatcacaccaactgaaataacctaacaactcaccacaatgatccctcaattttactgcaaagttgttaggaagcaaatataacagagttaataaaacttacttttcatccttttctacgtcatgacacacatccacaatctgaagaatgttgtggtttgcactcagttcaagtgcaccaatgtttatatgaatatagtctttcaggaaatcttcagcaagctgtcttacttcttttggccaagtcgcactccacattagagtttgcctatcaggtcttatttgatccacaatcttccttatttggggttcaaagcccatatcaagcattctatctgcttcatcaaggacaaggtaggttgttcttctcagattggtttttccacactttaaaaagtcaatcagtcttccaggtgttgcattacagatttcccacacctctctccaaatcacgtatttgtggtccccttaggagcaccaccggtagatacaagtagacttcaagcgacatgctctacaatattcagcagctacttgctgcacctgttgggccagttcccgagttggtgccagcaccaaacaaataggcccatcgcctctctctaggaatggctgatgattgatgtggacaatggcaggaagcaaataagacaatgttttcccagatccagtctgtgccactccaaccatatccaatccacttagagcaactggccatccctgagcttgaatagcagtgggttcagtgaaattctgtcttgcaataacatccatgacatttgcagggaaattggcttcataaaaatttagaactggcttcgggcagttgtgacctctaactgtaatttccttgcttcttctgtatgtttccacctcttgtgctgtgcgcctagccaaatcagggtgctcttgataaaaattcttctcaaatttaggcagctcatcaagattccacttctttttaactaatttctccccagggtttccaaacttctttccagataagggccctgccctacttcctccaaatcgaggtgcaccaaaccctcggtcccggccgcggtctcggtcactcgaataacccgacatggcgtcaatggttgcggttggcggggaacgaagtatatagaaaagcgtgcgacaagtcgctggaaatggcctcgatgacggcgaagccttgcgggggcggcagcggaggaaggacaccgatgacaccagccgaagctgcactactagagaccccaa

SEQ ID NO: 479928 - DNA, 1092 bp, Homo Sapiens
  misc_feature (18)..(18): n is a, c, g, or t
  misc_feature (21)..(22): n is a, c, g, or t
  misc_feature (26)..(26): n is a, c, g, or t
  misc_feature (38)..(39): n is a, c, g, or t
  misc_feature (47)..(47): n is a, c, g, or t
  misc_feature (55)..(55): n is a, c, g, or t
  misc_feature (57)..(57): n is a, c, g, or t
  misc_feature (66)..(66): n is a, c, g, or t
  misc_feature (71)..(72): n is a, c, g, or t
  misc_feature (77)..(77): n is a, c, g, or t
  misc_feature (94)..(94): n is a, c, g, or t
  misc_feature (101)..(101): n is a, c, g, or t
  misc_feature (104)..(104): n is a, c, g, or t
  misc_feature (113)..(113): n is a, c, g, or t
  misc_feature (115)..(115): n is a, c, g, or t
  misc_feature (127)..(127): n is a, c, g, or t
  misc_feature (131)..(131): n is a, c, g, or t
  misc_feature (135)..(154): n is a, c, g, or t
  misc_feature (156)..(156): n is a, c, g, or t
  misc_feature (158)..(158): n is a, c, g, or t
  misc_feature (171)..(171): n is a, c, g, or t
  misc_feature (175)..(175): n is a, c, g, or t
  misc_feature (180)..(180): n is a, c, g, or t
  misc_feature (182)..(182): n is a, c, g, or t
  misc_feature (184)..(184): n is a, c, g, or t
  misc_feature (186)..(186): n is a, c, g, or t
  misc_feature (189)..(189): n is a, c, g, or t
  misc_feature (201)..(201): n is a, c, g, or t
  misc_feature (217)..(217): n is a, c, g, or t
  misc_feature (234)..(234): n is a, c, g, or t
  misc_feature (245)..(245): n is a, c, g, or t
  misc_feature (262)..(262): n is a, c, g, or t
  misc_feature (276)..(276): n is a, c, g, or t
  misc_feature (294)..(296): n is a, c, g, or t
  misc_feature (304)..(304): n is a, c, g, or t
  misc_feature (310)..(310): n is a, c, g, or t
  misc_feature (314)..(314): n is a, c, g, or t
  misc_feature (321)..(321): n is a, c, g, or t
  misc_feature (324)..(324): n is a, c, g, or t
  misc_feature (336)..(336): n is a, c, g, or t
  misc_feature (348)..(348): n is a, c, g, or t
  misc_feature (353)..(353): n is a, c, g, or t
  misc_feature (356)..(356): n is a, c, g, or t
  misc_feature (359)..(359): n is a, c, g, or t
  misc_feature (362)..(362): n is a, c, g, or t
  misc_feature (364)..(364): n is a, c, g, or t
  misc_feature (368)..(368): n is a, c, g, or t
  misc_feature (403)..(403): n is a, c, g, or t
  misc_feature (411)..(411): n is a, c, g, or t
  misc_feature (415)..(417): n is a, c, g, or t
  misc_feature (421)..(421): n is a, c, g, or t
  misc_feature (455)..(510): n is a, c, g, or t
  misc_feature (762)..(762): n is a, c, g, or t
  misc_feature (785)..(785): n is a, c, g, or t
  misc_feature (790)..(790): n is a, c, g, or t
  misc_feature (873)..(873): n is a, c, g, or t
  misc_feature (909)..(910): n is a, c, g, or t
  misc_feature (913)..(913): n is a, c, g, or t
  misc_feature (1048)..(1049): n is a, c, g, or t
  misc_feature (1054)..(1054): n is a, c, g, or t
  misc_feature (1071)..(1072): n is a, c, g, or t
  misc_feature (1074)..(1074): n is a, c, g, or t
  misc_feature (1078)..(1078): n is a, c, g, or t
aaacccattttccttttnaannaccnaaatcccccacnnacctaaanactataantntctattttnacttnnacaanccccttccaagtaactntatgaanttntttgtattncnttttctaaaaangtgngggnnnnnnnnnnnnnnnnnnnngntntctagactggatngacntggtnancntngtntctacagtgtgnctttcttccctcagtnttgtaggttgagcgaangctacccagantgtgagagaccattgtnctcgttgggtggcnctccacggaccatgccannncacggtancgggancaancacaaanctntaatttacttanccaaatctcctnccttnccntanccncncctncctgacttagagaaagaaaagcaataattttacangcattttnaggnnnctcnttgggttctttctgtttgaaacggatatttgtcnnnnnnnnnnnnnnnnnnnnnnnnnnnnnnnnnnnnnnnnnnnnnnnnnnnnnnnnctggcatctgagtgggaatatgaaaatgacaccttttccaaatattaaattggaaaacaaggtctacaaaatcatgatacttttttaaaaggcagagcattcttttttcggcaattttgataagcaaggtgtagatttacatttttgtccttgctcccaacgaaatggataaacaaaaataaattaccatctactcatggaatgttgttgtgttagccagtctgaaagcccaccttaatttttatataactntctttagctcttcttttgacagngcagnccttgttctgaactgtttcgcttctgactgttaaacaccgatgacgcatgcactgcacttcttcgttttcttcttgctccccnattggcctgagtttcttgtgcattactcctctcccnnaancgttagaataggtatatcagctgtgtaaatagagcaagaaaacagtattctgcatctgtggcatttatgtagagttgcagttgtttactgctgaaaatgcatgcttttgtaacagtgtgatctttactgatgcannacaanaaaagtaaataatatanntnaganattttagtagtatt

SEQ ID NO: 479929 - DNA, 194 bp, Homo Sapiens; identical to SEQ ID NO: 331425

SEQ ID NO: 479930 - DNA, 205 bp, Homo Sapiens
tttcaaatgtcacatttaatgttttcaccactgtacttcaaatctacattgtacaaagtgaccagaaagtgtgccacggtaattgaccaacctctgagattgtacctttcacaccagtgtcttcttgggctcttttgatactaaacacgtttctcattcaagtgaattgaaatgcttcagttgggttgattctcaggagcctcat

SEQ ID NO: 479931 - DNA, 989 bp, Homo Sapiens
  misc_feature (245)..(256): n is a, c, g, or t
cgagcggccatggtgctacactacggatccgcagatcgagcgagagttctgtgacctcccccgctgcgggtccgaggcacagccccgccaagaggccacaactgtcagctgcttccgcgggaagggtgagggctaccggggcacagccaataccaccactgcgggcgtaccttgccagcgttgggacgcgcaaatccctcatcagcaccgatttacgccagaaaaatacgcgtgcaagtgaggtnnnnnnnnnnnncgggcgttgggacgtgctgctgcgggtgagacgggaggaaggtagtcacgggctcaaggctggaggctggcgggctagggctgagtggagcgcctgcttagagaccttcgggagaacttctgccggaaccccgagggctcagaggcgccctggtgcttcacactgcggcccggcatgcgcgtgggcttttgctaccagatccggcgttgtacagacgacgtgcggccccagggtgaggcccaagcttgggggctacagagccggggctggaagcctggaaccggagggccggggcgaggtctcggcctgatggctgcctgcacccgccgcagactggtaccacggcgcgggggagcagtaccgcggacactggtcagtcaagacccgcaagggtgtccagtgccagcgctggtccgctgagacgccgcacaagccgcagtgagtccctggtgctcccggcccgtccagggccctaaccctggggcggcatgctttgatgtctgggaccagagcctggaaatggttgagactaccctgccacgattttgctcccgctcccgcctcggttcacgtttacctccgaaccacatgcacaactggaggagaacttctgccagacccagatggggatagccatgggccctggtgctacacgatggacccaaggaccccaattcgactactgtgccctgcgacgctgcgctgatgaccagccgcatcaatcctggacccc

SEQ ID NO: 479932 - DNA, 729 bp, Homo Sapiens
ggatccaaaccacagagaatgggatgctagccttgagaagtctagtctgctcgttttaaatcgttcagtcgttcatctgattcggcatcaggtaagtgatagattttgatgttatgttcttgcaatggtcatccagaatccgtgtgtcggtcagccgctcccgttccttcagggtgagagtgtcagcttttgcaatgacaggcacaatattcaccttgttgtgtattgccttcataaacgccacatctaagggcttaagtccatgtccaaaaggtaaaataaagtaaaagcaacaatgcaccctattatcaatgatgtgccgcctgttcaagccgctctcgtcatgcaggtacctctcaaattgctcatcaatataggagataattgtcttaaaacaatctctgcagttgatagcgtcaccatagccaggggtatctaccactgtcaggcgtagcttgacccctcgctcttcaatttcaacagttgaagcctcaatctggacagttctttcaatttgtttctgctgctccaggtatgactctttctgggtacagatcagttaggaataggctgtttatgagagtcgattttcctagacctgattcaccttagacatcttttgtgaagcttcgtccgccaaacagcccgagaacaggcgccgaccgaccgcgccgcggacccgcccagcgctcgcggtccgctcacagcccgccccagcccgcccccgct

SEQ ID NO: 479933 - DNA, 753 bp, Homo Sapiens
  misc_feature (106)..(126): n is a, c, g, or t
  misc_feature (160)..(273): n is a, c, g, or t
  misc_feature (278)..(392): n is a, c, g, or t
tggtggggtaattcccaaaggcacatttttcttttcccgggttttctttttgaaaaaaagggtttggccccactttaaatattcttttatggccccgctccccccnnnnnnnnnnnnnnnnnnnnnttttttaagggccgaggggggcccaacacaaaannnnnnnnnnnnnnnnnnnnnnnnnnnnnnnnnnnnnnnnnnnnnnnnnnnnnnnnnnnnnnnnnnnnnnnnnnnnnnnnnnnnnnnnnnnnnnnnnnnnnnnnnnnnnnnnnnggtannnnnnnnnnnnnnnnnnnnnnnnnnnnnnnnnnnnnnnnnnnnnnnnnnnnnnnnnnnnnnnnnnnnnnnnnnnnnnnnnnnnnnnnnnnnnnnnnnnnnnnnnnnnnnnnnnnatttgaacatttttaagtactgtattttctctattgtaatattgactgtcatctctgtgcaggttttttagtggttgctctaggttgaaacgctttgaattcttaggtatctaagagtgagcattttctttttttgactgctatactctcaccagttgccagcttctcatataaatattgtaaatgctctcgtttaggtaactcagcttctggagttgagggaacttcaaaatcagaagagctctgggaatctgcatttgtgctaagatttagcaaacttttttcctcgggtatatgtgtctcactgcttagagtagttggttctccagtactaggaactattgtcacatctttatctctg

SEQ ID NO: 479934 - DNA, 255 bp, Homo Sapiens; identical to SEQ ID NO: 246979

SEQ ID NO: 479935 - DNA, 938 bp, Homo Sapiens
  misc_feature (262)..(262): n is a, c, g, or t
  misc_feature (733)..(733): n is a, c, g, or t
  misc_feature (811)..(859): n is a, c, g, or t
ggctggaaacctgtaaactattcaattaacccaggggaaataataaactcccttatttgaaaaatgatcctggacttcagagatcagttaaatctactgctggaatggggattctttctaacccgtgtgtgttccctctcttcaaaacagctggagcctgtacacagatgggaaaacatttggtcagaaagcagcaaattaagtgtttttcaggacccgaattcggctcccgcagctcctgcatctccattcgtctagattntatttcttctttgcattgacatttttgcagacccagttcatgccatcctgacgccctctcctgtgagagctgagcaagactggatctgccagactcggtcgcggatggttatgcaggttcagtccttctgcaatttcaagaggcaggggctgctgtgagcaaatcctgcttattagcaaagatgagcactggcacacaacttagtttttcttcccccagtaattccgctagttcctgacccgtctcttcaaatctttttctgtctgcactgtcgattacatatataagaatatcggtattttcaaaataattcttccagtatggtctgattttcctctgtccaccaatgtcccatacattcagtttaaaaccttgtgattgtacacttttgatgttgaaaccctgtgtaggtgtgatgtggctgatgtcttcagatgcaagctgcttcagaagagtggtcttgccagcatnatccaagcccaggagaagtattctcacctcctggtctggtgcacttttcaacttgcgcaaaattgagagcaagcccannnnnnnnnnnnnnnnnnnnnnnnnnnnnnnnnnnnnnnnnnnnnnnnnttaccaggggcaactgctgcggcgccacccccgacgtccctcgcacgcacagctgaggagctgagcagcaatacccgct

SEQ ID NO: 479936 - DNA, 479 bp, Homo Sapiens
tggatcccccgggctgcaggctcgtgccccccaaattacgttccttttgacgttttcctcatctgctgtttgtgacaagtcatcagccagatttcctgactgacacatacgtatgatcagtgcaggagagacctgcgcaccacaggctgcaaactggaggttctgttctcatggcagtttgggcagtaacttttgagagaggccaaaaaaaggaggatgacatgctgtctcctctcttcagtatagacattaggctcttattcagaaaggatttttctttaaaaatgtacttactttactgaactacttacaggcacatttcttcataaggccacacctaatccaaacaagacagtctcccaacactgaagttccttccttcgttattatttatgcatgttcatgaacttctgctgtacattggaataggagttaacacattcacatttactggctattttcttgtgtgccttatgaga

SEQ ID NO: 479937 - DNA, 540 bp, Homo Sapiens
  misc_feature (12)..(12): n is a, c, g, or t
  misc_feature (76)..(76): n is a, c, g, or t
  misc_feature (161)..(161): n is a, c, g, or t
ttcgggtccgtngggaaaactccggccgtgtcccgtaaatgtaagcacggctgaagttcctcaaccaactgcccgnaagatgccaggtgtaggaagctgtggcgcatgccgcccccgggagtaaccagtagtgctcgaaagaggctttcccaactccatantctttccattccccacttttaacagccttccattacctcacggtgggcctcgctggagattttattggtatagcgcagaacctcccagctccatatccgtcttaaacactcggcactcaacgatctctgggtgaagaatggtattgttgacttcgaacttgctgatgccgtcaaaggaggcctccctgcagacactgccgctgtccgtgttgacgccacgcaaagtgaggaggacagagggcttctgtgacgtcaggacgctggcaattttcccatccaggtggcatggctggcaggaagcctgggcacaaacagggtcgacttcccagtgtcaacatcgatgacaccatagcagcctggctcagtgacaccgaacgcc

SEQ ID NO: 479938 - DNA, 818 bp, Homo Sapiens
  misc_feature (730)..(730): n is a, c, g, or t
  misc_feature (740)..(740): n is a, c, g, or t
  misc_feature (752)..(752): n is a, c, g, or t
ttacaacatcactctttatattaaaaagtaaggaggtcctggggttaagtacacaaagcacctaagtccttcgggtagtttagtgtcagttctacaaagtaagctttggcttcctggcaccagtgaggctcaatcttctgaagtcttccagaaggcaggcgaggagagggatcaggcagccctccctccctcggtcacagtcacggggcggcctcgggccagaccagaggagatgacagacgacaaccagacggtaatatccaaggactatttacaggggggactgcttctgaggcatgactacgatcacttcatgaatgccacttctgggatctcgcccttggccttgagatgagtgaaggcctgggcagatctggtgtagtcccagttgttgtcctgaaggcacttctgggaccactcgaggttcatgccagactgggtagagaatgcttgcaacatttcctgctgctctggagagagggtgggcaccgggctggaggaaggcgtgggtgcaggcatagcgaaggctcttttgatctcttcagaacctgaattgctagcaggaacagcaatgaatgtccgggtgaaggctcgcaaagaatcccgggactttgcgttcactttcttgaagactccattgacagaaaaacacagcaatgtgcttgtctgggcgcttatgtctaccacgaaggattgacggtcgtgctggggttttgggcaactcattgangaaggcaccnacgttgagacgncgtgtgcttcagcagccggaaccgcaggtagggggctttaaagcttttcacatttctgctatcctt

SEQ ID NO: 479939 - DNA, 216 bp, Homo Sapiens
gacataatcatttttatttgatttaattgataaataaatacaagagaactgttgtgaaaccactggcaatatagtaaattttaaagattttatttcaacttcactcacttatatttcttggaatggggatatatacattattcaccaataaatgctaatgctttaaatttacaattaccctatttgtagaaacctgaagatcattccaattaaatg

SEQ ID NO: 479940 - DNA, 484 bp, Homo Sapiens
tcgcctgagtcaatcttgttgaggatagtgcgggcacacttgaggaacgcctcctccacgttctcgcctgtgagagcgctggtctccaggaacatcagctcattctcctgggcaaagcgggaggcctccaggaaagtgacctcccgctcagggtccaggtccttcttgttgccacagaggatgaccacgatgttggggctggccagggtgcgggcatccgtcagccaggcagccagtgagttgtatgtctcccggcgaaaccgctcctggccagccgtgtcccaaatctgtagcttcacagtcttcccacccacgttgaccacccgggatccaaactccacgccgattgtgtggttggagtcctgtttgaacttattctcaatgaactgatgaaggagacatgatttgccagttcctgcactgccaatcaccaggaatttgaagaggaagtcgtaggtctcagccatgactcggtcgcggccgc

SEQ ID NO: 479941 - DNA, 1263 bp, Homo Sapiens
  misc_feature (102)..(110): n is a, c, g, or t
  misc_feature (392)..(409): n is a, c, g, or t
  misc_feature (411)..(651): n is a, c, g, or t
  misc_feature (700)..(735): n is a, c, g, or t
ttggattttaaaaaatctaaaatcgagaaatcacacattcagtggggagcgacttctccttgcttatgggaagtcctcaagtgagtgatgttcaccatgtannnnnnnnnctcttaggacagactaattctgaaaataccgaaggaaaagtagctctatgttctcaccccggttttcctgcgtgtgtgcccttgggtgcgatgcctcccccagcgctctgtggtcgccggtgccagggccccctctggtttggcagggcctggctgcctttgctccctgcagtgagtcttttggtgttttcatgcacggcttgtgcttctggatctgaggcctctcgtgttcacgcggacacttccttccttaagaagacgcctaaaagaggaagttggaannnnnnnnnnnnnnnnnngnnnnnnnnnnnnnnnnnnnnnnnnnnnnnnnnnnnnnnnnnnnnnnnnnnnnnnnnnnnnnnnnnnnnnnnnnnnnnnnnnnnnnnnnnnnnnnnnnnnnnnnnnnnnnnnnnnnnnnnnnnnnnnnnnnnnnnnnnnnnnnnnnnnnnnnnnnnnnnnnnnnnnnnnnnnnnnnnnnnnnnnnnnnnnnnnnnnnnnnnnnnnnnnnnnnnnnnnnnnnnnnnnnnnnnnnnnnnnnnnnagtgctggaattataggcgtgaaccaccgcccccggctgcagttggatnnnnnnnnnnnnnnnnnnnnnnnnnnnnnnnnnnnnatctccaagggactctcccggcacttctaccttccagagttacttcagtgcataaagtttgaattattttgttcttgtgggcagaagtgggaatgatggaatatcctcacggaaaaggcagtgaagttgggagtactgcttacaaaacagggtcaccagtgctttatgtggtcgtgttcatccccacgccgtgtgtctacgggctagggctggcgtgttcatccccacaccgtgtgtcatcatataggactagggcacttcatgatgtccctatcttgtttcgcagacgttccaaaaactatgtcgcttgcttttcctgtgtttttccgttgttttctgtccgattgagtgctacgggtcttacggactctcacccgttcccactctctgcaatatggatcaggcagtgtttctgataggatgtgaaatggactctcctcgggtgggtccagcacgggccctgcccaccagaacacagtccgtgctgtgctgcgcttaggagctggccctccactctcctttgtgcag

SEQ ID NO: 479942 - DNA, 814 bp, Homo Sapiens
agcggagtctccattggtgaggtcgtcccggagcctcgcccagctcccgcgcgctagagccgcctgctggtctcacccagccgggaccgctgacctggcgctttgtgcggctccaggcctccgagtggactccagaaagcctgaaaagctatcatggcagcaaggcccaagctccactatcccaacggaagaggccggatggagtccgtgagatgggttttagctgccgccggagtcgagtttgatgaagaatttctggaaacaaaagaacagttgtacaagttgcaggatggtaaccacctgctgttccaacaagtgcccatggttgaaattgacgggatgaagttggattgacatgtacgtggaggggacactggatctgctggaactgcttatcatgcatcctttcttaaaaccagatgatcagcaaaaggaagtggttaacatggcccagaaggctataattagatactttcctgtgtttgaaaaggtaggtggcagagatgcctacatacacagagcaaccaaagcacaaaccacaaagaagctgccacaaacacccttttctgtccaaggatttaaaactgagcccagtttgaactaacataagcgctaatggactccttaagagcgaatagtaggcacagcacaaagctggtgtcttagagccccttgggactcatgctaggaccacactgattccagaagtctagcaaacagtatggggctccctgccctttgttcccttatggttccttgcattcaccaaagtcccaccatgtgtggattcaggcagaacacttcagaaagatcc

SEQ ID NO: 479943 - DNA, 1142 bp, Homo Sapiens
cttcaaagaaaggaaggattaacggatagtgaatatgctgctacatctttcttacgaggcctgcccaacctttacaaaggaactacatcttaacccacaggtagtttcagcgtggcagtagctcacactgtttcttgcggcagagggccctgggctcctcctggagactctaccaccagcggtagtgggccagggcacggttggcctctgccatcttgtgcaagtcatgcttcctcttgatcacggggccctggttatggaaagcctccagcagcttgtgtgacagcttctccggcatcagtgtccgctggtgctttttatcccggcactcagtgatcatccacttcatggctaggaagcggcgacgccggtcgggtaggggtacagggacctggtagaaacggcctcccttgaggatgggtaccagccccaatcatagggctcacagtttttcagtgcttgatggaagatggtgtaggggttgcgttcgatggttgcctgttcctctgcagaagcggcatggtacttctcaaactgcttccttttcacagcttccagagtctgaatcatgagggatctggccagtactttgtttcctcctatcatcatcatgttggtgaatttactgatgactgggtcttcaaacacagaacttgttttccctgctggagcagctttgatgagctgagtcttcttgagctcccgaacatatttctcctcctcagttagctcctccactggcttgcgataatattccttgtccatcaagggatccttgaattcaggactatagcggctccatctcacctgagttagcctgggagggggggaaaggaggaggcaggccaaacctgactccacaagcgagtaggtttgacttaactataggcatgactgccaacgcaccgacgagggagatcggctcggagaccgcgagctaaacctagcccctaacccactccaccttactacatgaagtataactcaacccattgtaaactttggtggccatatggatcttgacactcgacgtgtctcttgtatttgcttcctagatttctgcatgcagttatgacaggtaggactgaaaatacctgccttttgacttctagcattacatacccgagagtatccgtcgaact

SEQ ID NO: 479944 - DNA, 815 bp, Homo Sapiens
ccccccacgcacacgcgccgtggcttgagcacagcccggggcttgctgctttccctcgaggcctccagggtcacgtcccgcttggtgttccgatcgaacatgcggaagaagttgttgtaggccccggtcatgatgacgctgtcgctcccgttccaggcacattcaaacttgtcgaaaatgcagtcgttctcgtacagggaacagagcttgctccgaaggtagtcatggacctggtaggtctctatgggtcttgcctccatgttcaggtcccagaccttgactgtaaggtagtcccgggtgagcatgtagcggccgctgtggctgaacttcacgtcggacacggaggagatgatttccgagaagaatgagcggttactggggtcctcaggctcttcaaagagcttggaatgcttgtcacacagggcagctgcccgcatgtcgcagagccgcagggagcccttgctgctgctgtagacgaagaggttgcagtggtgcggatggaactcagatgctgtgatcacctccgtaaggtcctccatgttggccggcttgatgtccacgatgttgaagctcctgtcggtgatggccaggtgccagaggttgatgcgcaggtcatccgccgacatgtaggtctcgcagtcactgttgacggagatggagttgatgtggtaggtgtggccattggcaaagatcctccgagggctcacctccaccatcagatccatgggcttcagcactggcacctgcagtgacgtcaccgtggacaggtccttaagtttcccctcttcatccttcaggttgtatccttcggccaa

SEQ ID NO: 479945 - DNA, 967 bp, Homo Sapiens
ggcgtgtgccaggcgggctgccagcttcagtgcagggttgcgctgccaggagctcagcttgcttcccaggatgcgtgccagcccggttgcagatcccggtagcattcagggggcacggttgtcgggggcaaaaagaggggcagcagctggcagagctcaaacttgctggcatcctcagctttctggaaatcctcactgaggccccgcaactcggccaagcaggtcgggctccgccttcctttccaagcactgtgtctcggcagcagccagcagcacccaccaggagtgccagggccttggtcaaagccatagccgtgcccccaggtatgcctggcataggtgcagacacggtgccaccagcaatgaggtgctgaggccctctgggtgtgcctgctacagccagtcaggcactggtaggtgtcatcaatcaatggagcggtgtgcaagcatcgtctcgggtccccaccgggctgtagaggaaggtagctaagaaatgggaatcattgttcaaggacttggaggatgggcggccagtttcagggtcactgacagaacgcatggccacgcagggccacatcccaaagcaccgcagaacatgagtcagggcagaccagtcacggcgccatcccttggtggatcaggagacgacttggggaaggctgaagtccgacatgcattcgaagactccgccgcacgacgttttggcatctatgtcacctgctttgcactgccttggtcactacgccgcatgggctgcaacactcgctcgctgtcattcttggcctcacggacgggctcccacggtagcgcttccagggtcggggtttcggccctctgcctggttcagagctggctcgcaatccgaggccatgatgctcgccttgcccaacaggctgcggccccgagcggcgaagtcttctcccagcgcgatgctccgggagcctctggccgctgctcaccccccgct

SEQ ID NO: 479946 - DNA, 821 bp, Homo Sapiens
aaccattaagaacaaggaattgcttaaatcccttagctggtgaggatatacatctaaataattcatctttctaactcaagaatggtgctgattttttaaatgtttgacaccaggccttgtttttccagctgagcattctcattttgcttttctctaagactatcaaagacaaggtattaatagtaggattattcctagatcagaatgtttcatacattcctaaaggtttatgtggaaattggcttaggaaaactttgagtagcagagtctgaggatgagtgctagagatgaaatcaggacagatttgttgcagttaattcttgccaagcaaattagtggtaaatgtcacattgttatgtgaattgagcacatatttttaaagaaagtttacaaaaaatttttagaaccaactatgaggcaatactgtatcactgggggctgggagtgggggcttagaatcatactgaaattgtttaaaagcagcccaggtagtttctgtcctcaggtgaataacagactatataacttccccgaaaggtaaaacgatagccactgcagagacgaggtgtcttccttccaccaaatactttctgagatggtggtaggagtagtatttttaccgtggtttaaaaagtagtcagttacatagaaagtgtattggtatgtatttgaacctgctcttcattaaacaaacagattagatgtaccctcgactggcaataattgtatctattttcaagtacagctagctgtcaaagcatgaagctcttgtgtatacacactgacacttggttcacgcatgaagaacagtgcctatgcac

SEQ ID NO: 479947 - DNA, 605 bp, Homo Sapiens
ttttttttatatacaaatctctatagtgaccagataatctgatctgtgttgtgcaacatggagatgcaatgctgaggttttccaggagaaagagaaagggagggagttaaggtgatttgtagaaaaatctagatgccaaaggatgactttctataagggaagtaactcttatggagtattaaaccaccagacagccaactttctgatcatttatctcaggggaattcgctccatggggtccatggggggaggaaacctcagaggatgtgctgggaccaacttccttgggctagtgtgtgtatttgccccctaggcaaaggccaacaggctgtttccaggcaggcaaaatggttgccatgagaagaaacagtgccccagaaggagtgaggctccgactgcaacatctccatctccagtgaggatgatgacaaggctaacagtcagttgtcaggtttcaacactcacccaaggattgggggtgtctccagagaaactgaggacctgttgctaaccattctctaggtcaacttctgactctacaaagcagtgaggtctggtccaatagctggtttaattctcagcaaaaatcccgtgggttccgagct

SEQ ID NO: 479948 - DNA, 1034 bp, Homo Sapiens
  misc_feature (3)..(3): n is a, c, g, or t
  misc_feature (13)..(14): n is a, c, g, or t
  misc_feature (16)..(16): n is a, c, g, or t
  misc_feature (21)..(21): n is a, c, g, or t
  misc_feature (25)..(26): n is a, c, g, or t
  misc_feature (28)..(28): n is a, c, g, or t
  misc_feature (32)..(32): n is a, c, g, or t
  misc_feature (34)..(34): n is a, c, g, or t
  misc_feature (44)..(44): n is a, c, g, or t
  misc_feature (53)..(53): n is a, c, g, or t
  misc_feature (55)..(55): n is a, c, g, or t
  misc_feature (71)..(71): n is a, c, g, or t
  misc_feature (74)..(74): n is a, c, g, or t
  misc_feature (87)..(88): n is a, c, g, or t
  misc_feature (90)..(90): n is a, c, g, or t
  misc_feature (98)..(98): n is a, c, g, or t
  misc_feature (104)..(104): n is a, c, g, or t
  misc_feature (112)..(112): n is a, c, g, or t
  misc_feature (114)..(114): n is a, c, g, or t
  misc_feature (116)..(116): n is a, c, g, or t
  misc_feature (122)..(122): n is a, c, g, or t
  misc_feature (125)..(125): n is a, c, g, or t
  misc_feature (142)..(142): n is a, c, g, or t
  misc_feature (158)..(158): n is a, c, g, or t
  misc_feature (164)..(164): n is a, c, g, or t
  misc_feature (169)..(170): n is a, c, g, or t
  misc_feature (198)..(198): n is a, c, g, or t
  misc_feature (200)..(200): n is a, c, g, or t
  misc_feature (208)..(209): n is a, c, g, or t
  misc_feature (215)..(216): n is a, c, g, or t
  misc_feature (218)..(218): n is a, c, g, or t
  misc_feature (223)..(227): n is a, c, g, or t
  misc_feature (235)..(235): n is a, c, g, or t
  misc_feature (243)..(243): n is a, c, g, or t
  misc_feature (247)..(253): n is a, c, g, or t
  misc_feature (270)..(271): n is a, c, g, or t
  misc_feature (283)..(283): n is a, c, g, or t
  misc_feature (286)..(286): n is a, c, g, or t
  misc_feature (297)..(297): n is a, c, g, or t
  misc_feature (305)..(307): n is a, c, g, or t
  misc_feature (310)..(310): n is a, c, g, or t
  misc_feature (324)..(324): n is a, c, g, or t
  misc_feature (338)..(338): n is a, c, g, or t
  misc_feature (352)..(352): n is a, c, g, or t
  misc_feature (367)..(367): n is a, c, g, or t
  misc_feature (370)..(370): n is a, c, g, or t
  misc_feature (391)..(391): n is a, c, g, or t
  misc_feature (395)..(397): n is a, c, g, or t
  misc_feature (407)..(407): n is a, c, g, or t
  misc_feature (409)..(409): n is a, c, g, or t
  misc_feature (415)..(415): n is a, c, g, or t
  misc_feature (423)..(423): n is a, c, g, or t
  misc_feature (428)..(428): n is a, c, g, or t
  misc_feature (430)..(431): n is a, c, g, or t
  misc_feature (441)..(441): n is a, c, g, or t
  misc_feature (449)..(450): n is a, c, g, or t
  misc_feature (621)..(621): n is a, c, g, or t
  misc_feature (999)..(1000): n is a, c, g, or t
tcntttttgaggnngnccctncctnntntttnanaaaacatganacacactcntntttctgtcattctctngtnagtaccatgcganngngagagacnccctantgctacantntntacagngtngccaggcccgcctgccntgcccatggcctctgntgacantcacnngcttgccttcaaccccttcttcccttgnanatctcttnncccccnntnaaatnnnnnctataaanaacaaganggtnnnnnnngtccccccatggcccanngcaccccacgtnggngctacatgatnttgcactnnntgnccccgcaacaatcnttgatcaatgccanccccttctttgccnccttttgcttgctangtnggggctctgctttcttctctncccnnnagctggctgnanatttgnttactttntctanannttttaacttnattctcannaaatcagccatttccttgtcttcttcttgctcccttaaccgctcgacctccgcatcgtccaccaggaagtctctcttctgcaccagtttgtggatcttctggacttagctcatcctctctcgtgcttcatgcagtttggttttttctttcttctgggatggcgagccaagnttctgcagctcctgcttcaagtccatgatgtccttgcagagctggatgtcatccatcatgaacctgagctcagactcccggcggaccaagacttcccggagacgctgaatttttgccatctccagctcaatctcctctggcatcatggttgtctccgccatggagatgatgtccagctgatttctccccagtctctccgttttccaagccgtctcctccaccgccccatagcgcctcagaggcttctcggcttccagatgggtggacaaagattgctttaattccatcgctgatccccgtggccaggtcgaacgggtctccctttactccattcccgttgcgggctgcagggagggaggtggctccagccagcagcgnnttaacgggccgggcgcccgtgacgctgctccatc

SEQ ID NO: 479949 - DNA, 1114 bp, Homo Sapiens
tgctcccaaaggcggagtctgaggaggggccggcagcggcaaacggcagcatcaaacagaccactgctgccgcggcaacccagggcctcttcagagctttcaaggcgatggagcgaagaccaagggtgcacatgcatgcaggcaggctgggaaggaagagcgggtggaggaagactgaggggaggctgccaggagaccgccatctgggagcagggccaagagaagctggcagcagttacacagcgcaaaataaaaggccttgggctggactcaggcggaaagaaagtgctggaggaaatgaaagaacaaagcgggctgtctgtgtgcccacgccgggccggtcactaccttttctgcctgacaagtgtacataaaacaattcccgaacagcacggagcatcagacacaactagaggtatggagggcaggaggtgggatgcggtggtgaggctggggctgggcagccggctttgtacaaggtggcacaaaagacgtacgcattccagttcttggaagctggcttccctcgagtctggagtgctgggtttgggagttttctattgcagtctttcaagtctgagttggaccccaggctggaggggctggttccaccacccgcccgcagccaccctgcctcgggctacacgtcggtggagaagtacagtgtgttccgcttgagttctgcgaaggaaatgggggggtgctgcaggtagtagaggaggacctggacctgcgccatgacgtcatgggaccagatgtccgcagccgaggtgaggtgtgctttgctctccacttctgagggtctcagtaacgtgggtccaaacacggtagccaggttgtgaagtgacattttgttgatgggctccttctcggccacccttttcaagtgttccagcaggaagaggaaggtgatgaggttggggtcgggcagggagcggagcaggtggcggaaccagtccctccagcctggggtccaactcagacttgaaagactgccatagaaaactccctaacccagcactccagactcgagggaagccagcttccaagaactggaatgcgtacgtcttttgtgccaccttgtacaacgccggcagctcgcacctgtgcagct

SEQ ID NO: 479950 - DNA, 1106 bp, Homo Sapiens
  misc_feature (997)..(1035): n is a, c, g, or t
gcattttttattaacattttcctttgacgtggtttacatcaattggtggggggtgtacataagtggaaacagaacatagacaaaaaaatatataaaataccaacttattaaagtcagatattcatgaagggtcccatcctacctgtatatcagcagaaactggcagccatcagccattgcccagcaagaacaggcagacctggcgtttcttagcctgactcctgctgggcacagcccaccctgctgggcacagtgactggaggttccaggctgcacagtccctggctcttgactcctgccgggcgcagtgactggaggtttcgggctgcatggtccccggctcacaggagaccctgctgggtgtttccttggtgcagtttagtccaggtctggcacctgaccctccccactctgggggtgggatttataaatatgagcctttgcatttctcagcctttgcagccttcccatagcctgttctcacgttgcctcagcgagcttggggctgtggggctccctgaggctgagacgtgaaggtgcccagtctgggccgtgactcactctgccccttcctgtccatcactttggaagcaagcaggagccttctgtgccacacaccgacactcggatgccaggcagggaccttaggaagggccaggcactgcatctttagactcaagttcaccgcctttcccagggagcaagggctccttgctaagctgctcacaggcagccgatggtcagtacttccttcctcttgggcatgtctttcctccgtgcacagagtatttactgttctgcccaaggccacaggagtaaacaggctcaaaaagggcctctcaccgcgcacgtgctgcagcgttagggccggcaaacccttctttaagactcagccctgagcacaagcaatgggaactgagctccccagccctgagggcccggaaacgacgctctgccacacagaagagccggggagctgtaactggctataagtcgnnnnnnnnnnnnnnnnnnnnnnnnnnnnnnnnnnnnnnncgaggctggcagccgcagctcgtgtgggaagtgtacggtgggaacacacctcactccttcctagtaccggc

SEQ ID NO: 479951 - DNA, 1126 bp, Homo Sapiens
  misc_feature (309)..(319): n is a, c, g, or t
  misc_feature (330)..(330): n is a, c, g, or t
  misc_feature (449)..(449): n is a, c, g, or t
  misc_feature (590)..(590): n is a, c, g, or t
  misc_feature (811)..(811): n is a, c, g, or t
  misc_feature (975)..(975): n is a, c, g, or t
  misc_feature (1059)..(1059): n is a, c, g, or t
  misc_feature (1107)..(1107): n is a, c, g, or t
  misc_feature (1121)..(1121): n is a, c, g, or t
aaggatttccaactaggttttattttagtttccaatattatgagcaatgatacaggagtaactcaagcaaatacatcaccttaaatacatcagagaaaactcactgtgtcagcacgtcttgcgctccagcaaatgaacataataaacaacaatgtcatgtcagcattaaagtgcttttggccatacttctttcagaaagggtctctccctcagtggtataaatttaattttacgtattgaagaagctcaaaatttcattcattccccaggggctacattgaaaaaaaattcatgtttacgctaaagaannnnnnnnnnncaaaaagagcncaaaatccattggaattgtgtgacagtgattttccctgacatgctgtgaagtggcccctgtccattcaggcccggcacacgccgggaacatccacccacagcatgtccacctggcagantccatcacttcgccccacacaacaggacagactgagggctttaaatacaagcaggtatgtgaacaggacatcacctgtgatgtggccaccaaacagtgcacagaggctaccaactcatttcctcaaagatgagtgatggcngggctgctgggccctgccttgtgggctgctttttgggagaggtgttgcttatttctaggaagcgatccaacttgtgccacacaggatttgtcacccaaactgcttttctcacacagtcaacaccttggtgacaggcatctgcccccacttcaaccagtaacaatcccaaaactcaacatcagcataaagacaagggggtcagtcgaaggttctggagatcngggagggtggaaagatggacactgggttttccacattgtccctttggccaactgcagtcactggcacaggaaatttagtccagggcacttgggacaaggttgggggtggggtggaacatgtctcttaaaggcacacagggatgcatcaagctagtgggtggggntctcagaccatgagccctcgcagacgaggcaagtggacggccattctcagctgtctgtgtgggccatgcactcagcagcactangtcccacttcaacatcatcttttatacatctttacactagacatgcanttcaaacagattanaaaaa

SEQ ID NO: 479952 - DNA, 1059 bp, Homo Sapiens
accgcgtgtagcctggccgatgcgcacatgcgctctcgtgaatggtcccttggcgatataacccgcttgtgcgcaacagcatgcaaatgtgggggaaattaactagtgctggagggcctcatacattgtgtccaggactgtgcgtcgtcagttgtgtttgccagttgggccacggggccaggtgcccaccacgtgcaccatggggagcccacgacggcaacattaaggctggcatatcaccgccccttctctcacgccaggacttcccccctcaaggtgccccacttattcttgctttgggctttcaagctacttggttgttgtgaacaatgtttgaacttcgactgggtcccgcacccacccggcgtgtgtatgtccttgggcaccgtgtggctttggcgtctggaagtggaagtcaagggaccgtcgaatgttgggtggttcaggggcggcaatttccttgctccaggttctccccggggtgacgtccaactttgctgacacagagtgagcctaaggtcccagacagttcctgctggacttggtgctgcagtttggagccagtgtagctgatgacaagcttgcagcttctcgctggcatgctccacaaaactggcgcttgaaggccctctccttggccttggtggtccaggtcagacgctcatagacgtagaggaggcacatagagcccaaaggagagggcaatgagccgccagcccactgccttccacaccactcctccaatacttacaagaatgccatggaggtcctggatgtcaaggatggccagtccaggtaaccatggataaccatgtactcctcctgggtgagcgagccctgtggcagtgggggcatgctggggttggctggcgtcagagggatgggacgctggacctggtcattgtagccacatcaaggcccgacaggctgttcttggggcccaggaacctattcaccagcatggtccatccgagagagaaatgtaactcaatgtcttcccctcgtgccgaattcgccacccagcctcgctaccttagacacgtataggttactgccgtc

SEQ ID NO: 479953 - DNA, 1108 bp, Homo Sapiens
  misc_feature (37)..(37): n is a, c, g, or t
cccggaggggagttttttggacggcgcccgccccccnttccgatagttctccttcgttcgcacattccaatacctctaccatttttcggggggaacacgttccttttattggaaggggagggcccaaaaggggaccgtgtaactccctttttccagaaaagggggaataaatgggaagttttttgaaagcccccaggggaaagctggttcccttggggttaaagttgcttttttgaggcctgggggtttccctcggatccaccgcctcccggggcacaggtcccagctaggactccattcctgacgcccacagccggcccatggaccagcccccggagagcccaccggcccaggggctctcgcattcatagagcatccagtggtcagctcgaaggggggcgtgaacccacatggaatggtccagtgagaccatgaagtgcaccttgtgctgccactggtgaggcagcagtgcagtgcccaagaaggcatagtcggagatataggcggccacgcagcagtgcatcttcatgtcgccctcgccaatatagccccgggctcgcacccagaacatctgtttgggctccattctctgcagctggctcaggggggatgggtttactggcttgatctcaatggggacctcctgagcagcaattcggttgagcgccaatgggtacttcttttggaggttagggtcccttaaatactggtcaatgagggtctcacagtcaagcagctcttctggtggtggcacagtgggcatggagaactggtgctgcatggggctgggctgggcctgctggaaggaggcctggcagatgaagatgggcttcccatgttgcacggccttcacagagcgcaccgagaagctcgaccctgttcgtgtccgctccacttggtacagtactggcagcttcgggtcccctgaagagatcctcgtccagcggctcgaggttgagcacggtcgtgaccaagacgctacggaggtccccagggggatcgccgcggtcgccacagccctgcccatcttctggggcctgcggggacgacatctagttcaatgctgcaggccctgcacacccgctccgcggaagacgcggagacatac

SEQ ID NO: 479954 - DNA, 1092 bp, Homo Sapiens
  misc_feature (863)..(863): n is a, c, g, or t
  misc_feature (913)..(913): n is a, c, g, or t
  misc_feature (923)..(923): n is a, c, g, or t
  misc_feature (926)..(973): n is a, c, g, or t
  misc_feature (1025)..(1025): n is a, c, g, or t
ttggccccactaaccacatcctacctagggacacacaggcagctgaagaacatctggggtggacccatcactttggacagaattaggacctggttctggaccaagtgggtaaggatgcggaaggattgcaatgcccgccagcacagtggcggcaacattgaagacgtggacggaggaggggccccgacgacaggtggcaacaatgccccgaatggtggcagccaggagagcagcgcagaacagcccagaaaaggcggtgctcagcacggggtgtcatcctgtgaagggacacagagaacaggcaggaggaaaggcaggagccagtccgtgcaggcacactcagcgctaagccaaaggccgcccatgctgagctcatctggccccatcttagagagccgccaaacattcctccagacgtccacctcagtgcacgagctggcccagaggctctcgggcagccggctctccttgcacgcctcggccacgtccctgcactctcagcccccgcccgtcaccaccaccggccacctgagtgtccgtgagcgggccgaggcgctcatcaggtccagcctgggctcctccaccagctccaccctgagcttcctcttcggcaagaggagcttttccagcgcgctcgtcatttccggactctctgctgcggaggggggcgataccagtgacacccagtcatccagcagcgtcaacatcgtgatgggcccctcagccagggctgccagccaggccactcggcacctctccgagccatgtgagccccctgatgccaccgagcaagggcagcttcatgaccgatgtctggctgaggctgtggcggacactctcggggttgtctgcaggagagcaanccaggaggacatgggcctggacgacacggcctcgcagcaaagtgtgtcanacgagcagtnacnnnnnnnnnnnnnnnnnnnnnnnnnnnnnnnnnnnnnnnnnnnnnnnncattgctctccctcgtgctccccaaatcaccacaaccaaccaataccgcganccatgagggactcctcctgtggaaaaggagagctgttccagaacacagaactgatctcaggtttttg

SEQ ID NO: 479955 - DNA, 743 bp, Homo Sapiens
  misc_feature (132)..(176): n is a, c, g, or t
  misc_feature (262)..(262): n is a, c, g, or t
  misc_feature (276)..(276): n is a, c, g, or t
  misc_feature (300)..(300): n is a, c, g, or t
  misc_feature (352)..(352): n is a, c, g, or t
  misc_feature (470)..(470): n is a, c, g, or t
  misc_feature (578)..(578): n is a, c, g, or t
gcttatcaaaagacatttaatacaattagttttcaacaaccccttggggggccacatttacaaagatatccagcccaacccaaccccccttccaaatcccacccccacagaaaagcacatacttaccaaaannnnnnnnnnnnnnnnnnnnnnnnnnnnnnnnnnnnnnnnnnnnnaaaaaaaggcccccagggcaagttatttacagtttaattgccactgtcaactgatctggaccttgatcgggaccgggacctctggngatccacagatgcnggagacttagatctacttgagganccacgtttcgtggctcgttcgtcgaggcacgggagacctactatagcgaganagcggggcttggctccggctccggctcctgctcctgcttcttgaccggctgtaagatgttgcgagctacgggaacgggatcggctagcgagacctagagggagcttcgtggtccgggntcgagacctgcttcttgacctactgtgccttttgctgccttcaattaattttatttttctcccatttatttcctttccagaaagtttttcaatagcattctttaagtnaccataagaggcaaactcaaccaccccttcatttaatttaggtcggtgtgcatccgcaaacgttacttccccagcttgtctcatgaaatctttgagatccttaacacaagataattgtgttaagcaaagaagaggaaaggggacacacaaacaatcacatgatat

SEQ ID NO: 479956 - DNA, 1263 bp, Homo Sapiens
  misc_feature (45)..(45): n is a, c, g, or t
  misc_feature (322)..(322): n is a, c, g, or t
  misc_feature (491)..(509): n is a, c, g, or t
  misc_feature (564)..(564): n is a, c, g, or t
  misc_feature (840)..(848): n is a, c, g, or t
cgtacatattgttttcctcccgccacgatggtttgtatgttgtgntgccgggtttgttgaaacctcttgatcgatagatgtgcgcgctccgtatttcgtcgcggctctcagtgctggggtgactagagaacagacacggtagtatatggtatcgcttctctacattgtcctcgcgcctacacccccgggaagcgtatgcctattatataaagacaccgcgccgccggcatggttttgtcgtcccacacacgcgataagtgttgttatcttgtaacgtgcggagaggggcgacgaagcccctcagagcgcatcacgcgttganaagctccccacgtgatcctccaccgttctgtttatcgctccctattcgggggctactaagcacagcaggacaaatgtgacggcgacgtggggtggtgcggtgagcattgttatcccctcttatggggtggtgcgccgcgacgttgatgggtgagccgccccccgccgannnnnnnnnnnnnnnnnnnatgacggggagagaaagagacagcgctgtattcactccccccggtgtgtgtgtcncgcggaaaggcgcgccggggacccgaggacgcagggaggatgggcgcatgtgcgcgctgtggtgttggtggtcggtgtggtgggagcggtgttttgtggggggcgggggcgcacccactaagcttgtttaggcgtctggcgctgagtggcccgagggagccccggaggggcccgcaagattgacccggaggggcgggcccttgcattgggggggaaaaagaaagttttcgtaaagatagaataaaggggccgaaactccgagtgatttcattttgnnnnnnnnnatccgtttcccgatttagggagggggggtcgccacaaaaaaggttttggagcggagtcagaaaaagtaaacgctggatcagcgaatttgggtggtttgcgaagcgaggcgggttgattatctttgaagttacgtagtgacggtccttcggccacagatttcaagtcccaagcagcgtgggctggtggggtgggcaagataggtgggaaggggcagaagacacaagtggttgggctgggtggctggctgttttccctttcccccctgtctcaggatcctttcaagggcttagatgttgctgcggcttgtttttgttttcctcgtggccggcctgtctttctccgagaaaattcaaacctctaaacgaaccccagaatccccggccgtaatgcactctgcgttgataccactcttcc

SEQ ID NO: 479957 - DNA, 1021 bp, Homo Sapiens
aaaatctcatgtcagtgtttatcaggaatgaaaattgcttggtcattgtttcagggaaattgattaaaagaaaatactaccatactgactttagaaagtagagtatgatgaggatctgagattatatgctctaatcagtgaacagtaaaaagagtatgttctatagcttcccaccatgtgaatactattttcaaatagatgatcctgtgttttaatgcaacaatactctaaacggtctgtcaaccaaatgagaccacatcaacttacaaggccctagtcccaaacattgtatcaaggctaggagaaattcaagattactaacatattaatgcagaaataaaaccttgtgtaacatcaaacttaaataatgtatttataaacttgggaaattcttttgtacctgcaatgaatacaaataggaacatcttcatgttcttgatatttcctcattaagcttatcatgtccagaatagaatcaaatgatgaaggaacatcatggtctggccagttcacataatgaaactgatacagcctacgagattcattttgaaattcaagtaagagtgtcctgatgaagtagtctgttcttgcttgttcatcctcacaagaaattttaaatggtgcaaacgttatggggtcttctccatacaaaggccaatagcgctcacattttttccttcccatctcaaattctcggcaggccattacaatgatcacaacattatactcccatatcatcctccaaaaatctattactgtatttgctaaaggtccttgagttgctacatatgcttttggcccatagacgccatggcagtatgtccttgtatctgttctttttaacattttcttctttttctccagtggctgtgggatatatcttttctgttctatatttggtagacaatcttcttaaccgcatgaagtcccgggcgaagttgtcctccccattgtggtcaggactcttcatggcctggaccctctggatgaatttcctcaggatctccacttgctccatcct

SEQ ID NO: 479958 - DNA, 523 bp, Homo Sapiens
  misc_feature (43)..(43): n is a, c, g, or t
  misc_feature (132)..(158): n is a, c, g, or t
  misc_feature (269)..(269): n is a, c, g, or t
  misc_feature (271)..(326): n is a, c, g, or t
  misc_feature (486)..(487): n is a, c, g, or t
  misc_feature (506)..(506): n is a, c, g, or t
gaaaagtgagaagtcagagggaacaggacaggtgcagccgggntctgaggccacacctcacacctcgctgttccccaacatcccctgagcagtgtgagctcatctcaccagatgagaagaggccctgtgcannnnnnnnnnnnnnnnnnnnnnnnnnncccccacccatccagttctcctcagcaaagcaaattccttaaacacctttggtggagaatttcttacccagacttggggctgtgatgcccttcagtgcgtggtgagtgcancnnnnnnnnnnnnnnnnnnnnnnnnnnnnnnnnnnnnnnnnnnnnnnnnnnnnnnnncaatgcagtgaggctctctgggtgaggctcccaacctggcagtccccagcctcccagcatctgtgagcgtctgttggactttacagaagagcctcatcctgtctgcccctcactctgccctggaatcaacatcttccgagtccttcttgggggaaataanntgccccacttaactccatnaactgcttcccattccg

SEQ ID NO: 479959 - DNA, 331 bp, Homo Sapiens
ctggtcttggtgcacgatggtggtttgatgaactgtgggttctgcatgacagtatcactggtgtacagctcactctcgccccggatgcggcggaaccgagggatcttcccattgtattcctgcttccggatggtggaatacacctcgtccccttcaaacagaaccagggagttctcgtccgggctgaagggggcgtagcctctcatctcgccaagtggcaccacagtgccattcaccaggttccagcagctggggtgccgggcgttggtgccacaggccagcagcccctcactccgcctctccaggagagtgatgtagttctcgcagtccc

SEQ ID NO: 479960 - DNA, 445 bp, Homo Sapiens
  misc_feature (105)..(105): n is a, c, g, or t
  misc_feature (404)..(404): n is a, c, g, or t
  misc_feature (423)..(423): n is a, c, g, or t
tacaaaccaccaaatcctctgcgtccccactcctccttcagggactggcctgagaccggggcacagggtaggggggatcccaacactcctccctgtggaggaggncagttagggaaactaggatccagccaaggcccggggggagacccgcatgttgcttggtctgctcaagtcggagtcaggtttcagtgtcttttccctcccttagcccaaccctccaaggcctcatgtctcctaagcatgctgactggcatccgaaaggcccccacttcaccatggtcttgccctcaccccacatatgtgtgtacacgcgcacgcctgtatgtgcgcttgccctcagacatgcaagtgaaaggagggaggcttctgttgttaaatggcactttttttcctcccctcttttntccataaggaccccagggnagagggttgggttgccttccct

SEQ ID NO: 479961 - DNA, 812 bp, Homo Sapiens
cactgcacactgtcaccagtcactgctgggatgggagaggggtccccatggggccgggaagccatgaccatgggagaacatgggatgaactcagcacacacactttactcaggttggaagcagaacgaaaacccaacaccactggcgggcgatgtggaggggcagggaacttgagaacaacagctggaagaaagcaggcctcctgtggccgacgtcaggatggcaatgcagaactcaaaggatggagcagcagaagcacgggacagactcaggcttggcagttttgggtccacacactttgcttctcagagctgtgttcagttggtgtgcggggaggggagggtggtgctagagcccagtgagaggtggtacaggtggacatcaaagtcacattgtggcagctggcacagagccactgcctcatcacctccaagctcatgttggaggtgaagatcattctaacctgagaagcaatggaaagatttgggcatgggccctaaggattccactgaattctgtgctagagtatcattttccaaatgtcttcctcataggttataaaaatagtatttttttcttggtatgtttaactgccccctcccactaaaacaaaattcctgctagctttccctgtggactctaaagctgggctctacccattcctctgcctggtttgccggtggaggtcaaggccactccctttccgcaaacctgaaggctgcacattgcatcccccagtctgagtgaacatctccaggaagagccacctgcaccttggccaactgagtaggccagggaggcttggcttccaa

SEQ ID NO: 479962 - DNA, 410 bp, Homo Sapiens
  misc_feature (37)..(37): n is a, c, g, or t
  misc_feature (311)..(311): n is a, c, g, or t
ctgtttgtccacctgcacaggcattctccttgttccnagacaaggcttctgaaggacggaagacctgcctcttcaggaaaggccagaccagtagggagaggcctccgcagccccaagtgtcaacaaggggctcaataaggctttctgggaagccactggcagctggtgggatggaagggggaggtggaaaagggcagaggaaatcttagatggaaggttccgtggtggggagaaatggcattgtctgatgcagctgtgtaaacaagagaagccctgcagaagctctaagcacctgctgccctgggccagcnaccaggccagccagagcccacacaagcaggctgggcctaagactagggacccgctggctttaacctctgcaaggtgcttattgcaaactaacccctgtg

SEQ ID NO: 479963 - DNA, 460 bp, Homo Sapiens
  misc_feature (76)..(76): n is a, c, g, or t
  misc_feature (87)..(87): n is a, c, g, or t
  misc_feature (343)..(343): n is a, c, g, or t
  misc_feature (354)..(354): n is a, c, g, or t
tctagagttagtttttaagtaaaattatgcagattatttattagtcaataggatagttctgattaagaagaacagncttactattgnactaataaataatctgcataattctacttaaggtgtgtaatctctgttctagagttagtttttaagtaagcttgttaatctgccactttgacattttgcttaggatgtcagtagccatattaagatgtgtagaataccttcagaagatgatcatagtgttttgtaatcatttaatgtctgcagccaaatttttaaaggtaatttagacctaatactgctcttgctgtgtcttattaagttaaaattaatgaatganttctggtaaanttcaaaaggcactctgtgagtagagagtatcatttaagcttattttagtcacatgtagtatatatctccttaaagctgtcactctcactttcttaccattctctga

SEQ ID NO: 479964 - DNA, 784 bp, Homo Sapiens
atttataacaatatctgtgttatttagttgtaaaggaattcagcaaaaattattaaaacgttcacgtccccaaaacggggctgcccgctttcccttcctgggtgtggcccacctccttggcaaagtgtcttatacagggaggggaaggctgcaccaccagctctcccagtggggtgcgttctggtgggagggtaggaggtgcagccccaagccctccctgcctgtctccctgaaggcagcatgggggtgccaaggagcaggcagggaggggatggagaaataatactgtgctcgcttgccggcttgctcgctcacatataaaatgtaattccttcatttttacatttatacatccggcggggccagggaagggctggctggggaggggctcactgaaggacttcaccggcagggggcaggaggctttctgggggcagtccgacggggcagggccctatgccaaggggtcccctatctcgtcctcagggccccggcccaggagttctcgcttctcgtccgtgctggccagggagtggcgactgccatggccccccatgtagagtgtggcatacacggggttggtgaagttggtgggcttgtcagggtccagggcaaagtcagcgtccagtaggcctcccacatcatcaggctctccgccttcgtacatcttgtaggtggggtttccaatctccacgttcatggccccgttggtcatccgttggtgctggaagcccttagccccttggactcgccgcttataccagaataccactccggccacccc

SEQ ID NO: 479965 - DNA, 577 bp, Homo Sapiens
tttgctcggtgccattttatttaatgcaaacactagacagtttacaagtcacacctggacacaagcacgtgaacagatgtacagggaattctggaattttgagatcagtccccatttcttcctcagggccctggcactgaaccccagcccctgtcccagagcctcccctctgggtcccaccccagaagccacgcacacctgaaatgaacgttctgcaaacagaaggctgaggggtcttccaggcatgtccagtcactaggagctgccaccggtgggcttgagtgccaggctctaggctttgtgcagaaagcacccggggcggggggcggtaagggagagcaaaatgggtctctctcaactgcagtcagtgctcctgggaacacggtctcacagacagcacatattctacgtcacagcatgtgctcagagttgttacaaattttctctgccaaattaagctgacagagattggccactttcaaccagtcctttcagtccactgtgtctcccctctcgcttgggacaggcccatgctggccagtgcaaccttcagatagacacatggtgaccagagccc

SEQ ID NO: 479966 - DNA, 1266 bp, Homo Sapiens
ttggccagccatggtggcctggcgctcggcgttccttgtctgcctcgctttctccttggccaccctggtccagcgaggatctggggactttgatgattttaacctggaggatgcagtgaaagaaacttcctcagtaaagcagccatgggaccacaccaccaccaccacaaccaataggccaggaaccaccagagctccggcaaaacctccaggtagtggattggacttggctgatgctttggatgatcaagatgatggccgcaggaaaccgggtataggaggaagagagagatggaaccatgtaaccaccacgaccaagaggccagtaaccaccagagctccagcaaatactttaggaaatgattttgacttggctgatgccctggatgatcgaaatgatcgagatgatggccgcaggaaaccaattgctggaggaggaggtttttcagacaaggatcttgaagacatagtagggggtggagaatacaaacctgacaagggtaaaggtgatggccggtacggcagcaatgacgaccctggatctggcatggtggcagagcctggcaccattgccggggtggccagcgccctggccatggccctcatcggtgccgtctccagctacatctcctaccagcagaagaagttctgcttcagcattcagcagggtctcaacgcagactacgtgaagggagagaacctggaagccgtggtatgtgaggaaccccaagtgaaatactccacgttgcacacgcagtctgcagagccgccgccgccgcccgaaccagcccggatctgatggccctgtccagctgcaagcatgcacaatggtgccaccgcttgtcacccggctccccccaccccttcatttggacccgcagctgctgtgctgctctgtgccgtcggctccttgttggtctgagtttcccggatgagctctgggtgtttgtgagtttggttcctctgccctgccccaagcgtgctgagacttggtgccgaaattcaagagccagctctgatagaaagccagcaccagcctcgggagctgctgagccaccaactcccaaagccagcctgcctccagctttactgagcacaggatgcgggggccaagatgatgctgaggcctgatgacatttatgcttaggggacaagagtttgaactcaagggactgtgactcctgcacactggagtggctcattgtggcaggtttctgccaatagacagctcctgacagtgcctcaaggagccagagcctatgtgta

SEQ ID NO: 479967 - DNA, 891 bp, Homo Sapiens
ggcgccctatgacactttggcaaatgtcgtgaaagattggttgatggcacagcaaagaggaaagcaagccccacttgctatagagtgctgccacgtaggggttctgaatcgtcgaccgcgacttcttcaggtaatagatccggtagaattccccccgtgatgatcgcgaggatggcaatgacgatcccccacggcacagagcacagcgtcattttattgtctcaccagttttcagtgggtacttgatgctctcatcattgcagtaaaaccctcggtggtaaggcttgatggtgcttgtctcgatgatgaggaaggggaggcccgccatgaagaggcagaagaggtcgaggcagatgagcagcacccgcttgctgccgctcctcctcgggttgttgttgagcgccgggctgccgccgttcttgctctccgggacgatcgctttgtcgtacttgtagttttgcatggcgctggctgcggcgcgagcctcccgccccgcgaagacgtcccgcaacagcagccacacacccaggcgcccgggtcgcctcctggccgaggctgctgcggatagtggcgggtcggccccggctccgggcgcggcggctagagtgcagccggggctgcctgcctccaactgcagaaggtggtgttttctgctcctcctgcgcgcctctgctttcctctgtcaaccctaaatcgttctaaagtccaaggggaagagagccagatcccgagcagaaacttttgcagagctgcgcagcttggggcgcgctgttgtggcgcgcgtctgagtgcgcgagcgagcgagtgggcagcgcgggcgctcggccaccttcctccgcagctggttccttaatgaatgggagctgcgtttgaaagccacccccactccaa

SEQ ID NO: 479968 - DNA, 1194 bp, Homo Sapiens
  misc_feature (302)..(332): n is a, c, g, or t
  misc_feature (443)..(471): n is a, c, g, or t
caaaggaacctacctgacacatgaggcaaaaggctccgacgatgctccagacgcggacacggccatcatcaatgcagaaggcgggcagtcaggaggggacgacaagaaggaatatttcatctagaggcgcctgcccacttcctgcgccccccaggggccctgtggggactgctggggccgtcaccaacccggacttgtacagagcaaccgcagggccgcccctcccgcttgctccccagccccacccacccccctgtacagaatgtctgctttgggtgcggttttgtactcggtttggaatnnnnnnnnnnnnnnnnnnnnnnnnnnnnnnnttgccctcagccctttccgtggcttctctgcatttgggttattattatttttgtaacaatcccaaatcaaatctgtctccaggctggagaggcaggagccctggggtgagnnnnnnnnnnnnnnnnnnnnnnnnnnnnnccctggagtgttaggaggagagtgaaggtagaggggtgaggaagggtaaggggcagggctggtttcagctgggggctctcaccagccctcctttcagcctctacaacagagcagcttcccagacttctccaggaacccagaaacgggatggttgtcggcaaaggttgggagtggcttttcctctggtagccacacacctgagcactacggacagggaggcaggtgccaccttgacacctctcttccatagcaatgggaaagtgatgagtgcgggagtcctgaggagatgtggcctgcagacaacatgcagccatgcagggacccaggactgtaacctggggaggacgcgggtccctgcaaggaagagtagatttggagaggaaggatggaggtggactctcaccccattccccccggaaatgaacaaagccgggccctttccataggaactgcccttggagatagcagagtgtggctgcccctccttgctccagcagcagtgggagaggcactgctctggggcctgaactgcctctgcttccccccctgaggggcccctcactcttacccaagactctggattgttgcacggcaaccactcctcccatggcatggtcagcaactacttctcccttcgcggcaccctgtgccccttcctggtcccaacgccagccttcatccttcctccctcagcagcaggaagacataacaaaaaaatactaa

SEQ ID NO: 479969 - DNA, 723 bp, Homo Sapiens
  misc_feature (330)..(357): n is a, c, g, or t
aaattttcttacaagtggatttgactgtgtcctgataatacaggaattcacatcgaagaagagactcttagcagtttgtatgatatacaaatacacctatattattaataataaaattgggctttatcctactggcattttttcttggcaaatcctgtttcccactgcatttcaaagtcagctttctccttataaaaatggaaacattcatagcacaggaaaatatttattaaaaaattacactgggcacacaacaagcacccatcaacaaaacccagttcagaggcgtctttgggtatttaaagcaccttgataaatgcaggggttgannnnnnnnnnnnnnnnnnnnnnnnnnnnaggatgtagctttatttgtgactccaaaatcttagctagaaaggactctcattgtttgatattctttggttttactaactaaaaaatgttgatttgacattaaagaagatagaaaaatagaatttctgtttcaaaaattgtggaatttctcttcatgctagtcatccccaaagcattagtgtattaaactctagtagaaggaatgtttactgttcagtacagaaaattaggccggcaaaataattttttatttcacattaaatgtgaataagcctattcataaaggtaatttagccaggtgtcaaatgtatccatctcattttcacgtgcaataatgtgcctttctgatcaatcttcacatccttg

SEQ ID NO: 479970 - DNA, 444 bp, Homo Sapiens
tcatggtcacttctttatttttgatacaaatgtacatgacacgtcttgacagcccacccaccaccacacaggtagggcctggcccccagggaagaagcgggatggggagagagctggtgggtgctggccttgcagaggttacggggaggggactcagctccacagccaccagctgagtcggggaccccggggagccagccccaggctcaggtgctcagtcctccacccttagccagcacacattccccctccacgcaggagcaggaggagatggagggaagtggtttttgatttaagttcatagagaaggggcgtgatttgtgctgtcaaacaggaaaccaaagcccgtgggtggctgagcaggccaaagaaagcaagaaatcctgcttgtgccttctcattcccgggtcaaggttgtgtcagcaggatctttggagaattcgg

SEQ ID NO: 479971 - DNA, 279 bp, Homo Sapiens
caacaaaggaggggatgcccccgctcagccctcagtagggctgaactggctcatgggggtggggcgcatgtacggagagctgccccacttggagtgtgcccacctgcccctttggcttggagggtgccctagaaggcgaggggctgggagtgatgccttgcaggcccctgctcactaggaggggggagatgctatatacagaggggaggtgcatggaatgtgggggacagaagctcctgccccctcgtgccgaattcgccacccaggcctcgctaccta

SEQ ID NO: 479972 - DNA, 880 bp, Homo Sapiens
  misc_feature (44)..(125): n is a, c, g, or t
  misc_feature (144)..(172): n is a, c, g, or t
gaccatgtaatacgactcactataggggatatcagctggatggnnnnnnnnnnnnnnnnnnnnnnnnnnnnnnnnnnnnnnnnnnnnnnnnnnnnnnnnnnnnnnnnnnnnnnnnnnnnnnnnnntgtacaagaaaggtggggnnnnnnnnnnnnnnnnnnnnnnnnnnnnnccttgggaagcaggagtttatttttatccttttgtaagtattaactcggtaatcacaacaaacacggagcaatctcaatgctgtttatccggaggacagtctgcggggtcgtgacgattcttttcttcttgaagtttttccttttcctgaatctcataatgattcttggccatgattctgtcttttcaatgactgtggcttctactcgaacaagatcctttccgaggagtggcttgccaagcagcgtgaagttgtctgccccaaccagcaggaccttctccagtcgaattctctctccacacgcaaggtctagttcatttccaattaagatcaggtcttcagaggtcaccttccactggcggctggcaaagtgcaccacggcaaagagcctgccatactgccccgtgacgatcatctcattcaccttcttcacgacctctgcatggtgtctggtctcctcaactgggtctggcagaacaacttctggcccgggtggtgaactcagggatgttttaggaacatatattttgatattaccctggtagatatgaagtgctctgtgaattgaaccttcgagaagcagaccaaagggaggctgctccgggccccgaaggtctcaggatgctgtggctgcacgcggacgccagccgccctaaggtgaccgtcagggaagatgctgccatggccgcagcctcggccggaaacccc

SEQ ID NO: 479973 - DNA, 792 bp, Homo Sapiens
  misc_feature (359)..(390): n is a, c, g, or t
  misc_feature (486)..(530): n is a, c, g, or t
  misc_feature (618)..(618): n is a, c, g, or t
  misc_feature (747)..(747): n is a, c, g, or t
  misc_feature (752)..(752): n is a, c, g, or t
  misc_feature (757)..(757): n is a, c, g, or t
cttttatttactcacgaatttattgtgaaaataaagaaactcaattattccagttaatggatttcacgttaaatagtttaactttcaatgggctttctgaagagctgttcataggatgatatttggaagagtcctttccttaaggaaaaaaagggtgaacaattaataaagagttacttgcgttaacggtcacgttatttcattaaaagagaggaggagcagaaatctatgacatagttgcccaacatggcatttatctgctgcaacagaaagctgtcactggcgggcatttcacagtatttgcgcataggaaacttctgccattgttaaagtctgagttagaattatcaatgaattcnnnnnnnnnnnnnnnnnnnnnnnnnnnnnnnnaaaaaatgatttgtgttttgcaggttggaacgcaaacccagtctggccacgtcccgtgaagttgtggacaaaatgtttcagtttctgttcacctcnnnnnnnnnnnnnnnnnnnnnnnnnnnnnnnnnnnnnnnnnnnnnggggtgggggatggggtaggtatgtgcttttggctcatgtttgtgatgataactgaagtcttttgtgggtccgacctgttgtagggtntgggggaaagtgaaggaagagaatgaaggtgagtccccgccgttgcaaaccttcaccaaaccacgcggcccagttttcgtgagtacccctggtgtcccagagaggaggacccagcgtcctcggctctgnccagnctttnctttggtctggtgggtactcgaggcagttgagaac

SEQ ID NO: 479974 - DNA, 205 bp, Homo Sapiens
ccacggacctcttttaccagggcaactcccagacagtgagagagtggctcaacgtggccatcacccggaccctgcaccagggcgaggagagccttttagagctgacgaaacagatctgctctttcctgcagacagcaccagagcagttcccctccgaagagttcccaatttccgaatccaaagtcaacatggacgtgaatttccc

SEQ ID NO: 479975 - DNA, 350 bp, Homo Sapiens
tcagtcggtcccgctctacccgacggggtggggtgggcaggttaatgttaggagtggacttcaccagaaggaagcagaaagcaagtaggggcacctgagtagggccacatcccccacaccgagggaagggtcagaccaccctgaggtcagcacaggaggaagaagacttaggggagcactttgaggcaggaggctcctggcgtatgctcttctccccactccttcagtgcggttggcttagggggaagggagtgtcatctgcccttccccggggacactggaagaggagaggtctgggagagggacggacggatgctgccttcctcatcatgccaccccgtcgggtggag

SEQ ID NO: 479976 - DNA, 957 bp, Homo Sapiens
  misc_feature (219)..(219): n is a, c, g, or t
  misc_feature (254)..(254): n is a, c, g, or t
  misc_feature (803)..(848): n is a, c, g, or t
aacaataaaaggcaactttgtacaaaaaagttgggacccagagccagggccctcaacttccatcctgcgggatggggcttccgtggagaagtgggggatgctgcagtggtacaaagacagcctcccccaccgccatcctccagctgaccgtcctccaaggccagcactgggcgtccaagggaaagaaggaactcagcccagagggtgtgggcaggagangcctggggtcaggcctccacccacagccccctctnggtgccaagtgggaagggtgttggggctggcttgggaaccttacccgctgcccttccaacacctggatctgtgggcagcggtcccacaaaatcccccttggggctccctgaggaggacttgtggctgccgcttccaccagggcagagggcacaggaggggccagcactccaaagggctctagggtgggtctttcaaggacatctgcaaagccctggtggggaggggcggcggggctgtcccacggaggggcctgggccagaggctctttggaactcttgcacttctgagtgggggactgtccgtgctgcccacaacctctagaccatgcagcctgctcatgggttcctggcagagaatgcccactccccagcagactcagggcaggcccccaactgcaggcttccaggaaggcccagggtgtccacctcacgccaggtggtctcagaggacccctgtgcaaccacattaaggaaagctgcagcccccacccacccgcctgccagttcaacaagcaccggctgcacacgcaggctcccaggcaccatcannnnnnnnnnnnnnnnnnnnnnnnnnnnnnnnnnnnnnnnnnnnnnggaaagacagcaggtactgtagcctcgcctgctggccaggggcgccggctcagaggacctgccctgacctgcacgtgctgaccctcgtgccgaattcgccacccaggcc

SEQ ID NO: 479977 - DNA, 138 bp, Homo Sapiens
ttttttttcttaataaatttattcacaaaaagtgatattgcagagggtctgggggctgtacatgggcaggggcttggtgagctttgtacatggggctgggagacaagggagcctccaggtggaagggtattttttaat

SEQ ID NO: 479978 - DNA, 670 bp, Homo Sapiens
ttttttcctttctagccacacaacagtgttatttcaagaaaacaaaacaagtcagagaaagaaaaattacctattacctattggcacatttctgttacgtcaagtctgggcttaagccctgttggtcctgttaagctctttttgttctgtatcaagcaggagtgtcttgagttctttctaatccccatacatcatgtctttgaaatgacaaaagtcccatcctttgttgcccgtgcagtaatctgcttgtggaactctttaagaacatccagctggccaggcctgatgtggatgtatgaccggatcttggcgatggctcttacagcctcctctggactccatttgtgcacctgtgaagagttgcacaggaacctcgtctcgtactcctcgttcatggtgatcaccccgcgcacgttctcgtcctgtaccagctggcgcgttaagctccgcaacggcagcgcgcccagcagcacggtggggtcgatgcggtggtaccagtcccggtgcgcccgacccggcaccttcccgcggaacagggtgtagagcagcgtcgggtagaagagcacccgcgccaggccggcctccagcagcgcggtggccgccatcccgacccggcgcagcggcgacccgtcgtccccttatagggagtagcattatcatgatgatgatg

SEQ ID NO: 479979 - DNA, 424 bp, Homo Sapiens
  misc_feature (364)..(380): n is a, c, g, or t
cacaagtgggcatgagtttttattctcagtgcacagcagtattggtttctgttcatcagcaaaaagctttattggctccaacaaattatcccttttaaaactcctcttcttcttctggtctcagtggaacaacacatttgaatttcagatttgcagtttatagcattttttttccctaagaaccatataaatacatgcaaaaccttgtacatagagcttaaataatatcaaaatgcaaatatagattgggtgcactgttaagctgaattgcaaattatgggcaacacacactgggactggggtatacgttgctttgatatcaccatttgtttgtttatgtcatgcagaccacaatagtcaatcnnnnnnnnnnnnnnnnngtacaaaaataccagtgcttgttatactagttactaaaagaagg

SEQ ID NO: 479980 - DNA, 745 bp, Homo Sapiens
  misc_feature (321)..(446): n is a, c, g, or t
  misc_feature (586)..(586): n is a, c, g, or t
cttgcccagaggaggactacgtgggggacgtgccaccagaaccctacttaggggcgggatgtcactccgaggtcgtggtgttcgaggtcgtggaggtcctgggagagggggcctagggcgtggagctatgggtcgtggcggaatcggtggtagaggtcggcgtatgataggtcggtgaagagggggcttcgtggcccgctgtcctcgtctgtcgctggtggtgccttgcccttgctgccccggtctcgctcctggtcctccttgcccttccgctggctctctctctgtccgccgcgcttggtcgcttcgcctgctgcgcgnnnnnnnnnnnnnnnnnnnnnnnnnnnnnnnnnnnnnnnnnnnnnnnnnnnnnnnnnnnnnnnnnnnnnnnnnnnnnnnnnnnnnnnnnnnnnnnnnnnnnnnnnnnnnnnnnnnnnnnnnnnnnnttcgtcgccctttctccgctccctgttcccggctctccgctgccgtgccccctctgggcccttccccggtctttgctcgcttgctcacgccttctctccttctctggccccccgtcgctcttttgtccgtggcttgcccncttctcctcgcggccgccccccgctcgcgcttcttgcctgctcttcgttccgggtgcctcgccttgcgctctgcttggccgcctccctctgcccgttccttctcgcttcgccgtctcttccacgccctcgagctcctcctctgcctctccctccgcccg

SEQ ID NO: 479981 - DNA, 874 bp, Homo Sapiens
  misc_feature (552)..(552): n is a, c, g, or t
  misc_feature (696)..(696): n is a, c, g, or t
  misc_feature (863)..(863): n is a, c, g, or t
catcgagtttttcacactctgtagcaagcgctcgtgctgctcggctatggccaaggcagcagagtggactttctgatagatggcctccccgtctcgggtctgaaagataaacagcccttcaccagtctcacacatcctccctgcctcaaaagtgaaccacgtagtatcacgtccataccgccgcagggcgcttagcggccaagagatgagtttgactctgggattctggacgtcccaaagacagatatactcatatgtaatcactctgttctctcctcaaccccagtggcccagtaagtcaggctctcccaaggctgatgtcattgatccgtgttcctacacactccatctggagtactttgcaccactcatcagcctcaagatctgattcgcaagcaaaagtcttggaggtatcgtcattgaaataaatccctatggcatgtttcttggtgctttttggcaatcgagctacgttcttcacattattgagttctgtaaccttatgataacacctgaaatatgcagcacgttcatcagaaaatttctccagtntttttggacctttgcttgaagctttcttgaatactaaccagcatcgctgataaatcccgaggcgtctgctccggatcctcacgtacccttgcttcactatgtcattaaaattggaagccatcccagacagccggtgaccccccntttacccaagagcgcgcacccgaagtggctctggggagggtggagggcagggtcaagacaagcagtcggtgggagaaagttggagaggtgaagctgcttcggcggcgctgggcgaggctttagaaggcgcacatcactttctcatcccgggaattccggaccggtanccagcctgttt

SEQ ID NO: 479982 - DNA, 1115 bp, Homo Sapiens
  misc_feature (326)..(326): n is a, c, g, or t
caaaggtgatgcagcaaagttttccaagacaataaaactatgccggatattacaggattccttccgttggaatgaagttttcccttcagttctatgaattcagcctcccttaaccaagttgctttcagttttaggacctgggctgtcagtcaggcccgacctccgcaacggcctccgaccaccgcctgtggagcagcacccagaacaggaggcgcgccccccagcagcagggccagggcccagcttccagctcctgggggagttcagccatttccacagccgggccgacagccagggcgccccatggcttcctctgcaccctgggntgccacgcgttccgccacccgcggaggccgctcctcagggcctgcccagcgcagcacctgcgccagctcatacacctcgttggagtaatgggcgccctttgtgctccagcaccaagccctcgaccatccccagcagctgctccacctgggcttcctgctcccggccggtggcccggttatcaaaggcacagacccggcccccgcactcggccaccagctcgcgcaaggcccggttctctgtgttgctcacgtaatcgtgcagggagcccccggccaggtcctccttcctggtgaagacgatgaccatccattttaggacgtcctccccgaacatgtccctcacctgcctcaccgcctgctggtcctgggcggtgaaccgacccaactgggtcaccaggagcagcgcgtggggtccgggggccgagagcaggtagcagtgacctctctcctcacagccaggatctgtcttggacacttgggagctgaaaatgtccggagtgtccacgacttccacgtggcacttgtcccacctgcggctgcccgtggtgcaggccctggtcacagacgtggcccccagcctggagaagaaccgtctctggcccaggatgctgttcccagtggcgctcttctaaaccatagacattttcttcatctgtcgccatcttccttcctcccatgcttacctttcctggtgacaggctctgaagttggccacaagaagccccaacctgctgctttcccttcggctgtgagtgcagaaggcatcccgagaattccggaccggtccag

SEQ ID NO: 479983 - DNA, 737 bp, Homo Sapiens
cttttgctcagtatgtttttcagggagctttctcttctctctctcttgtcccctgttctctgtgacgtgtctcctatttatgtctctttttcctgccttcttggcttccattgtaatgcgccacacgtttctggtcgctctgactgtgtctttgtttctttcttttgccccttgccgtcgggtctcgcttcgctctttcttgtttccttcagcctcttcgagttcacttttttcttcattctgcctattctggcatcatgctcatcttcgcacggaggtccctcagccttcttgtagtttaaggcaatcgtctatagactccttgtggctcctaaagtaccctgtctgttgagatttcaagtctcttgtcaccattcctcacatctagtgacaactgaaccccataatgcataagtggcctttattgataccaaagacttgtgcaaacagtgatctctctctccctgtgaacggagttgagcacattagctaacaatgtacattaattttggattttcatgttctcatgttgtttatttttgtaaatattatctgatgtttggagcttgagtatacagatctgtaaatatagttcattgtatttgtactaattctgattcttttgctgtatagccttagatgtgcaatgcagacactatctaactgtgtgtggtaaccttgcgtcacggagctgttagtgaacgaggtaaaaataataaaggtacagccagtgcatc

SEQ ID NO: 479984 - DNA, 369 bp, Homo Sapiens
  misc_feature (87)..(87): n is a, c, g, or t
  misc_feature (272)..(272): n is a, c, g, or t
  misc_feature (312)..(312): n is a, c, g, or t
gcaaaaaagtggcggtgttttaatcaagtctcattacaacggcagaattaggaatgagtcccacctagcttccacatgcgtgggcangcagctgtcacacgggcctgtcgtggcactcagcccatggcacagacatatgtggctcagggcaagaaccagtggatgggctattcggaaatggctagggaaacaactgtttccctactgtcctggcgggacccaccctgggctaacgggcttcccaaggaagtcctagtggctctggggtcctnaagtccccaaatgggaacctaggctgagagaagcaagctntgagggcatccaaagggctgcctcaggttttgttcctgagaaccgaagcttggcccc

SEQ ID NO: 479985 - DNA, 518 bp, Homo Sapiens
  misc_feature (282)..(336): n is a, c, g, or t
caatcttggagttaacaatctgacttatttttgttttatcaaagaagtaggaaaattacaataagaattctagagatctctataaattacagacctatgactcaaaatccttgaaacaatttctctacgaacataagagttaaaaatagatttcagtaaaaccctatatgcgtcttatgtgtacacagtatagctatgaggaacagatcttattttgaggaactttattgttacatttttgcaataattgaggcacaactacctcctgcttttccaacatcnnnnnnnnnnnnnnnnnnnnnnnnnnnnnnnnnnnnnnnnnnnnnnnnnnnnnnngcctaaggttctggagacaaaactgactagagtctatgtgtagccaagttgtgaatgacagtttagccttgcagagtttccttcttctccaattacaatgtgttacagaatttggaagggggtgtctttaaaaacgttctaattcaccccggtcatgaggaggaggaggaggaagtccagct

SEQ ID NO: 479986 - DNA, 1507 bp, Homo Sapiens
  misc_feature (374)..(431): n is a, c, g, or t
  misc_feature (513)..(513): n is a, c, g, or t
  misc_feature (747)..(774): n is a, c, g, or t
  misc_feature (912)..(912): n is a, c, g, or t
  misc_feature (915)..(915): n is a, c, g, or t
  misc_feature (1091)..(1091): n is a, c, g, or t
  misc_feature (1376)..(1376): n is a, c, g, or t
  misc_feature (1398)..(1398): n is a, c, g, or t
  misc_feature (1431)..(1431): n is a, c, g, or t
  misc_feature (1463)..(1463): n is a, c, g, or t
  misc_feature (1478)..(1478): n is a, c, g, or t
  misc_feature (1485)..(1485): n is a, c, g, or t
  misc_feature (1487)..(1487): n is a, c, g, or t
  misc_feature (1493)..(1493): n is a, c, g, or t
gggtgtgcgaaaggaaatccacgtatctagggagaggggtgtcttttggtcagaggaccggatgtgaggtgagttttccccccgccagggaggagttattttagtttacgggaggggatgaggagttcacccgcgcccgcggtggttgtatcgggacgcggtggtgtttcttggtagggaaaaggacatgatgtggaggccgggttttttggtttatctcggctaggggcgccccgggccgccccaacaaaagtgttgtgtgtagaagaatgttttttgtgaggggaggagaagggggccccaccggaacgattttcttaggatgtgtgggtagttggagggaaagggagggtgatgtggtgggcgtaggtgcnnnnnnnnnnnnnnnnnnnnnnnnnnnnnnnnnnnnnnnnnnnnnnnnnnnnnnnnnngaacagccgggtgggataagattgaagagggacatatgcattttacttttatttatttttgctttaataatgcatattctgnttcacgcaaaaggtgcaaaggacagaaagcaggggtttaacttggctgatgaaaaatcaagcaggatgacatttctagtttcatgaacaacctaaaactaggagaaatagaaaagtcacagctggtaccacagagcacgcccaacttcacagctgtctcctcttaggacctttggctagggtgagagaagctttgaagacagtggcctctagtggacttggataagtggcagannnnnnnnnnnnnnnnnnnnnnnnnnnngaatcatggtagctgcatcacaaaagctccaatcaagagggtggtaaaaagaaggcacagatcattgcaaataccagattttctctttctctttttgtaaatataccgtcatatataagctaaaatttctcttagggnggnggggtttgctggcagggaaagggacaggttgaacctacaattgcatatgtaatagaatcctaatggggggacaaagagcgaggcagctcttagcctgtaagcaaaagaaaaggacactcgcttctgactacgtgtagtacaaacactagggaagtctgtgacaaaacacgattaanaaatcataaaattataaagcttgtaaacgaataatctgaaattacattttattaatggaaaatatcatcaaaatagtaccactatggactaaactgcctgagttttcatttcgcattgagatctcagagtagaaaagcctttagcacaattttgctctgtgtaagtcacaacgagtgccagccccaggactaaaccctggggaagattctcctcttggatggaatttgtgttgtgctatcaagacttttgtgctaatctttcaaacagggacattttgaggcaanctttaatcttttggcacaagantattttggctggggcagaaatttgagtctcggntcaggtgaatatgtgacattcattgatcagtntcatttgattgtagncttcttntntcgtcnttcctcgcaacgag

SEQ ID NO: 479987 - DNA, 882 bp, Homo Sapiens
  misc_feature (803)..(839): n is a, c, g, or t
gagaagcccaacaccagcagcagcctccgacccagagctccaccacggacacggcgcagaaggtcagaccacgttcacggccccggtgccggccgtcacgtactgcacgtgctcctccggcacgccggcgctcaggtagatctggtccgcgttagtagtagatagcgttgacgcccgacagctgctgccgcccatgaggacgatgatggacagcagctgccagcgcagcgagcgcatccggaacagcttcagcacggagatgaagcccgcggccttctctgcctcatcctcctgccggatctcggccacctccctgtccacagagtcccagccgtgcagcgtctgtagggctttcttggcggccgcttcgtctttcttcgtgaatcagcaggtacctggggctctcggggaagaagggcagcagaaggagctgcagcgccgcggggaccccggtcagccccagcatgatcggccagccatctacgtttgcaagtagattccgaagaccaaagatctgggccacaaggatgccaacagtgatgaagagctggggcaccaccccgagagccccccgcaggtttttaggggccagctcccctaagtacatggggaccacgttggaagatacaccccttccttcatgctctgatcctgttgctccatgcttgctctggaagggcagagtgccgctcacctccttttagccaaagtaacgcgtgcactgaatggagagagaagacattctgggtgcactttggccatccgctctcgacgaattcgagctcggccgatttggcctgatnnnnnnnnnnnnnnnnnnnnnnnnnnnnnnnnnnnnncgccgccccgcggtgaactccaggttgcccatgtgatgtatcc

SEQ ID NO: 479988 - DNA, 998 bp, Homo Sapiens
tccaggctaatgtttggcgtggatttgcgcgcgttcgtttcacaggcggctgcttgtccacgtccgtcatccgtcagggcccgcagttcctgacgggtgtgctgtggaagggtgtctagttccccgccctgccgggaccctgctgggcaccacagttttcctgcctgtgagcgccttcggcttcggtgccctcggggacagcggcagcgggtgtgggtcctggctgaaccggcgcagggcctgctcagctcgcttgaagcggacctcgcgcttccgcagctgctgctgcaggtctttgtccaggccgttggcggatggacgggggctgggtcccgcgggccgccgtactcctcctgcaccaggttcgtgtccctcgggcctcaggtgggccccagcgaagcggcaggtcacgccgtaggggcaccggccgaaggtctcgaagagcacgcagcgggggcccaggtcggccggcttggtctccaggtagcgccccacgtcgtgcagaaagcggcagcgatcaccgaagaaacacttagcagccgactcctggattagggagggacacagcctgttcttgtcgtagttcgtgggcttcacatggggccggcccttgttttgtccaccgggccctcttctgagtctgtagctgctccccgggctctgctgcctcctccgtctgcccgtccgccgtctgtccatcctccagtcggatccgcttagcctcaggctcagccagctcattgccagcagggtctcctacctcggtttcccggcaagtcgttctcctgccctttggctatccaggaattggtgaaactgctccttggtggtgaggtacttgacgcttaatgggcgccactccatcgcttccaaagctccggctcccgagtcgccaccaccaccattctctagaggagcctccgccgttccctccgccatcggcgccccgacgcgtgggtcgacgatatcccgtaaatccggggcggtaccagctctgg

SEQ ID NO: 479989 - DNA, 975 bp, Homo Sapiens
agttccacacttgtagggggccagtaaatttcccacgagttccaccgctcttctcacaggccccagcttgccacctcctcatcctcagggccccaagttccgcaccgggctttctggaagtggttctagtgccccggccttgcggggacctgttgggcaccacagtttttcctgcctggggagcgccctcggctgccgtgccctcggggacacgtcatcgggtttggggccctggctgaaccggcgcagggcctgctcagctcgctcgaagcggacctcgcgcttccgcagctgctgctgcagggctttgtccagccgttgcggatggacggggtctgggtcccgcggccgccaactcctcctgcaccaggttctgtccctcgggcctcaggtgggccccagcgaagcggcaggtcacgccgtaggggcaccggccgaaggtctcgaagagcacgcagcgggggcccaggtcgcccggcttggtctccaggtagcgccccacgtcgtgcagaaagcggcagcgatcaccgaagaaacacttagcagccgactcctggattagggagggacacagcctgttcttgtcgtagttcgtgggcttcacatggggccggcccttgttttgtccccgggccctcttctgagtctgtagctgctccccgggctctgctgcctcctccgtctgcccgtccgccgtctgtccatcctccagtcggatccgcttagcctcaggctcagccagctcattgccagcagggtctcctacctcggtttcccggcaagtcttctcctgccctttggcttccaggaattggtgaaactgctccttggtggtgaggtattgacgcttaatgggcgccactcctcgttccaaagctccggctcccgagtcgccaccaccaccattctctagaggagcctccgccgttccctccgccatcgcctcgtgccgaattcgtccacccaggcctcgca

SEQ ID NO: 479990 - DNA, 573 bp, Homo Sapiens
catgtagctgaagagtcgctcaatcttcctcaagggaacacccccacctcggtcactcatcttgatggacagatcttcctcacccaaggccaccatgaccttgatgggtgggagaatgaggctggactcatggctttccacagtcgccctcatggcattcttgaagagctcaaagagcatgtggtagaggtgggaggggacgtagaccatgtgaatcggctgtttggagttggctgcattgatctcctggatctccaggtcaggtgaggccatgtaatacttgtcacacaggagcttagccatgtcgtaggcatctttgaccacctcagagacgttgcagttggggtcgatgctgccgatgtgtttgggatgggctgggttggtgctgccatcaaagatgagggtgtgctggttgatgagcatgcggatggagatgcggctgaggtagaagcggtccaggaagtactggatgttctggttggagacggggtcatcgccgtaggtgtccttgtactcaagcacgccttgtgccatggtggcaccacgtcagggtaaggccccggggatgctcta

SEQ ID NO: 479991 - DNA, 1437 bp, Homo Sapiens
  misc_feature (1053)..(1053): n is a, c, g, or t
  misc_feature (1202)..(1202): n is a, c, g, or t
  misc_feature (1217)..(1217): n is a, c, g, or t
ctagcctgtgtgttcacacaccaaaggagaagggtaggcgaggggttcggagtgtattttcaggttggaatgtgaaggttcctggcttccatgtgacttgtaagtgtgccttgttttttatttaaactatgtctgtagttgacaaaagtggcttcctcacaaatttttttaaacgtttctactttggaagcatctctgggtttcttgtggcgtctggtgtggaatggccttcctccctaagcgaataacgcgtctaacaactgatggcctatcctccctctctacacaatactgccactcactaagtatcgcattcgccccacccctcaaagcggactcatacatcaaacacaatcaaccactctcgcgccccaaccacccaccatttacataacatcccttcccgcacttctctcctctccgccccactcctcaacttctctctcatcccattccgcaattccacgcatccacacccacccgcctccaaacttactaccttcacaacacaacaattaacacatccttatatcttcgattcacccatgagctcctcacgccccgacacccctatacgcctccaccacacgccaccagacacctctgtccactaacctccctaactgtctccatctctctcccttctttacacctctcctccctctcacttctcctgtgatattaatctccctgaccatcgtagctcataatacagcaccattatttatctatataaacaccaataacatcgctcttcttactttttgagatctgtcgtcatgttacaccgcacattcgattcttcataaaccctgacatcgcaccagaattcctcatataacgtgcccttcttttctatgaacgtatccctgactttctcttaatcctctggaactgactcacctgcctttgaaatctccagattgtgtctctccctaccccgtcctgtgctcccgcccgcgcgaccgagttagcacctatttctccctcacttgcatttccccatcacgtccaggacgactggctttccccgtcgagctgcatccaacaatntaaaccccatatcctaaccactagcagcctttcgtttatacttaaatactgaacccttattccttcaatatccccacacactcatactaatttataacaccatacctccacctctcctattctctctccaattatctacccacaaaggnccaacaacccctccnacaccccgaccataagtggttcgatctatgtatatacatcttttatcctccacaccttatcaaccacaacgaacgcacccaagcaatcgacacaagacgcgcacccctactacaccctaaaaacgaatccacaccattctctcctttgacagtcgctaacttttcctgcgtctcgtttttgtcgatccacaagcgctgatttcttttttccaacaaccta

SEQ ID NO: 479992 - DNA, 869 bp, Homo Sapiens
gggagctgcagggcctccgctggatctcgaaggaagaaggtgtcgtgctggtcacgggctgggtgctgctggggctggaagagggcgtcaaagttccagaaggagctctcaatgaagttatcagtcggcatctcggtgaaccccatctccaggaagatctgtcggaactgggagcggaccttgagcagcgggtgaaggtggccgctgtcggggaggacaccgtgggccaagaagttgtagggcttgaagggccggtcccgccaagagccactggagatcatctctgggctcagctctgtctcttgcttggagatgctggtactaaaggcactgcctttgctcacccagtaggtcttcagagtcacttcagccaacagcttcctcttcctcagctcgctcctctccttctcccccagcttctcagcctgtcccccccggaccagctggagccgccgctgcacctcatcctccatgctgtccaccactcggaacacccggggcccgtcagccgcactcttgtccacccgaatccacttgttggacatggccttgctgaagcccactttgccactgggcagtcgcataagctcgctctgggccaggccctctgggggaatgcttcgaaacacacgggcctcatggctgccctcccgggcaatctcctcgccctccgcagtaagctcccagtgcttggtggaccgaagttcagcctcgatgacctcgcccagcgcctgaaggctcttcacggcgcccaccaccgcctggtgctccatgcccagctcagccgccaactcggcgctgtccaggccgccatcagacgcctccagccgccggagcagcagttccgccacctgaccatccgccaccaa

SEQ ID NO: 479993 - DNA, 876 bp, Homo Sapiens
  misc_feature (291)..(300): n is a, c, g, or t
agacccggagcaagccgccttcgggacatacgccatggtctcaaggtcccattgtctgcagtgaagatgaccagcgtctttcaaagcagccccaggtcccctatggctgtcatcagggtccccacagctgcatccagctccatcagggagtccccaaatggcccgcggcctgaacgctctgcaaagctctgcccactgaactgagggtagtgggtgtgctggtcgtgggagtacgggatgcctagaaatcgatggaagccctgatgggggggcaggaaggccccctcaggnnnnnnnnnnaaggtgccacttgccggccattcctgtgaggtagcctcgggcagccaggacttcggccacggtcacctcctccaggggcaggcccccccgggagctgggcaccaggacgccagggtacatgcccatccgaaccgggagccggccggtcaggagggcggccctagagggtgtgcacagagacacaggcacgtagaagtctgtgaaccgcagccctcccgccgccagctggtccaggttgggagtggtagagctggggtgcccatagcagcccaggtccccatagccgaggtcgtcggcaaagatcagcacgatgttgggcggacgggcaacggccaggccagcagccagggccaggaggagggaccgcggtgcccccatggacatgggaccgaggggtcgggagaccgcgggctgggacggaactcctccaggaccagggcaccttcagattctcgagcggagatctgatcctcctcgcctagcggtccgggctcagggtcgggggcgtaagtcacttggcgctgaccagcggagtcgggccggggggaaggcgctagagggagcccaggaggagcc

SEQ ID NO: 479994 - DNA, 1076 bp, Homo Sapiens
  misc_feature (434)..(723): n is a, c, g, or t
  misc_feature (822)..(822): n is a, c, g, or t
  misc_feature (881)..(881): n is a, c, g, or t
  misc_feature (919)..(919): n is a, c, g, or t
  misc_feature (923)..(923): n is a, c, g, or t
  misc_feature (945)..(945): n is a, c, g, or t
  misc_feature (958)..(958): n is a, c, g, or t
  misc_feature (966)..(966): n is a, c, g, or t
  misc_feature (972)..(972): n is a, c, g, or t
  misc_feature (974)..(974): n is a, c, g, or t
  misc_feature (983)..(983): n is a, c, g, or t
  misc_feature (991)..(991): n is a, c, g, or t
  misc_feature (1001)..(1001): n is a, c, g, or t
  misc_feature (1008)..(1009): n is a, c, g, or t
  misc_feature (1019)..(1019): n is a, c, g, or t
  misc_feature (1027)..(1028): n is a, c, g, or t
  misc_feature (1031)..(1031): n is a, c, g, or t
  misc_feature (1043)..(1044): n is a, c, g, or t
  misc_feature (1050)..(1050): n is a, c, g, or t
  misc_feature (1053)..(1053): n is a, c, g, or t
  misc_feature (1056)..(1056): n is a, c, g, or t
  misc_feature (1063)..(1063): n is a, c, g, or t
  misc_feature (1069)..(1069): n is a, c, g, or t
ttattttagaagttcacacctataattttataacaatcgtgaaaatgttactcagaactagatgttttgatgacacatagcagaaatctgtggttcaagatggtcattgcaaacttaaccaatctcagcattctattctgccttttgttttgattgcgcagaatcaatataattctgattcatatggaaaataacttaatatcttaacctccgctcaggatcttcatcataaatgtaggtcagtacatacctaaaaattgtcaatgatccaacatggtcacatgtgacatgctacacttgcacctagtaccaaacaagctgatacttcaatgagatctggttggcatatacacccaagccttgtgtgtgccctcagagcactgcacacagatagtgaaagaacttgtgtacaataagaaattcacagggatgannnnnnnnnnnnnnnnnnnnnnnnnnnnnnnnnnnnnnnnnnnnnnnnnnnnnnnnnnnnnnnnnnnnnnnnnnnnnnnnnnnnnnnnnnnnnnnnnnnnnnnnnnnnnnnnnnnnnnnnnnnnnnnnnnnnnnnnnnnnnnnnnnnnnnnnnnnnnnnnnnnnnnnnnnnnnnnnnnnnnnnnnnnnnnnnnnnnnnnnnnnnnnnnnnnnnnnnnnnnnnnnnnnnnnnnnnnnnnnnnnnnnnnnnnnnnnnnnnnnnnnnnnnnnnnnnnnnnnnnnnnnnnnnnncaacaaagatattcacaaggatgaatttaaataggtaaatggcagtgtagaactacatccttcctagtcaattacacctttaggagactttaaataggnatagaaacgacaaagggcttatactgagaattgcacaaaaatgagttacttggcagcanaggtagggattgtatgtgtcacaagagtatatagactnttcnaacttcatgctctactcgttgncatataccttcgngggtcccngagaancnggtgaaatnacttccanaatgcccggngaagggnntctcctcctnagtgcttnnaantctttattatannataatncanaanccagggnggggcntctctgg

SEQ ID NO: 479995 - DNA, 768 bp, Homo Sapiens
ctctggagaacctttccgaaggaaagttggtgtgggtttgtgataagtctcaatggcacaattagcctcccggaaaaaggtcccaacgtgcaatagctgcagtagacacaggcccagagtcatgaaaaagcagaaagagaagaagctaccgatgggttatagtggcccacacaatttgtttagccaaggggcagtggtgatccatcttcagcacacacctgttgcagatgctgcaagtggtgtgttcgggctcggcttggggtaaatgcaacttcttacaagatggagacggttggcgataatcacttcctgcccacatccaaaccagccggatcaacgttgtctaccaagccagtagacaaggctcaaaaggcagcaatcaacagcggtgtcacctgcccccaaaggagttgtagagcagggagcgcaggcagaccttgctcgtagcgccagcgcttgtactagaccccggagtagaggtggacagcggcgcactgtaacccagcagcagaaggaggcggaggcagaggcgggcacagggcccagcagcaggctccagcatggcctcgcatggttcctgcacgcacatgcacgactccaccagtcaagccaaaacacgagcccacagtagccatctgccgccgcatcacatgccaccccctccaactcggcgccacggccgggcccaggcatcaatccaaaccaccatgcacaccacaagcagcaccagcagccactcgtgccagattacacaggctgaccatgcca

SEQ ID NO: 479996 - DNA, 326 bp, Homo Sapiens
cttcaattttgtaaacttcctggaaagctgtcttcactaagtatcccctagtctctatatatgtggttagtagtcatggaaatgacacataaagtacgccagaagtttgatggaacgtgttagaaactgttttgtgcttttatggatgtcatacttgacaatacatgtgtaagttactaatatatgaattgatgctaaatatatcttacatttgaattccttttggataaagttatttcttgatgtgacacagtagtgtgttttcatttttattctttacatgtgaccaaaacaatagaaaagttaaaaataaaatatagtgtttt

SEQ ID NO: 479997 - DNA, 556 bp, Homo Sapiens
  misc_feature (474)..(474): n is a, c, g, or t
aagcaaattacttactgtatttttatggcaggagggagaaaaagtgttacaacggtttctaatgaagtccggtatttaaatgataaatgactaatgtgtttagtagagacaaaataaaccaataaatgattgttctttgccatttatgcaggaaactacccttttctcaatataaccaaacaaaggctaatttataaatgctttattgaaaaatacacttatcttcatataaaattacagtagcagtatcttgagaagttttataaatatttttgcagaacactattctaattgaacaatgtaagttccatatttctctcagcaatatgaagttacctagtaactttgtttatactgattcaatttacaattgaattttctccctaataagattattaatttgacttgaaaactgctggaacaatagtgattaataaagatatgtatagataattcagctgttaaataacattntctaatttgtataaatggtactatggtactaataaaaacctaaattctccaaccaatttttttaaactgccaggaacaccca

SEQ ID NO: 479998 - DNA, 307 bp, Homo Sapiens
tgtacagacacaagcgggccaacaaatagttccagggtcacccccgagaggacaacaggcatctggaagtgctctctcgccactctgggtgctttacgtgtctctggcttgtttccatcactggaaatcacttagagaattgtagtgtttttggtccttgataaagcctagaagacatttgtgatgttacaaaatggaagttttcttttgtttctgttttttaagatctaagaagttgcatgtattatttctagtttgtgccctaaaaaagaatatgtatgtgttacccttgccctcttaccctctc

SEQ ID NO: 479999 - DNA, 768 bp, Homo Sapiens
gcatatgagtcagcacaggccggagcacctgaacagtccagctcgttgacgctagcaagaccactggggctggcagcaggatctcgtggtcgactgctttcggagactgtactcgtacttgtccaccctggatgggatgtgcacctggacgacgacgcccatgacaggtaggttcaggtctgcccaggcgcaggcgccggccactggtcgatctcactgcacactgcttccaggcagggcgccagcgttgtcaaagtactcgggggcgatgaggcttagcagcgcttggaacagccggacaaagggcaagcgggacaccagcaccaaagacttctggaagtagcccctcttcacagagctgtccttcacctgcctgaagtacacgtagccgaagtagtgtgccggctccctctgcagtgccacaggggccctgctgttgtagtgcctgtcgtcggcatgccaggggctcctctgccctccacactggcgcatgcggaagctgaactgagtgtctccaaggcagcctgagtgcgagtcgggaaaagacaggtagcagatgctgcttttctccttgtctgtgagccggaagtcgttcggatacaccagctccagcgcctggcccagctccaggtcgaaggtgaccacgcacacacactccagccaggcggagaagcgcgcccagggcgccgccggggtccgcgccgcgcgacctgaagacgtgggtccagccgcgcccaggcagccgcgagcccggcgaggcctgtgccc

SEQ ID NO: 480000 - DNA, 940 bp, Homo Sapiens
tctgtcccccaaaacctgggccgcccgccctctgttgcccctggttcctccgccgtgacgccccaggtagctcccgtcgcccccgcgagcttgttcccctccggaggccccgggcgctgcctcccccacatctggggtgccacccaagtcccccatgggcccacggcctgcccgtcccgccatggctcctccaggattctgaccctcagggtcctccccgtggctggctggaggattgcggagtttgaacatccagtactcctttgcagtgataaagaagttccatggcagtagactgccaatgcccaggctgaagaagatgatgtatgtgccacagaagcggtcctcgggcctctgcaggccagggggcgggcggtccagcagcttctcaagcagtgcctcctggtcagctcggagactgctgcttgtggttccgtaggtggagtttgaactgtgctgaaagtcgtcctctgagacaacggccactgtgggaaggcactgggaagcgcagggcaccgcctactggccgcagcagaaccggctttgcggtgtaaacagccccagcctcaggccccgcagctgggaccgagagaatcagccaccgtctggatacttcgggccgacgggtccataccaggcccccaccatacaggcggtgaggtccagtctcacggaggaggaggggagaggatttggggaagagaagatagagacccagaaagaggggtggcagagagcaaggagggagaggagggacggtggggaagggaccacggatggggtagggtcctgcggctcccctggcagcccgcagccgcccccagggtccgggagggaggtcgctgagcgcgagtctgggggcggccgggaccgtagccggaagagcccgagccggcccgcacttactgtcgccgctgcgccacgccgccgctgccccgct

SEQ ID NO: 480001 - DNA, 995 bp, Homo Sapiens
actttgtacaaaaaagttgggagcagtttaactgttgcttgagtccccggcgtgatgtgttcatggacgaagttgccgatggatgttgtcaggtgttgcacctggagtggcccagatggatcaatgaggcatttaaagtgtagaatctcaccctgaacccagactattcagataaagaactggtgacacgtggctgtacattcagcacagctgtggtgtccccaagtgccatgacccaggagccattcagagaggagctggcctatgaccggatgcccacgctggagcggggccggcaagaccccgccagctatgccccagacgcgaagccgagcgacctgcagctgtcgaagagactgcccccctgcttcagccacaagacgtgggtcttctctgtgctgatggggagctgcctcctggtgacctcggggttttcgctgtacctggggaacgtgttcccggctgagatggattacttgcgctgtgctgcaggctcttgcatcccctcggcaattgtgagcttcaccgtctccaggaggaacgccaatgtgattcccaactttcagatattgtttgtttccacgtttgctgtgaccactacgtgtttaatttggtttggatgcaaactagtcctgaacccatcagcaataaacatcaacttcaacctcatcctgctgctcctgctggagctgctcatggcggccacggtgatcatcgctgcacggtccagcgaggagggctgcaagaaaaagaaagggctccatgtctgacagcgccaacattctgggacgaagtgccatttcctgctcgggtcctgaaatcttactcagtcgtcgaggtgtatcagcaggcatctctgccgtcctcggggggatcattgccctgaacgtggattactcagtttcaggcccaaactctcagtgacgttcttttggatcctaagtggctgcttcccaagtgccattgccagtcatgtggccagcagagtgtccccc

SEQ ID NO: 480002 - DNA, 1309 bp, Homo Sapiens
ttttcaggctccccaaagttggaaaccgtggcccggaggacccagggtttgggtgtttcccttgaatcccccgtaccttcactggggccttgccttaaccccccctcccggggccccaggggagaaaggggtgaccccccgcccgttattgggagtgtccggggcccagccccagggggttgccggtttcagccttcccccaggatggcgatcggttccatgccaggcctgccgttttttcctcccctggggttcatagtccgttggagtttccctatcaaaacttgtaagttgggcgggaaagagtaggcggcccctcctggaactccccgaagcagcggggtcatgtttcttggcaatggtggaggtggtcccttctccccacaggccccccgtagccccgatttttaatggattcccgaacaaagtgcaaccccaaagtcctcgatccgaaagttcatgtctccaaacccagataatgaggtcgtggtccaggatgtttgggatgtctcgcccctcacaattctgcatctccaggatccggtcaaagtgctccagccgctggtaattgttggaaatgtggggaggcaggtggcagttgatgatgctgacatagtagccatgtaagcttcaggcagatgttgactccacctttatttccccgcagtacccatacaggctagtgggggtggatttagtagacagaatctggatatagggcaaatgctgatacttggcaaagaccagtaagaggatcccctgcatacggacatgggagacccaataacatatatgtcaagattgaggttccggttgttcagctgaagcaggtcactgagatctagagggggcgctgccgaagccacgttccaagtcacgacgtgtatgtctaagaggatggagagcaaaagtccggatttcttgttcccactctcaaatccgacgattagcagcaaatccaagcatcgtgacttagactaagtgggcgattagcgttgttccccgtgaaagagcaggcaagagaccaggctaagtcacttccctaaaggatcttatctcaatctgatttcggattcccggggttcaccatgggatcaggcagacctcctgatgtatgtgctgagcctcctgcctttcggcccgctcagcttccgcgagctcatggccgccgtcgtccccgcgcggtggtccggcaggttcgcgtctcccggccagcgggtcccggccagagcagccctgcgggcggccggtctcacgcgcctagctgtcgcggactgttcttcttccggactccgaccgtacgcccgct

SEQ ID NO: 480003 - DNA, 1358 bp, Homo Sapiens
  misc_feature (1116)..(1181): n is a, c, g, or t
tgagcccttatttcaaacctgctcactcactccatggcttagaaaaaggacacgtccaccccggaggccgcaatgcccacctagacaggtcgtagaagtagtccaggccctggcccagctcccagatagagaccccacgcccagctcccgggccagctccagccgcacctgcagggacttcaggcttgggtagaagacgacgtgcctcccactgcggctcttcttgtactcgaagaagtgctctgagacctggctgtcccacaccatccggggcctgtggtccttcagtgtctggatgtacctggccccgaccaacaggctcacgggcatccttggagtcgcgtagtccataccatagaagttgagccccaggaggattttgcttcgccacttggacttcgggtgcattaggccaggctgatgcgctgtagagtagtcgtaggtcatgaggctgaaaccatccagcacggggccagctgctcaaactccttgtgcgtgaacatgcccagctggtcggtcccgggggtgatggccaggcgggatgaccaggagggccccagcagcccgggcctggtgcagagcttcggccaagtggggtgagcatgtggatgaggcccacgcgcttctggcttagcagctggttccagacctccaccacggaagccatcgaaatgctggttctttgccacctggaccacggtcttgctcagctcctctatctcatcctcactgtctaagacgttccggaaatcatcgtaagtccagtcctcaaacaggagccgaggcactatgtgcaggcccttggcatgcttcctgacagctcgcatccacccttggtccacgtcgtggaggcccgtgacctcaaacatctcacggccacgtctcttcagctgcagccagacgggtgagatctgtgtgaacttgctcccaaagaccttggtgacatcgtagccatggctgttccatggagtgacatagcccagtacatccccagcaaagtgtctgtcccgggcctttgccgagcagtagctgcgatgctcaagaaccacactctcagctttgaggtccgtcaccaccaaaccccggtcttgcaccggcttatctgaaaactgactnnnnnnnnnnnnnnnnnnnnnnnnnnnnnnnnnnnnnnnnnnnnnnnnnnnnnnnnnnnnnnnnnnaaacttcaccttctccagcagcgtctttgaggcggcttttttggcatctgactttgacagggtagtgtgaacagggctgcaggccagggcaagccagaggaggttgaagagtgtccgcatggtaggtgtgtcacagtagggtccaacctcggggtccagagggctgcatgtcaggga

SEQ ID NO: 480004 - DNA, 460 bp, Homo Sapiens
cgaagacacattgtgactcccgacaagccccctgcagaagtaggagccgctatctttgagtgtggcttttggaatgtggaagtcagaattatgatgaaaatacttcctgtctttgccattctgtaaatatgtgaccttatgcagagcagtgttcttccagctgtgacacctcaggtgaatagggtcttcctccttgaacacccaccgaggggcctggagcaacagccagccgatatggacttctagctgcaccgggtcactgagggtggagaggtttgtctggcacctgtactctccactgtcgttgactgtggcagcgtcaatgaagtagctcgaggcctggcttgagatgaggctctcattgtgaaaccactgtgtggaattgtcctcaggggagtaggctcctggcacttcagagtcacactgtccttctcaagcacgctgtaccatgagctccaga

SEQ ID NO: 480005 - DNA, 503 bp, Homo Sapiens
ggagtaataagagcagtggcagcagcatctctgaacatttctctggatttgcaaccccatcatcctcaggcctctctacaagcagcaggaaacatagaactcagagccagatcctttatccaactctcaatttttccttggtctccagtggaagggaaaagcccatgatcttcaagcagggaagccccagtgagtagctgcattcctagaaattgaagtttcagagctacacaaacactttttctgtcccaaccgttccctcacagtaaagcaacaatacaggctagggatggtaatcctttaaacatacaaaaattgctcgtattataaattacccagtttagaggggaaaaaaagtaaataattattcctaaacaaatggataagtagaattaatggttgaggcaggaccctacagagtgtgggaactgctggggatctagagaattcagtgggaccaatgaagcatggctgagaaatagcaggtatccagaccatgagcg

SEQ ID NO: 480006 - DNA, 674 bp, Homo Sapiens
tatagttgtatcattgctagacagtagcaaatgagcagcattctgttctggtaaccacctcattttattaatttgttcctcaactttctagacttttcacaatagtcaaactccggttcatgactttgaaaggtgctgtaaacatgtatattgctcccctagaatgaggcgcggcttttattactcttgttcacgctgaaaaatcaacaactctgccgcccttgtctcctgttgcaagaagatctccagagtaattaaactcaacggtggaaatgatgtccgcttcggccacgtcctcgtcgatggcccccttgacctgcgagaagcacccctggaagtcgttgccgaactgcgtttctaatcatagaaatgccttcttcatatatgccctcgtgaacacaggcagcacagttctgaggcccagagcctgaggatgctggccaggcagaaggagcagtaccggtggccacactgcgcctggaagggcctgcggaggacgtttctgcaggcggagcacaggtacttggcttccagcttggtccccaggagggtctttgagaagccgggctgtagcaactccagggagccagggggggtcacgctagctgcagccatgagagctgtgacccccgcgaacaaagccccaacggtcgcagcgcgcccgacactccgct

SEQ ID NO: 480007 - DNA, 1838 bp, Homo Sapiens
  misc_feature (1429)..(1429): n is a, c, g, or t
  misc_feature (1435)..(1435): n is a, c, g, or t
  misc_feature (1450)..(1450): n is a, c, g, or t
  misc_feature (1456)..(1456): n is a, c, g, or t
  misc_feature (1472)..(1472): n is a, c, g, or t
  misc_feature (1477)..(1477): n is a, c, g, or t
  misc_feature (1481)..(1481): n is a, c, g, or t
  misc_feature (1493)..(1493): n is a, c, g, or t
  misc_feature (1527)..(1527): n is a, c, g, or t
  misc_feature (1531)..(1531): n is a, c, g, or t
  misc_feature (1542)..(1542): n is a, c, g, or t
  misc_feature (1551)..(1551): n is a, c, g, or t
  misc_feature (1563)..(1563): n is a, c, g, or t
  misc_feature (1565)..(1565): n is a, c, g, or t
  misc_feature (1590)..(1590): n is a, c, g, or t
  misc_feature (1651)..(1651): n is a, c, g, or t
  misc_feature (1701)..(1701): n is a, c, g, or t
  misc_feature (1728)..(1728): n is a, c, g, or t
  misc_feature (1795)..(1795): n is a, c, g, or t
  misc_feature (1798)..(1798): n is a, c, g, or t
  misc_feature (1803)..(1803): n is a, c, g, or t
  misc_feature (1814)..(1814): n is a, c, g, or t
  misc_feature (1825)..(1825): n is a, c, g, or t
  misc_feature (1831)..(1831): n is a, c, g, or t
agacgatggctgaccacaagcctgacagcgactccacgccgcgcacgctgctgcgactgcgtgcgtaggatacagcggacccagtgcacgcctcgggcgaccccggagtgctcgggcgtggagcccggagtagccctgcgttgaaacggcttccgcccaggaagttgagtggccaagacatacggtagctgatagccacgtagtggcgttccccatggtacgccagtgtctgttggcacgagtcggcccgatattcaggccatgtgggcgacgttggcaaggatacatgacgaccgtctggactgctgacgtgagagaagcatccgtactaagcgtgcgcccagaagtcttccatcctgaatgccgtgaggtcggtacgtgaaggccagatgccagcaccgtcagggcggtccaaccctaccggagcagagatgatgcagattgcgggcagtcctgtgagtcatgcgaatcttgcctgaagctcgcagccgctcgccacaatccctggtctccgaggtcgtgctggtcccctggccgggaggataacagaggctgaggactgtcagtgtttcagcagcggaggtggcaccagggtgactgtcgtctgctctccaaggagcctcaagggaatgcttgatgccgtcttccctcaccagatccctcagcctgacctttgccacacctcttcagccacagtcagtgctgaggcctggctttggcccgcagacctccagtccgccgagctgtagacgtgggtgcctttttgcgggatctgcgagatacttcgccgtggctcctccaaacattgtgttggaggacacccatgccgttctctcaggccatggttggctcccccaacgtgtatcactccctgccctgcacgcctcacactggggctgaagacgctgagcaggctgccggtcgcaagacacagagcagtgggcctgggctgcagaagaatagcccctgggaaaccagcccagtttctggcaggagaggcagaggaggtcaatgcctttgctctgggcttcctgagcaccagcagtggtgtctctggagaagatgaagtagagcccttacacgatggagttgaagaggcagagaaaaagatggaagaagaaggtgtgagtgtgagtgaaatggaggcaacaggagcacaaggacccagcagggtagaagaggctgagggacacacagaggtgacagaagcagagggatcccaggggactgctgaggctgacgggccaggagcatcttcaggggatgaggatgcctctggcagggcagcaagtccagagtcggcctccagcacccctgagtctctccagaccaggcgacatcatcagtttcttgagccagccccagcgcctggtgctgcagtcttatcttcagagcctgcagagcctctgttgatcaagcatccccctangccccngaccaccggccccangccccngcaaaatccccacaangctgnactnagccactatgtnaaactctttagcttctatgccaagatgcccatgnagangaaggctcttnagatggtgnagaagtgcctananaaatatttccagcatctttgtgatnatctggaggtatttgctgctcatgctggccgcaagactgtgaagccagaggacctggagcngctgatgcggcggcagggcctggtcactgaccaagtctcactgcacgtgntagtggagcggcacctgcccctggagnaccagcagctgcatcatcccctgagcatacagtggcaactctgtctatcctctcccagtagttccangcntcaanacatccctgcnccacctgggantatccncgacata

SEQ ID NO: 480008 - DNA, 647 bp, Homo Sapiens
  misc_feature (126)..(173): n is a, c, g, or t
  misc_feature (220)..(229): n is a, c, g, or t
  misc_feature (436)..(447): n is a, c, g, or t
aagggggggctcaggtttacacggggtctttttaatacaacgtttaatcatctggttgatcaagaaatgcaatgctcagtctaggaacagcagcagaaatagcgagagacacgggacttttatacnnnnnnnnnnnnnnnnnnnnnnnnnnnnnnnnnnnnnnnnnnnnnnnnccagagaccaaaggcagcatccttgctaattttcatctacattaagnnnnnnnnnntcttgtaactaatgtttttattttccttaaaaaaaatatttcgcttaggcacaatttgctggtggctttagaagaataagccaggtttccacagcatcccccttgagtgatatgtttccatttctccgctttttatagttaaggcatttttttcttctctgacaaagtgtatgttttgttgcttgctttcaggttttgtttactggnnnnnnnnnnnntgctcctgtcagcccaggcaacagggccaagatgcagtttcaggatccatgggacaggtcacagagtgacacggtggctgagattcggggacagggggagcgaggccagtgagtggtaggccagggccccagggagctcctggacccagtgtcaccttggccgcccccatcactccgaaccttgtcaggttggtgttggc

SEQ ID NO: 480009 - DNA, 491 bp, Homo Sapiens
  misc_feature (260)..(260): n is a, c, g, or t
  misc_feature (385)..(385): n is a, c, g, or t
  misc_feature (430)..(430): n is a, c, g, or t
  misc_feature (461)..(461): n is a, c, g, or t
  misc_feature (474)..(474): n is a, c, g, or t
aaacagacattccagcgccacccaaatatatatctgaggatacaattctaccagctctttatttcttaagtggccaatttgattgagaaagtgacaaagccagcagtgaacctctaaaccaattaataaaagtcctctacttacaatccaaaccagtaacctcatcattgtccttatcccaggcaaggcacagggttagacagcagacagagaaaacagagaacacagtcagaaagggcatcaacagggacagtgtcagnacagcagtgcagggaaattttgcaaatctgattccagggttgtaggacggactgctctcccccaccccttcgttattaaacagggctcattacatgtgggacccagttgtggggccattccctgnggatttcaatgtttcgttggctttcttcacatgggagggatgttntgggttaacttcaacttcaggcaggcagggntgtgggccaattnttccccaagttaagggg

SEQ ID NO: 480010 - DNA, 935 bp, Homo Sapiens
caggaaccagtattcataggataaaccaaatagccaaatgtacagccttggatttccccaaacttccacagtctcagggcaggaaagatcatcttccagcagtcagctcagaccagggtcaaaggatgtgacatcaacagtttctgtttcagaacaggttctactactgtcaaatgaccccccatacttcctcaaaggctgtggtaagttttgcacaggtgagggcagcagaaagggggtagttactgatggacaccatcttctctgtatactccacactgaccttgccatgggcaaaggcccctaccacaaaaacaataggatcactgctgggcaccagctcacgcacatcactgacaaccgggatggaaaaagaagtgccaactttcatacatccaactggaaagtgatctgatactggattcttaattaccttcaaaagcttctgggggccatcagctgctcgaacactgagcttgtgtaaaagttgaaccatgaggccacaaaagcggtcaaaggttctgggaattcgggtctggggattcacttcaatcagaacattcttctgtgtatggatataaacctgtagcaagccagctcggttcaggggactatccatcagcatcagcaaactctggtgggtgatatctggccgcgcttccccagggtcccgtccattcttcaacaatatagacttgtgcttgtcacagttgagtagctcatatgtcttccctaccttgactgtctccagactggccccttccagcaccacaataagcctacggcctccgatcttgtttcctgcccctagtcggggccgcttgggtggcagagcatcccagtcctgtgcctgctccccaccgcttcgttcacgaggcttgaatctcatgactgggcgcgccaacttttttgtacaaagtgggcattttaaggac

SEQ ID NO: 480011 - DNA, 1387 bp, Homo Sapiens
  misc_feature (113)..(113): n is a, c, g, or t
  misc_feature (424)..(424): n is a, c, g, or t
  misc_feature (632)..(675): n is a, c, g, or t
  misc_feature (815)..(823): n is a, c, g, or t
tgcgaggggtgaagatgtcgcccactaatcgaggggggtggtgtatattttatgattagtgatcagtacttggcgtcgcgcacgcggtagataacgggatgctttgaagccanagggtaatatataaagagagtagagcgtgtgatgaggtaaatgggtattatgtgcgagtggagtgaagttagagtgatagtataggcgtatgtgaggttgatagactagctgatcatgggcgtgcgtccgagttgaaagtgctatttatgtttgcggtggctgctggtaaggatacggggagtgggtatggagtgcggacgtggtagaaaaaggggcgtgtgatatgcgtagcagtgcgggggggcggggtaataaaaatgcgggtgatggcgcggcgtgaggcggggggagaagggagcgtgagaatttnaggcgacgcccgagccaggcgatatactgtgagcgtgatagaaaaacgagagggtcgatgtagggggtctgggggggcgatcatagagccaagccgcgatgcgggcagcagtctagaatcggcgagcgagctaggcggtggggatgggcgattgagggcgggggagggtaagtggggattgcggggtgtgggatcaggagagtttaannnnnnnnnnnnnnnnnnnnnnnnnnnnnnnnnnnnnnnnnnnncggaagaagggggggcgcactgtaaattgcgggtgatgggaggggggcggtgtggcgagtgtgtgtgaagggtgtgaagaaaggggggtaaaatgatttgagtgggaggtgacagatggtcggaagtcacgcacattctnnnnnnnnnacgtacgccatatgtgtaggaagcgatcataacataacgtaagaattggggggaggttggggggttcggtgaccagataagaggagcggggagaggaaaggggcggcgctgcaagaagcgtcgtgtgtggggggtgagtgtagatcgtgggataggtgtgttcggtggggcagatgggatgggagcgcctcttgctgagagccttaccctaggccctgtgcagaaggggtactgcccgttaggcctcagctgggggaaaggcagttctggtgctgtagaggccctggtgcagaaagtgggacgtcttttttcctaaggtgtttaagcacaggatgggagatggtgagcagataggacaggacgcagtctccagaagtgctcaggggcaaggcaggggaatgtggtccctcctctgcccagaccctctgacctctgagcagggcctgtcatgcctctgggtgctagagcagagacccaggcagcagcagcatggggtggccaatggggcgggttccacaggatgggagatagggcctcccgtcgtgccgaattcgccacccagcc

SEQ ID NO: 480012 - DNA, 638 bp, Homo Sapiens
  misc_feature (208)..(218): n is a, c, g, or t
taatgttttagtgatgtcagctagtgcagttctcaaatggctgcctattagggaaagaattcagaggatttgactgctcctaatcatctgtcattgctgctagataatgattggcaatttttaagactcaactggaaatctcaacagttgctggtaaaccattaaccataaaaacgttgcttttgaacaccagtgctgaaaaaaatannnnnnnnnnnattttggagggtgaaaggggctgggatttaaaataggacaaggtggagaagggggggaagatggcaaaaggatttagtactcccttagtggtgtgtactgtgtgcaacggggaacctcttacttcatataccctcgtgcagaaatcattcaggggagaaagaaaacccgtggaactggattgagggcgtgactctgtggtttgggtgcacgggggcccgatgccgggcatatagtgaaggtgattgtcttctccctcagaaaaaattgggtccctggcggtcccagtagggctatagcttttccagccctaatttaaaaactcagtgaggccttagtaggggaaagatggaggtaaatacaagggtatggcgggacaccaactacagcgtggtgtcccggggggtaggagggggggaccc

SEQ ID NO: 480013 - DNA, 248 bp, Homo Sapiens
tggaatgaaagcctaaatatcacatctaaaatcggggttttttgtttgggccttcgtactcttctctccctctaccatatcctgctggagttccaggccccattcctctaggaccctgtccacccacaggccccgcacctccctgcccaaagcgctcagtacgcatgtcactttcccgtgttcattgctcctccgccacccattcgcatgtctctttcccgtggattccatgtagcccattcggctgt

SEQ ID NO: 480014 - DNA, 703 bp, Homo Sapiens
  misc_feature (314)..(314): n is a, c, g, or t
tgacttaataagaatgcccccaggtataccagataacctggcagggtggtccaggaatgagagtgtcacaaaattatcactcaacacaaggcccccaagcctggagattctttccagccatccctcactcctggcccagggcgcgacccatgcaggcccccattccataggaagaggcaggtcccacagtgtctgtggctagaccttaacactgagcagagatgcccgggaagatggcacttcctatgctcgttcccaagtgctctgctcatctgccatgcaggtcaggaccataccccgagtttgtgaggcanccaccttctcatactcaccacctcatatgaccacctatcatacccacctctcctagcacacagggaaactaaggacacactcggaccgaatgtaatacacccgtgtcatgcgcttgctgtgccctgagcttcacattttcacctagaattccctggggggtgggagtgggggacagggcaggcagggttttgtgccgagggctggtccagttctcactaaagtgtccaggattcctgggggaatcctgccctcaaaggagggacttttgtcataaaatcctccctgagtctgtcttttatgtgagccaagatttccatccatccggcgctgtgtaaagatgaatttaaccctagcctctctcctatcaccctgcttctcctgctgtgtc

SEQ ID NO: 480015 - DNA, 922 bp, Homo Sapiens
agcgggggcttcactgagccgcgccagctgagccaggtagggccctaccctcttctgttgctttctccctgtggctcgcgccgtcccccgccgcccgtcgaccccgcttccatgtccctggcggacacagctcccaggaacctccacgcccatggccactaggcagagggaatcctctatcacctcctgctgttccacctcgagctgcgacgcagacgacgagggcgtgcgcggcacctgcgaagatgcttccctgtgcaagagaactcccatcagcagcgcccgacagcactctcctcctcactgcccaacactgggtggcaaatcttttcatcttggccactctgataggctggacagtgaggtccttcttcctagggcgcatggaaacctgttgcagtcacctgggtttgcggagtgggaggaggtttgcagtaagcattggctactggcatgacccttacatacagcactttgtgagactgtctaaagagaggaaagcccctgaaatcaacagaggatattttgctcgagtccatggtgtcagtcagcttataaaggcatttctacggaagacagaatgtcattgtcaaattgtcaaccttggggcaggcatggataccaccttctggagattaaaggatgaagatcttctcccaagtaaatattttgaggttgactttccaatgattgtcacgagaaagctgcacagtatcaaattgccaacactcctgatagctgaatgtgtgctggtttacatgactccagagcagtccgcaaacctcctgaagtgggcagccaacagttttgagagagccatgttcataaactacgaacaggtggaacatggggtgatcgggttttgggcagatcatgaattgaaaacctgcgggagacgccagtgtgaacctgggccggggag

SEQ ID NO: 480016 - DNA, 1156 bp, Homo Sapiens
  misc_feature (14)..(14): n is a, c, g, or t
  misc_feature (511)..(520): n is a, c, g, or t
caacgcgcggggcngaaacgaaatccccgcaggcccggtgcccccgcggcgacgccgcgcgcttatcagcgttgccccgcggacattgtcggggacgcccggacacccggcgcgcctttagcgggggttatgaggcatagctcggggcagcgagtctcccgccctttaatatacgcccgggctgccgaatgggaataaaaccgcgctcccaagccccttccggcgccaaagctttgtccggagcctcctccccccctgcgctaattggggcaccggagcggtccggctcggcccggggccgctacggttagggcccggggccctctttttagggggggaaggattccctttgcgcgggtgggcaccgggtggtccagccccgggggcggggggccaaaagaggggaggtcggtttgccagggcggtgccccccgcccatgaggcgggggtggggggttggacgctgaagttctccgggaggcgctcgaccatgtagggggtgggggcttgnnnnnnnnnnagggcctgggcgtccccgagggcggtttcccactgcagcggccaggctcccgggtgccaggggtccggctgccgtcgctcagcgggtgccatgggtccccggtcggtggccacgagtaggcactcggggtcggcgcaggtgcgcgcacgcctccctcagcttggcgaaggagaagtgctcgtcgtagcccacaagcccggcgcgcaacgcgcggggccgcgccgtcccccgcgctggggtccccggccaggcgcagccccgcggcgcgcagctcggcgcgcagcccctcgccgcccagcacgaacacggcgcccggcgcgtccggaggcccgggcaggcgctggcgcagcaggcgcgcggcgcacagcgcggagctgaagagctgctcggcgcgcagccccccgaagccgaggcgcgcgaagcgcagggccagctcgggccgcgcgcgccggctgttgttgctcacaaacagagccgccttgccggcccgcgccagccgctccagcagctccggggcgcccggcacggcgcgctcgccgttccacagcaccccgtcacagtcgaacaggaccccctgcgcccggcccagcacgtcgcgcagggcctccgcgcagcctctcgcagcgcgccatgcag

SEQ ID NO: 480017 - DNA, 489 bp, Homo Sapiens
  misc_feature (403)..(419): n is a, c, g, or t
actataaaagccaactttgtacaaaaaagttggcccatcaggaccccaagtgatagtgacccagtggttttttagatcctcagtagaacagtccagaagcctgagagacaagtggccccttgataatttgggtctcccgggaccagctaggggtccaggtttcagtcagtaaataagggtggtccaggtcctaaagacccctttcctttacaaagacttgtgatgttttgggggttttgtggccaagccccccccttttctggtcatggtacccgtacagggttgatggccacagctcgaaggggggcttttgtgtccccctgtggggtcagtgttttcagtaccccctttttcccgtgcccacttgggtttttacttatttttttattgtgtgccagtgatnnnnnnnnnnnnnnnnnccttccccgccccctccacccctgttgtgacctgtccttccgtacttaataaagggggggtgggagtgtt

SEQ ID NO: 480018 - DNA, 871 bp, Homo Sapiens
gcttccctaccgggaatttctatatttgccaccccgggtaacccgtgagcgactgtacagggaatatcccggttagcctcttcacgggattcccgaacccacgttctggggaaaaaggaaaagtttccgtcggagtaaaggtcaaatgtgctcaaattgaaggtccgtagctttgcttttggtgggtccctgtaaaaccagtagcatgcgtaacttggtggcacaaaaggcagccaaacaattcccctgttccgaacccatccatcagccatgggtggaaggcagcgccacctctggccatcatattatggctcacatacccataatttccttgcggtgctgaattccaagtggggattattagagacccctcagagccaaaaggggaccttagaggtcttctagatgagtcccctcatttgtaggtggtggtttctggataactcagagtggcagggacacagacgagcctctcgagcagaggcggtgggggtgccctagggtttcaacttcccctccttggctagtctgtcattgagctggcagagctgggccaggaagccatcgttggggccgatctcacggttctgcctcacgatgctcagggcagacttgacgtccatcttctgccgcatcatgaggtaggcgataactagcgttggggagcggctataaccttcccggcagtggacgagcacccggcgcgttgcccacgtagatccgcggggtgacctcgttgcagggctggctcgggaggctgtagcagccgctgccgtccgagagcaggtcgttgagatcctgcaccgagagctcgaacgagcccgacgtggcggcggcggggccctgcacgcccggcaggagcaagcccgct

SEQ ID NO: 480019 - DNA, 395 bp, Homo Sapiens
  misc_feature (17)..(17): n is a, c, g, or t
  misc_feature (27)..(27): n is a, c, g, or t
  misc_feature (47)..(47): n is a, c, g, or t
gaaacctcccctaacanggtgccaccnaagtagacctgcctatagtncccacacagaattccaggggaaagcaaagagagtgggcccaagagaaaaatattaaaaggagctgaatcctgccctaaagacacatttgttcctgatttcctgaaattctttcagaaagcaaacagcaggtaataattctgcgttcatgagtggagtctagggatgttaccaagttgttcacttctaaatcagtcatatctaaatcacacgtttgtgaacaaagtataggcaatctgaagccacatactttttaaactatgttagagttacaactacctaggaaatgtcatatttaacttctggtcttggtaaaacttttctttgcagacaggttgaagctgagctga

SEQ ID NO: 480020 - DNA, 922 bp, Homo Sapiens
ccccttagtgccttcgcgtcccaccccccccgggaaagggccagcccaccactggagggaaatccctttgcgccccctttttgggaaggaggctgggtccccccctctggcccctgttctgggtggaggttttcaaaggagctgaggcttggatattgttttgcatagtccctgggcgttggtggaagtcccacacgtcggcgcttccggtcttcttccagcaggtcattctgggggccacataagtagatttggcagccctcctctagggtgcgcagttccttcacccagaactttgctcgctcaaagctgctgctgtctgtgaggtcatagcagacgatggcagccttggcaccccgatagtagattctactcatggcctcatagcgctcagagcctgctgtgtcccaaatacctaatgtcacagtccggtctccgaccgacatcaccttggccacgaaggcggccccgatggtgttctgataaggccccaccagaaagcggtcgtgcacgtagcgctccaccaggctagtcttgcccacgtactccttgcccagcatcaccaccttgacgtccaggcgctgcccgctcatgctcccggggccgcttcagccacgtcagggtcctacgactccagacagcgcgtcgggctcgagctctggccgtggccttgcacttcggcagcgccccgtgtgcccccgctgttcggccccgggcgccgattatccttcgaagaccccaagcctcggggcggcctgggagcgcgcgggacagcgtcctcaacagcgcagcacgccgccgtgcagctcgctactccgtcattcgctcgcctgcccggcttaagctccgttctggcctgggaatcccaaccgaacctggggtctcccgcaacccggctcctacccgcagcgccgcgactccc

SEQ ID NO: 480021 - DNA, 1035 bp, Homo Sapiens
caaatgagcaagcagtcaagattttgttttattttattatggctagaaagacactgttatagcctttcttccaagagttgccctggtgtgacttcaagagttcatgttaacttcttttctgggaacttcctgtttcttaagttgttgtattcttgaagagccttgggccatgaagaggcttgcctaagtttttgggcagtgaactgcttgatgttctggcagtaagtgtttatctggcctggcaatgagcagcgagtccatcctggcaggcggctgtggtggtttgaagagtttggacaggtcctcctcagggagcgggggttctcctcggctctggcgctgcatattctcctgctggcgacgctgctgatactgatgtttctgctgctgttgtttactagtattcctcatgtatgtgttgtatttaactatatcttggctcatttcatccactcttgtccatcagcaactgtagattctttcccaaatgattgctgctggcaaggctgagcaattcatgtttatctgcaacagctgacttcttttcaagttcccacattaggacattgatcagatgtgaatttttaattacaatcggcacttcttcaaacatgtactcaaaggtgatatttgcttttttcaatgcttcaggggaaaaatccttttctttacaaacttccatcagtttaggagtcagtctgtatgcctttagtgagagagatccttgggcagtttttatgggatcataaatgagaacgacagattcttcaatggcatgctggtaactaaactgagagtccaggagtgcccgggtaacgaatgagccatagtatgtggactgataccagcccacgtgaagatgatcaatgtttacatggcgaaggctccgcatcatttccatctgatattggaaaggccatctatctgcacttgcttcacggctgaatctcccgagccgcctttgcctttgcctttccctgctgcgccggcggtggagctggaagaggtggcagtagagccggtaccttccttgcg

SEQ ID NO: 480022 - DNA, 1048 bp, Homo Sapiens
  misc_feature (837)..(888): n is a, c, g, or t
gcctatctaccctcaacgtgtgcccctccacgcagctgggggagagcggaggcagggtcgctcagggttctacccacacgttggtgttggtcacccgggccccgaaccagcccttccagtagacggagtcctgccccccgtgcttgaagcggacgaagcggacgcccggcccgtagtcggtgaaggtgtgggagatctccatccagcccccggccgtcactgtcttggggcactgccacctgcccgctgctgaactcagccagcacgttctcgtgctcggacagtagcttaacggtgagctcgtagaggcaaccagcgtcgctgcggcccgagtaccagtccttcaccacgatggccggctgagtcgtgtccagcagcttcttcccagtagccctcagcctgcaggtcaatgacctgtgctttgcgacaccactcaaaggaggaggcgaagtacttcttgacgctctcatcgtgggtgaactccaccccactgtctccaggcagctcctccaccctccagccgtccccaccatgctccacgtcacaccagccttccaagtcctcttccccacacgggttacgcagaaggttgcggcgccgcttgctcaggaagtagaactgctgccagtggtcgcgctcctcctccacgccgccctcgggcaccagcccctcctgctggcacttgagcagccacagcggggcgccgtccaccagctccttccagcgcaggcacaccaggcggcaggcctgcaccagctcggcggccggcagtgcggccagcacgcgcagcagcagcggctcgggcagctcgtccaggtacgcggcggcggccgccgnnnnnnnnnnnnnnnnnnnnnnnnnnnnnnnnnnnnnnnnnnnnnnnnnnnntggctgctcctccgggcttgcctcctcgggctggcccacgctctctgggtcaccgtctccgtccatcgctgcggagggcggtcgcgagaggaggagccggagcgctgcgggctgcgcgagtcccggggcggcgagtcccggcgctgtccgcttctccgct

SEQ ID NO: 480023 - DNA, 452 bp, Homo Sapiens
caaccagcgcctgcaggacctgagcgagcgggagcggtgcctgctgcggaggcgaagccaggcagcgcagcctctgcaaggggaggcgtgcgaggcggcgcgggagcgcgcggagcgggtgcgcagaagactggaggaggcggagcgccacaaggaggacttggagcagcacagcaggcagctgcaggagcagtgggaggagctgtcgagtcagctcttctactacggaggggaactgcagagccagaagagcacggagcagcaactcgcagccctaattggtgacgctgcagaatgaactggagctggcggagaccaaatgcgccttgcaggaggagaagctgcagcaggacgcgctgcagacagcggaggcctgggccatattccaggagcagaccgtagtcctgcaggaggagcaggtgaaggtgatggaggctgcggaggagctggac

SEQ ID NO: 480024 - DNA, 506 bp, Homo Sapiens
gaagagtgtttgagtttcattcacacaaaacatggacatcatctgtgaggctctgtcccagagagacagggccatccctcatgtctgttattgggttgtagataaacaaaagtataaatcgaacaaactgcaaattactctgtctcttttcctaatcaatacagcaacagtctcagtggtactgcaccactctggaaaaaatgccttcaggttccttcccatcccccaaggcagcagcaaatccttcgtgttctttttcttcaggtatcgggctttggtgcatttcacaaaggctcgaatcacggttctgaccgccaacctgtagcagcgatttttccttccccgggaacgtgcctggcgtgcttcagcacctcctggatccgaaagtagcggtcggtgacgcgattccgcagccagagctgcgcggtgaggaagaccatggcgcctgcaggccggcgtcccgaacactcaacaacgcacgcgcagcgccgctgccatcttgcccc

SEQ ID NO: 480025 - DNA, 1303 bp, Homo Sapiens
  misc_feature (205)..(314): n is a, c, g, or t
  misc_feature (922)..(922): n is a, c, g, or t
taggacttcaacatggcggctgcggcactggcggtggctacggtgacggcctggcccggagcgggcagagttggagtgtggtggcgttcgctctccctaggggctgtcgggagctcagcggggaccgagcctgggaggccggccggtgccagcacctttcggcttctgagacggcggcagcagcggcattcagactggctctctnnnnnnnnnnnnnnnnnnnnnnnnnnnnnnnnnnnnnnnnnnnnnnnnnnnnnnnnnnnnnnnnnnnnnnnnnnnnnnnnnnnnnnnnnnnnnnnnnnnnnnnnnnnnnnaaatggcttctaagaagttgggtgcagattttcatgggactttcagttaccttgatgatgtcccatttaagacaggagacaaattcaaaacaccagctaaagttggtctacctattggcttctccttgcctgattgtttgcaggttgtcagagaagtacagtatgacttctctttggaaaagaaaaccattgagtgggctgaagagattaagaaaatcgaagaagccgagcgggaagcagagtgcaaaattgcggaagcagaagctaaagtgaattctaagagtggcccagagggcgatagcaaaatgagcttctccaagactcacagtacagccacaatgccacctcctattaaccccatcctcgccagcttgcagcacaacagcatcctcacaccaactcgggtcagcagtagtgccacgaaacagaaagttctcagcccacctcacataaaggcggatttcaatcttgctgactttgagtgtgaagaagacccatttgataatctggagttaaaaactattgatgagaaggaagagctgagaaatattctggtaggaaccactggacccattatggctcagttattggacaataacttgcccagnggaggctctgggtctgtgttacaggatgaggaggtcctggcatccttggaacgggcaaccctagatttcaagcctcttcataacccaatggctttataaccttaccacagttgggcaactgtgaaaagatgtcactgtcttccaagtgtccctcccccctatacctgcagtaagcaatatcaaatccctgtctttcccccaacctgactctgatgacagcaatcagaagacgcccagctggcgagcacttttcatagcacatcctggctcccgcatggcacgttccagaattccctaagcctttcccccaagcaatgcccagggagctcatgggcatccccctcctgggctttccctttgaaactggacaagggccagaaa

SEQ ID NO: 480026 - DNA, 795 bp, Homo Sapiens
ttttatcttcaagttctgattgtcccggaaagttcattttcgttttgtgagacatgtgttcctgacgtttgaaatatgaattcatatgatttgataacaagtagaatgagtctccaaattttgtggttatagaacttgtgtaatgaaaaagactgcgtttacctatatcttcttctttgtctataatgtgacttttctcttctggaaaaggactcttgttctgctgatttgtcactatatttttgtcagagatttgatggcttgtcttgatgtttcttctgttgttaaccagccactatccgatacttttcgtgtaaaactttgggaacgttggcgttaaattgagctataacgctgaaatcatttcattattgattgccaaaaacagccgtttgaaacagagttcaaagtactgtcttaatacgggacatacaaatgttcacttttgtaagtcccttgggagcagaagtgctaagctttcaaaatcccaatactgtaaaccatggttgcttggagagtaacagtgcttactgcaagaatgtgcttcacttttggtccatttacatcttattatgtttgtatgaaaacctctttgtagactgatgtggcttatcctccagtaatgcttaggtgagaacaagaaatacagttgcttgcttctctgcttcccacaaacacttcttgcattattattaaacttacaggtaatcatgtagatccttggaggagaagacaatcgggatgcaggccacagtccgctctcgacgaattcgagctcggccgatttggcctgat

SEQ ID NO: 480027 - DNA, 878 bp, Homo Sapiens
ggtctcctcaaatgtgctcagcttccgcaggagaaagtccttctgccttgtcaggtgttgatgtccgtgcaggtcatttggtttcttccgtttttcagcgttcccgatggtatccttcaaggccaatgacctgctttggcaagccgcagcccccatccatttccgcctccaccagcttggacatgaggcactccttctcctgttgtaggtgtttcttctgaagtatggtgaagtccttctcctccttcatgcgctcgatgttgtgcctcaacaccgtgttctcgtgctcagtctcagccagttcgtgggccacctcctccagctcttccttccgttcctccaggaaccttttggccatctggcgctcacctttttgcatcttgaccttggttttcacccggacactccgccgcacattcacagtgtcccctttcattcctcgcttgtgagatttcgtcacagttacactgggtgcgccacaaggtgctctcaagacctttttctgcgtgagactcgttactccgttcttcccacacgatggaaacctgggggagccgcctgaggatgaggcagacatggctaggcatcaaagccgcaaaggtgggcaattgggtcagcaggctctgctcagggggacccagaggggcaggcttgtcaatgagcctctcaaggggcccggcatcaaacgtcctctctgaggggagaagggtggaagctttaggggttggcagttggatgaaaacttgggaggcgctcctctactgtccaagtcgcacagcaactgtccgggggaaacctgaggcgccggcggacgtgcggagagggcgggtgagaaccgctcggccccaagtgggccccagagggccagaaccgcgcag

SEQ ID NO: 480028 - DNA, 958 bp, Homo Sapiens
  misc_feature (786)..(786): n is a, c, g, or t
ccgccgcggcgtctccatggcacgaccctggcctccgacttcaacgacttcataaggcggcgtttctgggcgcagccgtgtcgctcctggtttccatcgtgtgggaagaacggagtaacgagtctcacgcagaaaaaggtcttgagagcaccttgtggcgcacccagtgtaactgtgacgatcaaccatttttgtgttgtcctcccccacctgccagaagccaaccatgaaggaccgctcttcaactccccccttacatgttcacgtggatgagaacacccctgtccacgtccacataaaaaaactcccgaaaccatcagcgaccagcagccagaaatctcacaagcgaggaatgaaaggggacactgtgaatgtgcggcggagtgtccgggtgaaaaccaaggtcaagatgcaaaaaggtgagcgccagatggccaaaaggttcctggaggaacggaaggaagagctggaggaggtggcccacgaactggctgagactgagcacgagaacacgggtgttgaggcacaacatcgagcgcatgaaggaggagaaggacttcaccatacttcagaagaaacacctacaacaggagaaggagtgcctcatgtccaagctggtggcaggcggaaatggatggggctgcgggtgccaagcaggtcatggccttgaagggataccatcggggaagcttgaaacggagaaacaaatgacctgcacggacatcaacaccctgaccagggcagaaggaaacttctcctgcagaaactgagcacattttgaggagnaaccaacggacccttcggagacctccctgaagggaacaggcactgcaaaagaggattcttggaaagactaatgggagcaaccagggagcactgcctgaaaacggcttgggcggagggccgactcccaagaaaagcccgccctgcttgttactggctgccagaacaagggaca

SEQ ID NO: 480029 - DNA, 1653 bp, Homo Sapiens
  misc_feature (931)..(931): n is a, c, g, or t
tgcccacccctccatcagccccttcatggaggagtgggggaccactcctcaccccccaggcttctttggctggttttgggaggggaacggggccattcccctttattgcgcccccttgttcccgaggctccttgtgcctttacggtcaagtgtgtccataatacttgcgttcctcctttgcaggagaaagtcccctccagctttccaggaaggagctgcaagaacaggcagcggagtgggagaggcccagtgagggcaggcccctcccagtgaatgcagccacactgggtcagccctggggacggtgcatgcgcaggggggcagggccagggcagcaggcagaggtttccagaagcagggaggggagctgaagagcctgccacggatgggcatgctctgcgcatgcccacgatgttctgttcccgagcccgtgtagcaccgggcctgcagctggggcaggccgacgagcccagttagatggctggcagctccttgcagaaaacagaaggggtcagatggacaggaaggcgggctctgcgggcggccgaagggtggggcctggtggcggctgcccagccgacatcacatggtccggctgtactcgatgccactcttggaagagatgcccgaccatggcaggaagctgcagagcaggctgtgggcctggcggtagactctgtgcggaatggagcaggggctcaggctggctagtgcagagcccaggtgctggatgtagtccaaaatcgtccagggagggtggccgccgttgatgtagaggacataggtgaagccatctttgaggacccctcgaatggagtagtaatagggggagatagtggtgctgctttgaagtctctggttttcatagaagtttattgctgtgttgttggtggtgaggacatgcaggtaaatggcttgcagtggtcctggncggtggttgatatgtgatccttcaaactttcaagtaagagggaacctatgccgtgcttcctgaactctttcacgacgcccagacttaggatgtacgcgacttgtgtgtcaacagagaagttggatgctagaatatctccatcctctttatgtattttggtcctgttcttaatttcagctactatcattcccacaatggcacctctgtaggttgcagcaagggaaaagaacttcttgttggatgtgatatcacgataccatgagtctgggtactcgatggggaaccagtcgccacacaggtgcttcacagtgtctatgtcatcgtggcagaggaggcgcaggctgacctcgctgagcgcgctggatggcaccacctctgtcattcacactctctggagctcttctcccaactcaggctggctccgcacttccttcctccaggtacagcctttctgtatgctaggcccccttagtgtaggtgagaaggctctgtgtcagtttccgatcagtatcaacttcccatgaaggatacggtaaaggcggtaagaaccagagccatacttatgtttaagtaatagaccttaaaaggcagtaccatcgattttctttcgagttccggtgtctcccagtcttctttctgtccttcattgctcggaaacattacgtcccctggggtcaccctaagactctacttcagcaggcgaacaggcccggagctcacgg

SEQ ID NO: 480030 - DNA, 1013 bp, Homo Sapiens
  misc_feature (230)..(283): n is a, c, g, or t
  misc_feature (431)..(431): n is a, c, g, or t
  misc_feature (482)..(482): n is a, c, g, or t
  misc_feature (491)..(491): n is a, c, g, or t
  misc_feature (554)..(554): n is a, c, g, or t
  misc_feature (569)..(569): n is a, c, g, or t
  misc_feature (600)..(600): n is a, c, g, or t
  misc_feature (708)..(708): n is a, c, g, or t
  misc_feature (741)..(741): n is a, c, g, or t
  misc_feature (748)..(748): n is a, c, g, or t
  misc_feature (751)..(752): n is a, c, g, or t
  misc_feature (758)..(758): n is a, c, g, or t
  misc_feature (760)..(760): n is a, c, g, or t
  misc_feature (762)..(762): n is a, c, g, or t
  misc_feature (764)..(774): n is a, c, g, or t
  misc_feature (777)..(778): n is a, c, g, or t
  misc_feature (830)..(830): n is a, c, g, or t
  misc_feature (846)..(849): n is a, c, g, or t
  misc_feature (852)..(852): n is a, c, g, or t
  misc_feature (854)..(854): n is a, c, g, or t
  misc_feature (878)..(878): n is a, c, g, or t
  misc_feature (891)..(891): n is a, c, g, or t
  misc_feature (900)..(900): n is a, c, g, or t
  misc_feature (902)..(904): n is a, c, g, or t
  misc_feature (929)..(929): n is a, c, g, or t
  misc_feature (935)..(936): n is a, c, g, or t
  misc_feature (964)..(964): n is a, c, g, or t
  misc_feature (981)..(981): n is a, c, g, or t
  misc_feature (992)..(992): n is a, c, g, or t
  misc_feature (1008)..(1008): n is a, c, g, or t
ccccgactagcccgacagcgccacagttctccagaggccacactgccacctgctttccccttcccatccgcaccgcctgtttcccaagccagctctctgccgcccaagtaagacaatttcaacaagcctcttctcaggtctcccccttcccttcagcccattccccctcggtttaatccatttcctggccccctttttgtgtcttcaaattttccccctgtctgcattcnnnnnnnnnnnnnnnnnnnnnnnnnnnnnnnnnnnnnnnnnnnnnnnnnnnnnnggccttccatttccgttcctgggtttgtgtgtcgcatcccatctacccctgcctgctgtaccccgtagacccctgtttctcctcctgcacctgtgtccccatctgcccttcttgttgctcctgtcatgtgtcaccatcatccctcctntctgccttcttcctccacttgtgtcagcttgcatttttttattcctgactnaatcaccanacccctctcccctgatcaaagggaatattagtttttaatttggatcgactaaggtgccagganaaactgcagtcccangtatccagacagccaccaggatggtccctcnccccacccccaccgcctctccccaccttttccaacgtgttgcatgctgggagctggggggtgtgggggaaggggctgccggcttctttcaggaggctgaggtttggangcaaaatcaacctgggagaccaccccggccgcngcgcctnaannaaaaantngnannnnnnnnnnnctnnttaccttggaggagggacatcccgcttccttatccttagcttttttgttgcncctccccactgccccnnnnaantnatttggttgtttgcggagggaggngggaggggggtangctgggccngnnnctgtccgaggtgctgagctggggcnggaccnnaaacctcccggtagggtaccagggactnagttgggcctggggccntgtccaaggtnccaatgatgcgggccnacaga

SEQ ID NO: 480031 - DNA, 886 bp, Homo Sapiens
  misc_feature (747)..(806): n is a, c, g, or t
ttccgggctacagcagccgacgccgagaggcaccgtttcttcttaaaagagaaacgctgcgcgcgcgaggtgggcccctgtcttccagcagctccgggcctgctcgctaggcccgggaggcgcaggcgcaggcgcagtgggggtgagggcgcgtgggggcgcacagcctctggtgcacatggtcttcctccccggcggtggacgtgtcctgcaggcggcgggagaagcggcggcagctggacgcgcgccgcagcaagtgccgcatccgcctgggcggccacatggagcagtggtgcctcctcaaggagcggcttgggcttctccctgcactcgcagctcgccaagttcctgttggaccggtacacttcttcaggctgtgtcctctgtgcaggtcctgagcctttgcctccaaaaggtctgcagtatctggtgctcttgtctcatgcccacagccgagagtgcagcctggtgcccgggcttcgggggcctggcggccaagatggggggcttgtgtgggagtgctcagcaggccataccttctcctggggaccctctttgagccctacaccttcagaggcacccaagccagcctcccttccacatactactcggagaagttggtgttccgaggccacgagtgggccaggagcttgcagatttggaatctgagcatgatgagaggactcaagaggccaggttgcccaggagggtggggacacccaacaagaagagctttcccaacattcnnnnnnnnnnnnnnnnnnnnnnnnnnnnnnnnnnnnnnnnnnnnnnnnnnnnnnnnnnnngtgccaaagaatagcaaattaatgacactaaaagatcatacccagatgaaagtgaactgatgccccaagatatgcctacc

SEQ ID NO: 480032 - DNA, 485 bp, Homo Sapiens
  misc_feature (358)..(358): n is a, c, g, or t
  misc_feature (425)..(425): n is a, c, g, or t
  misc_feature (449)..(449): n is a, c, g, or t
cctgcatccagctgtttttattgcaaactagctcctttctcccacactgggaactttagtccacgaggctgtcaccaccctggtagcactgggccaggctttgtagctcctgcagcagctctgctacgtcatcgtgctccactccagcatccatgaagctggcccagcgccgcaagtcgagtttgggtgaggtctctgggccaaggcttccaggggtctgggtgcagggacgaagagggaacacagtgccccaaacactggggatgctctccactgctgtggaggggagagggaaacagaggacctgctccctttggggggaaccattccagaaccatacccggtggactgcagtttnagaagaggtgggggtaaggaggagccaccctgcagggagttcagcagcagatggggaagaattcatngattccagggttgttgctgttgtnaaataattgagccaagatttttttccccagtggtaa

SEQ ID NO: 480033 - DNA, 822 bp, Homo Sapiens
ccgggcccctgctgggaggcgaagaccaggcgggcactgttgcccggcgacgctccggcgctgggtccccgaggcccggcccctccccgggaggaggtgggcttcgagtcacgtgacccgtgccctacgggagggggtgcggtcggggacccggcaggaggcggccgagaagagaggaccgtgggggcgttcgcgtggctcccagcccgggaccccacccccgctggacagtgggggaaactgaggcctgagcgggcccacacaggaccatgaaggtgcttctcctcacagggctgggggccctgttcttcgcctattattgggatgacaacttcgacccaggcgggctggactacctcgtgctgaaccacatcggcggcgccccggccggcacgcgagcccgcagcccccaggcaactcgctggctcatgcaggtaaactttgtgagctacgtgcaactgacgtcgcgggcgctgcccagcctgacggacagcaagggctccctggtggtggtgtcctcgctgctcggccgcgtgcccacgtcgttctccactccctactcggcggccaagtttgcgctggacggcttcttcggctccctgcggcgggagctggacgtgcaggacgtgaacgtggccatcaccatgtgcgtcctgggcctccgagatcgcgcctccgccgccgaggcagtcaggggagtcacgagggtcaaggcggcccggggcccaaggcagcctggccgtgatccgcggcggcgccacgcgcgcggtcggcgtcttctacccgtggcgtttccgcctgctgtgcttgctccggcgctgg

SEQ ID NO: 480034 - DNA, 661 bp, Homo Sapiens
acaaaagcaaaagcctcaggcttttactcagatctaaagatacaggtagtcacttcaaggctctcaacacgccttcacacctgtcctatgcaggcagcctttttctgggccagctgttgctcacgtggggatccagctgatcagagagcaggctcaggaggaaaaggtgagtggctgttgttaaatccatttcaaaaagcagtttcttggactggaaagcaagggcatctgctgtttgttcctcgtggcccaatcccaggcttcatggtgatggagtgggtagagcaccctgccttcatgagtgttagtagacagggaccaagaggaaactctgggtggtccgaggtgggtttgagagatggctggcatttactggccaccaaaatcattacagattctgtacaagcaaaagacaaggcaccagaatgtaagtgtttctcctgggcccaaaatcccttctcctgggtaccgtcgtttctggctccaggctcagccatagtgatagacaaagtcatagctgctgggctccttggggatggggggtggggcttcgggaatctggatgttctccaggtccaggagccgcagcttcatctccatgctcagcagggtgtccaggtcactcttggtcagctcactggacatgtcattccccagaagc

SEQ ID NO: 480035 - DNA, 543 bp, Homo Sapiens
  misc_feature (48)..(61): n is a, c, g, or t
  misc_feature (234)..(234): n is a, c, g, or t
  misc_feature (271)..(271): n is a, c, g, or t
  misc_feature (291)..(291): n is a, c, g, or t
  misc_feature (430)..(460): n is a, c, g, or t
ttttttttcaatgtttcattggtcatgatgatcaaaaaatgatggttnnnnnnnnnnnnnngacctcatcccacctgctgcagggtggaagcaacaccactggtactcacaccccctctggctgggttctctggtgcgccctgcagccgctgccccacccaggactctgtccttcaccctgaagttctaccgccctggttttcatctctcctcaacatggtgcctgggaggctncaatgtccaggtagagatgtgaaaatcagatctgcgnccgggcagggtttgcaatgntccttgagttcttctccatctccctttcccaaactctctcctctcccctctcccaccccgtcattgttccccggaaacaaataggatggcttcactggtcaattcttaacatgtacaaacaccaaaagcagaggaacgnnnnnnnnnnnnnnnnnnnnnnnnnnnnnnnagtgctgggagcgcagccggcgggcgaggctgcctggaacgtggagctgctggagctgtccggctgacctggaagttctttgg

SEQ ID NO: 480036 - DNA, 1137 bp, Homo Sapiens
ggtccggaattcttcggatggcggcgtggaggggcgccggtggccacgttggtgtcaacctccttcgtgaagctcacacctcccccgccccgggaggggtttgcccgccactgtcgctgaatgattgcatcatcgaaagcagaaaaccacttttgcatccttcggcctctggcgtgcctgccatgacgtgggtagctctgcggaggtggaagttggggagctttgaggcctcctctgtagaatggaaactctgtacccctgcttgtcttaggacctcatggatcccagggggaccaagagaggagctgagaagacagaggtagctgagcctcggaacaaactacctcgtccagcaccttctctgcccacagaccctgccctctactctgggccctttcctttctaccggcgcccttcggaactgggctgcttctccctggatgctcaacgccagtaccatggagatgcccgagccctgcgctactatagcccaccccccactaacggtccaggccccaactttgacctcagagacggatacccggatcgataccagccccgggacgaggaggtccaggaaaggctggaccacctgctgtgctggctcctggaacaccgaggcccggttggaggggggtccaggctggctggcagaggccatagtgacgtggcgggggcacctgacaaaaactgctgacgacacccgtatgagcggcaggagggctggcagctggcagcctcccggttccagggaacactatacctgagtgaagtggaagacaccgaacgctcggggccagaggcttgctcggccaccggctcctccggggagctaatggacctggggatacaaatttgaagcgtaacatgttgtgcagcccccctgggaagccaccctctggttcttctcaggggagggaagaatggcccaaacccccaaagccccatccccaaaaggcccccaatcctggtttgggggagctcaagacccccccaggaaatgcacagcccctggccaatggggggaatttctacggaaccacagttcctgaatagggggggtctaaccattccccccagggggtccccaaaaggggttccggggttcccgaacccccaagggttttggttcctccc

SEQ ID NO: 480037 - DNA, 911 bp, Homo Sapiens
  misc_feature (144)..(193): n is a, c, g, or t
  misc_feature (824)..(860): n is a, c, g, or t
cagggctaggccccagcaaacttggaagaaagcaagaccaggcaaggaaccaaggtaacgggcattcctgactggtatatgccctgctgtgctgcttgcagggtggcttgggagagtggggtgctaactctgccattagccttnnnnnnnnnnnnnnnnnnnnnnnnnnnnnnnnnnnnnnnnnnnnnnnnnnctgtgggaccgacccgctcacagctgaaggttatgggccaacagagtttattcaggattgtggccccagcctgggctcctcaatggaagccacaccttgattgagcctgggagtttcttgccggggcagggggtgcttctgtctgccacctcccagggtcacacctcatagaggatcacagggaaatccacgtggatgcgggggtgatccagcttcacgatgccctgaggaatcagattcttatgcactcgcctcagcttggcccgcttctgcccgttcttggtgacgattgtctcctcatagaactcgtgagccagatccccatcctcatcatagaacatagagccgcggcgcgtgaatacgaaggggggcacagctcggccccgaggccgcaccaaagcttgctcagctcctgctgcctctgagccgccgcctccggccgccgaggcgaagggccacaggccccgagctttggacccgctggcgcccatgtcagggccgccggcgcatggcgggccccgtggccgctctgctcacaccgcagtccgcactaccataacctgccccagccgctgatcgcaggtgccgccccgctctcgacgaattcgagctcggccgatttggcctgatnnnnnnnnnnnnnnnnnnnnnnnnnnnnnnnnnnnnncggccgccaccgcgtaagcctccgagtcgccctatagtgagtcgatacagc

SEQ ID NO: 480038 - DNA, 1489 bp, Homo Sapiens
aatggagtggggggtgctgaaagggattagtacctttgccccaaagagttacagcatctctgattgttccaaggaatagaaaagatattgggaaaatgtaacaggaggaaggaaaatgtgaatttactgagggagagggcctcgaagtgggcctcgagggggaactggtggccggggagtgggtctgggtggagggagaggcccccgctggtagccatagggtgggggtcgtggagggccagtgtatccatgggggggcatcagtggaggaggtccacgcataccatgcggaggcataggacctgggtgacccatgggagatccgaatggaggccctcgggggggcatgcccattggaggaggtccaggatgaggcattccaggtggtggtcggggcggtggctggcccccagagcctgggggtccagcgtggggatgtcctaagccatgagggccatggtgtgcaagctgcatctgagacatccctggatggggcatcccacccggtgggaatgggtgaggatgtgagtgtccatgaccaggatgtcctgcccctggggttcctgccgatggggggccatgtcctgcagccccaggaggcataggtggtgggggcatggctgggggtatcccaggtgggagggctccaggaggtggcactggaggtgggaaggagccaggaggaggcatgcctggtggaggaagcccagaccccaatgatgataccacaggattgggagcaagagggtggaggaggtgcatctgcaaacagctgatgagggcggtcaggctgggagagcgggttctgagctgccagaagtcgttcggctgctgagccatggcgctcacccttggagtccttcttgaaggcataagatacggtgatagggtggttacagaggtactgcccattcatggcttcaattgctgcaacttctcattcaggccccccacgtacacagtggcatcctggttccgctcggagatcggcctggtagccatggcaaaagagctcctgccatcctcttcttgccttttgaagtgtctgttgtcctcccttgtcacccctctgtgaaatcagctgagcagctggataaaattgctctctaacatgggaggagatacaaaaggggcatactctcctccatccaacatattttgaagatctctcggatcatgggagtgtggggtgcagagagcatcttgcttattgatcctcatggtagtcttgctggtgttcttcttcattgcgcttgcacataaacataaaaaaactcaactcaggccgagccacagtcctctctaggagatgaagtttttaactcacttcagtttgagcttcctccttttcatgatgaaatcaacaggtggggctgaaatagatctctggagatctcctggatgtcgactaggaaaataacctccaaatagcacgtttccactcttttcacatttctttagcaggtgtttatgtctactcagcaggcaa

SEQ ID NO: 480039 - DNA, 750 bp, Homo Sapiens
  misc_feature (194)..(255): n is a, c, g, or t
ttggcctggtgagaccctacccaccccactgcccgcgccgggcctcgtccgctccccggccccttcccccgcgggcgtgtgggtcccgggctggggtctcggcgtccgcgatcccgagcccgctcgcttcggcccccctcaggaggctgcgaggagggtgggtttctccccagtgtagagggtggcggcggcannnnnnnnnnnnnnnnnnnnnnnnnnnnnnnnnnnnnnnnnnnnnnnnnnnnnnnnnnnnnnaccgaggtgagcctgagcgccttcgcactgctgttctccgagctggtacagcactgccagagccgcgtcttctccgtggccgagctgcagtcgcgcctggccgcgctgggccgccaggtgggcgcgcgcgtgctggatgcgctggtggcgcgcgaaaagggtgcccggcgtgagaccaaggtgctaggcgcgttgctcttcgtcaagggcgccgtgtggaaggcgctcttcggcaaggaggcggacaagctggagcaggccaacgatgacgcgcgcaccttctacatcatcgagcgcgagccgctcatcaacacctacatctccgtgcccaaggagaacagcacgctcaactgcgccagcttcacggcgggcatcgtggaggcggtgctcacacacagcggcttccctgccaaggtcacggcgcactggcacaagggcaccacgctcatgatcaagttcgaggaggcagtcatcgctcgagaccgggccctggag

SEQ ID NO: 480040 - DNA, 547 bp, Homo Sapiens
gtcagtcggtacctctctccacactgggtggttgaagcggaaaacgtggttcttgcccatcacaatcctattccctgacttcagcaccagcggctccgtcacaagcttcccattcacatatgtctcagctccttcacaaggctccagagtgaccaccacttctccatctggctgggggatgctccggaacagacagtgttgctcccgaatgaactgtccggtcagcttgatgtccatatctacttggccgaccctggtcccgttcatgcttgtagctgccccatgagacagcaaaaggtgtctggtctcaacactccgcactgtagtaactttcactaacatccatgcttctcaataaagtccacattcctttaagttgtttttaatgatgacatctgtaacagcatcaaaaacaaactgcacattcttcgtgtctgtggcacaggtgaagtgagtatagatctccttggtatcttttcttctgttcagatcttcaaactggcattgaatataggcagctgcctcttcatatccagtgtggagagag

SEQ ID NO: 480041 - DNA, 1388 bp, Homo Sapiens
ccctgagtgctgggtcgtgtgtgtgtgtgatagagagtggtgttagctagttgggagcgtcggatgtggttccggaggttgtggtatttaacttgggtgtgtgtttggtagtcctgggtggtatcgagatagggatgattggattaggagggtataggatactggcaggttgttgaaattcgcctattggtagccgtccttgcatttaggtgtcgtctcggaatcaggagcgcttgtagcggtgttcgctctacttcattccgtgtggtgagatattcgagtcttgttgtgcggcggctcgatcctgtggtccccttctggtgtgccgtaacgattctgttcttcgatttagcggtctctccacactgtctccggctcggcttgttccactagcgctggtctcgcttttctggtgtgcttccgtatgctgcttgtttgtaggtcgtgtgtcgtcgcttacttttgttggttctctctggctcacttggggagcggtctctggctgtttccggtgcgttgttgtcccttggtggggctcctactcctgtgctcgttgcataacgtgtgctttttgttttctggtgttctttggtttatctctatgtatgcctgtgtctcgatcctgttttgcttcgtcgttcggccgtcggcgcccttcgtgtctgctccggtgtgcttcgttgctcgcgcttccggtgcctttcgtgctctcgcatgcttggccgtcacttgcgggtcgcctccgtgccttcgcggcgcccctccctggggtgtgacggaccttccggctccgttcggtcgctcgcacctcatctctagcacctgcctcctcccttgtttgcaatgacccgcgtggttgagtgttgtgtccgttcaacggctatgtggtcactgttgggcctgtcgggtatgttatctgttcgctgtggccaaggggcacctggcatgggcacaaggcttgcaagccaagcaagcgtccccgcaggcatccgggccatccgtcttgtacccttgggcagtacacgccccagtgggcgggggctccctgcagccccaaagtcggcgctggctctgctcatggcccaggcggcgctggcgctcctgcactcgttgcagctgctgctggtaccagtcgcggccccgcgccatcatctccaaaccctgcagcagcacctccttctcctgctccagctccttcatctgcttcagcaggccgcagtccacgccgctggcgatggtgtgcactccgacgttcccctcgggcacggggagccacgccagggcatcccctgagtccgcccctcgtgccgaattcagccacccaggcctcgctaccttataaccgctagagtactgccgtctttaataacccgggttgacaactactt

SEQ ID NO: 480042 - DNA, 696 bp, Homo Sapiens
ttcgagtgtagtcgcccagagatacctgcaccctcggtcagcagaggaagccgaacctcggcctcccggggcgctcgccatgtaaggtcgcacttggacccagttgccataggtctggctggtggtagcgtttaagacgatgctgcttggaggccttggctgtttcatcaggtcccaggtcgaaggctgattggtatgtagcccgagatagaggacttcacctttgatctctgtatcttccatgtggtattgctggatgtggcgtccataacagaattcagtatgtccaccagtcctttgtcttcagcaagcagggagcatctctcattgggctcaacaactcagggatcccaggcccttggtaatgcaggtgtttcctcctccctttcacgcgtggaagtgaatagctccagctggcaggcgacactcatagcgctgtttgtacttagaggagacaatcaccacgtccgaagattggctctgccctcccatgacaggcaacggcaggatctcgatcccatgacgcatctcactcagctcctccaggttcaggctcccgacaccgccggtcagacttgcgggtaacaggagtcccagaagcagcagtcctaacagaactggacagcagcgtttccgccgccatctttaccgcgacgcgtgggtcgacgatatcccggaattccggaccggtaccag

SEQ ID NO: 480043 - DNA, 912 bp, Homo Sapiens
  misc_feature (714)..(714): n is a, c, g, or t
  misc_feature (806)..(807): n is a, c, g, or t
  misc_feature (870)..(870): n is a, c, g, or t
ttgggtaacaaccactgcgtcccctgcaaggcagggcacttccagaatacctcctcccccagcgcccgctgccagccccacaccaggtgtgagaaccaaggtctggtggaggcagctccaggcactgcccagtccgacacaacctgcaaaaatccattagagccactgcccccagagatgtcaggatcgctgctcaagaggcgtccgcagggagagggacccaatcctgtagctggaagctgggagcctccgaaggcccatccatacttccctgacttggtacagccactgctacccatttctggagatgtttccccagtatccactgggctccccgcagccccagttttggaggcaggggtgccgcaacagcagagtcctctggacctgaccagggagccgcagttggaacccggggagcagagccaggtggcccacggtaccaatggcattcatgtcaccggcgggtctatgactatcactggcaacatctacatctacaatggaccagtactggggggaccaccgggtcctggagacctcccagctacccccgaacctccataccccattcccgaagagggggaccctggccctcccgggctctctacaccccaccaggaagatggcaaggcttggcacctagcggagacagagcactgtggtgccacaccctctaacaggggcccaaggaacccaatttatcacccatgnactgacggagtctgagaaaagggcagaagaaggggggcacaagggcaccttctcccttgaggctgccctgccccacgtggggattcacaggnngcctgagtaggggcccgggggaagcagacccctaaagggattaagggctcagacacctcttgnaaagcaggtggggcactgggcctggggtacggtgccccttct

SEQ ID NO: 480044 - DNA, 378 bp, Homo Sapiens
gtgactacgtgatggagtatcgggggtagctgggaggtctccaggaccctgtggtccccgccagtactggtccattgtagatgtagatgatgccagtgatagtcatagacccgccggtgacatgaatgccattggtaccgtgggccacctggctctgctccccgggttccaactgcggctccctggtcaggtccagaggactctgctgttgcggcagctctggctccttcccatcccacatgctgagccttcacaaagaccatagaagtgatggcttttctctgtcccctgctgctctgaggggagaggggtgggtctcctgagccactcagatgggaaagtccgcttactctggcccttccctctccacgcaggtag

SEQ ID NO: 480045 - DNA, 901 bp, Homo Sapiens
  misc_feature (53)..(61): n is a, c, g, or t
gggagaaaatcttttttccacaaaggcccccaaagagaaaatttcccatttannnnnnnnnttgttccccaaaaaaaccccctggggtttcccctttagggggcggatttcaatttcccattttggggggcggggccatttgggccaaaaaggaattcttcaaacccttatggtcagtccctaatcgggactttcagttgccggtagtacacgttccacttctaggctcccattctgcagcatctgttgtgatttccaaaaatatcttcttgtttggcagtctcgttcatatccaaagtgatatgtctgggcctttaaaacgttgagatcaataaagttttcttcattatctgtctcttcttccacaaattcttcatccactttatttaatgttaattctgcatcatcttctgcaacgctttcttcttctaattcttctactgggtatattggccttttccaggtgaaaccaatatatttcaatgcttcttcagcgaagcaatcaagaacatagcatacatgttctccataacctgactttaattttgaaggaggaaaatctgcagttcttccctggacggggccttcaggttgctcttccggaggaactcctcctcgtagcggagcagcttcagcttctccaccaagtcctccatcaccacgaacatgtggtaggccgcgccgggcccccgctccaagaccacttccccggtcccttcgccacgggacctaggcaccccatcttccaaacccgacgtcgtgacgacggccagagcagcagtcatcgcagaacggacagagtccagcgtgggctcaggcccacagacctctgcggcctaagccgccagccctgccgccgccagtacagccacgaccggttaccaggcgaccaccggacccc

SEQ ID NO: 480046 - DNA, 438 bp, Homo Sapiens
gcaggcacggtaaatgctgggctggcctgcccggaactgtgaggctgagcccaagcatgctgtgaagccaagagtgcagaggttgatgaaggcacagcccatggagatgtggaagtagaaggggaagagtttgctctgcactagtccgaaggtatgtcggggaaggcttcggaaaagcaggaagcctgagacgaaggtcacccacatttgcatgccccaggcacctgacaagaccagtagatggaccatcttaatcaggcctcctaggttcccgccttcctccatcttgcagtccgttaggaaccgggacctcaatccgcagcacccggattccgagaacagaggcgtcggggccaaatgggctgaatctggtacctcactcccacgcccccgggtggacagcgaccctcctcggccgcgtcccctcgtgggtttccc

SEQ ID NO: 480047 - DNA, 1522 bp, Homo Sapiens
tcccgggatctactcctcactggccgggaaactggtcttatcacggaggctggggccaggcagcccttcggttcgggtgggcccatggaccccagtccaacgccgagggaataggaccatccaaaagcggaaccttcgcctcagaaaaagggtgcgggacccctcctcaccgtgcggtcacggtacggacagggtagatcacaggctgagggacagagcaaagacccctgaggccggacacctggggtcctgccgggcccctccccacgagagttccctgtgtctgtgccaatcgttttcgtctttctttgccgcagtttcttttcctgtaaatcatggttaatgacattaaccttcttaccatcaggggttagttgtggttgtgataaataattactaccgttattaagcaattgcaatttgcagtgtgccaggcactgtgccaagtattttgcttcgatgatttcacgtcatcttcaaaacaacctcatgagcgtggaccctgccagcagccaggccatggagctctctgatgtcaccctcattgagggtgtgggtaatgaggtgatggtggtggcaggtgtggtggtgctgattctagccttggtcctagcttggctctctacctacgtagcagacagcggtagcaaccagctcctgggcgctattgtgtcagcaggcgacacatccgtcctccacctggggcatgtggaccacctggtggcaggccaaggcaaccccgagccaactgaactcccccatccatcagagggtaatgatgagaaggctgaagaggcgggtgaaggtcggggagactccactggggaagctggagctgggggtggtgttgagcccagccttgagcatctccttgacagtcgcaaggcctgcccaaaagacaagcaggtgcaggcagcagcagtccagaggcccccctgagatctgaggatagcacctgcctccctcccagccctggcctcatcactgtgcggctcaaattcctcaatgataccgaggagctggctgtggctaggccagaggataccgtgggtgccctgaagagcaaatacttccctggacaagaaagccagatgaaactgatctaccagggccgcctgctacaagacccagcccgcacactgcgttctctgaacattaccgacaactgtgtgattcactgccaccgctcagccccagggtcagctgttccaggcccctcagcctccttggccccctcggccactgagccacccagccttggtgtcaatgtgggcagcctcatggtgcctgtctttgtggtgctgttgggtgtggtctggtacttccgaatcaattaccgccaattcttcacagcacctgccactgtctccctggtgggagtcaccgtcttcttcagcttcctagtatttgggatgtatggacgataaggacataggaagaaaatgaaagggtcctctgaaggagttcaaagctgctggccaagctcagtggggagcctgggctctgagattccctcccacct

SEQ ID NO: 480048 - DNA, 835 bp, Homo Sapiens
  misc_feature (138)..(138): n is a, c, g, or t
  misc_feature (150)..(150): n is a, c, g, or t
  misc_feature (154)..(154): n is a, c, g, or t
  misc_feature (212)..(212): n is a, c, g, or t
  misc_feature (568)..(568): n is a, c, g, or t
  misc_feature (646)..(646): n is a, c, g, or t
  misc_feature (649)..(649): n is a, c, g, or t
  misc_feature (652)..(656): n is a, c, g, or t
  misc_feature (658)..(658): n is a, c, g, or t
  misc_feature (662)..(662): n is a, c, g, or t
  misc_feature (666)..(666): n is a, c, g, or t
  misc_feature (668)..(668): n is a, c, g, or t
  misc_feature (710)..(710): n is a, c, g, or t
catgaactcgttgcctaagccaacatctagaagagtttttttgatgttatcttctagaatttttatggtttctggtcttatatttaagtctttgatgcaaattcacattgaatttgtgagttgatttttgtataaggngagaaataaggntcgngtttcattctcctacatgtggcttgccagttatcccagcaccatttgttgaataaggngtcctttcccccactttatgtttttgtttgctttgtcgaagatcagttggctgtaagtatttggctttatttctgggttctcttctgctccactggtctaggtacctatttttatagcggtaccatgctgttttggtaactatagccttgtaggatagtttgaagttgagtattgtgtacttccagatttgtactttttgcttagtagttttgctttggctatgtaggctctgttttggttccatatgaattttaggtttttgttttttctagttctgtgtagagaatgtcactgtagttttgagtgtatacatgtgtgggtgctgataattgtgtattttcctttggggtggaanagggaaacaattcaagctgagaaaagtattctcaaagatgcatttttataaattttattaaacaatttttgcaaaaanaanaannnnnanaaanaaananaactttgtcggccgcctcgggccctcgaaaagcttttctagnaccatttcgttttggcgccgccgggcccagtaaggtaaagtgaacactgggtccataagctggttttcccaaagaaaatccctgggccctgaaactaagggcctttggaaattcctcacccaaat

SEQ ID NO: 480049 - DNA, 908 bp, Homo Sapiens
cctgccccgtggaacccaacgggttacgtagtttcaaccacgggcccggttttccaatccttccttccctccgggaaacttgacattagacgtttgccccacgagggtggtcccccaaggtttttcgcccccattcatctctttcaatctcccccatgcttcttcctgcagttctgtgaacccctcctgtggaagacggggaggaactcagctgagctcccacaagaaaccccatctgcccctaccaaccgtcacctcgaagaagctatcatagtgctcctgcacctccacgtcgctcacatgacctggggtgggggcgggcagggtggaatcagagtgtagcctactgggggctgttcaccttgcccccaggcctggtcccttactcacagtgtgatccgtctgcagtttgggctgtgttctgtggattccggtacaggttgagcagcactatggtctgcacagaatttaaaaggggcggggcctgagctcagagggcagggctgcatgaacagagagtgaggcatgaaggttgggggtggaaccttacaccccagcctaagcatcatgagtgcatcggcgatcctttgcccctaagaaaccagaaaagggatggaggggactggcaaggatgaacagcgggatggaagggactggcaaagatgaacagccgccgtgtgtagcctgtacgcatgggggcgcgaccaagttcccgggaaaacggcacgaagaccggtgggaggagcctggctgaatgtcggcttgttgtgaagccgggagcaccggtccccgtgccggcagaccccgatcttaaagtaaaaagagcagttaaccttgtccttctcagtcccgaatatcgaagctaaatattcagccattttcatcgaggaattccggaccggtccagc

SEQ ID NO: 480050 - DNA, 478 bp, Homo Sapiens
cagcggtttcaggctttattaacaaacggtgtaaaaaaccagacggatctggaggaagggacagggctgcccgtctcagctctcaaccttcccagagaggggccaggcctggcagccctgtgcgtcgcgcctcctaagcagtcaaccttgtcccctccaaggacaggcatctgacccaatccaggtcccagggaggcggagtcgcaaaccctaactctggggtgtattctgctcggcctcctctccccctccccagatagctctcccagcctggggcacggacagcacagactttgcagacatcacccggggaggtttctcagtgcagacagtaggcgatcatcaggtgctggcgcccctccctcctcccctgccctggctgtcagtctgtagcttcacaggtctttgctgaattccctcaccagcgtgtagcccaggcagccccagccccccgagggccaggaaggaaaagagtcat

SEQ ID NO: 480051 - DNA, 1064 bp, Homo Sapiens
  misc_feature (619)..(619): n is a, c, g, or t
  misc_feature (867)..(867): n is a, c, g, or t
ccttattttgaactcaaggcaaagtataatggcagctcgaccaactgaaaaagactgtgaatacctgcaggcaaaactgaccctggcaaaaggcgagtacaagatggccctgaagaacctggagatgatctcagatgagatccacgagcggcggcgctccagtgccatggggcctcggggatgcggtgttggtgctgagggcagcagcacatctgtggaggatctgccagggagcaaacctgagcctgatgccatttctggagacagggcagaaggggcagagaataaaacaagtgacaaagccaacaacaaccggggcctcagcagtagcagtggcagtgggggcaacagcttgcttctctttctcttctcaccctccgtttgtatgggaaaatggagatgtcctctccactttatcccacgatatctaaatgaaaaagaaagaaaacccacacacaaagcaaaaactcaagtattaagagcacatatttttgacccagtggaggcttaaaaataaaaaagcgtgtatgctgggatacccattaaaaccattttctagaaggctaccatgagctgcactttttggggtgggaaaggtgaatgccagtggggatgcggngggatgagggtaggagggacttatagaaggggatttgtggctgtgggggagaaggttctacagcataagccttatcctgccagccaaggggatttattctaagagaagtgcatgtgaagaatggttgccactgttattagattgacaagatgttaatttctctgtaggttgtaactttaaaaataaatgacattatttaagggttatgctgcactagtattcctttagaggaaacagttctttaaagntaggaaaagggagaaggcaagcaatgttttgccaaggcttgtcatacgagttaagtgttaaaacttgtttttctttaaccgttttaatgggaatgcatatttagagaactgcttttttgcttggttagaaaaatagccatttttggaagccccctttttcaacttgtaattttggcacaaccggatatttgccttgt

SEQ ID NO: 480052 - DNA, 1605 bp, Homo Sapiens
  misc_feature (549)..(549): n is a, c, g, or t
  misc_feature (1289)..(1340): n is a, c, g, or t
gcacatcggccagggcccaggatgaatcagccaatctgcaccatttttatgtcagcaataattccatctcttccctttgagcactgtagggagagctgcttcatccggttctccaaggcctggccctcaggggaggtgctgctttggctcttactgctgccaccactgccactgctactgctgaggccccggttgttgttggctttgtcacttgttttattctctgccccttctgccctgtctcctcgttctacttcacattcaggggaggaggccccgctgcattcacttcgagggcccaacactgggaacatcatcccaaactctgacagggacacagggctgggcagatccaggctgccaggcctcacaaccgcagggaactggtcaggcatctcagacgggcttgttggtcctgaactaaagctggacacggactgggtttccgagtcatcttcagacacaaagttgctacagctgtcatcttcaaaggcctccgaggccacagaaatggcatcaggctcaggtttgctccctggcagatcctcncacagatgtgctgctgccctcagcaccaacaccgcatccccgagggccccatggcactggagcgcggccgctcgtggatctcatctgagatcatctccaggttcttcaggggccatcttgtactcgccttttgccagggtcagtttggcctgcaggtcatccacagtctttttcagttgctcgagctgcacatagtactttgccttgagttcaaaataaggcttggacttgttgatggctctcttgagtttcttctccagctgtcgcatgcggcccatggcggcattgtacctggctgccgtctccttatgcaccagctcgctcctggtcttggtctgctccgcctccatgaccctctgagtggcgtgattcagcatctcctgccaggcggagtcgaactgccgcttgtcatcctccagcagccgcttgctggggccagggaggatggtctccttgggggcgcggagcacctctgtggccctctggaagtcctgcgtggctttctgagcttccagctgagcctgcctcgcccaccctccgtgcctcccagtagggcttggagtcttccacagctttgccaattttcttcaccagttcatccagtttcaccgttgcttcaaccagaacagagcggaacttctgacgagcatcctcaagttcagtctcccgtctgttgatatcatccgtggactgatttaacttctccagttctccctggatccggggatccacctcttctnnnnnnnnnnnnnnnnnnnnnnnnnnnnnnnnnnnnnnnnnnnnnnnnnnnngggcaggcggcaggatttcggctggctcctccgagcggctccgcttcagtgccgcgtccatgcaggcagccggcacgcgcgccgcgcagtgggctccggagcgccccgggggtcgcggctgccacaggctgggctggagccgcctcgccacagccgggcacggtcggggagccgccggggccgacacccgggagacgcagctcgccgatgcggatacctccggcccctcgtgccgaattcgccacccaggcctcgctacctagga

SEQ ID NO: 480053 - DNA, 916 bp, Homo Sapiens
  misc_feature (205)..(205): n is a, c, g, or t
gaatccgtttccaacttgtaaggaaccttttctaatttagaatatgcacatgtgacccgttgagttaacccccgcatttaatttaagaatggtgtaacttggagtaatttcccgtgatatccgaacatccctttatgacgagctccaaaaagcaccaaaaatgcagcaatctcaaaagtgtccagtaaattttaatataccaatntttggttgcaagacttaatttgtaccatatatcttgcttatatgtatccagacataaacgcttttttaggcatagaggcttcaacctggttcttaaaaataatctcagcagacaaactgaacttgatgcaacaacatattttatgttttattattgctgaggcaaatcacaccaccataaaatgcaaggaaaaccaatgtttaaaaggcagaatttctcttttcttgaggctttgttaatacaaaggtcaaaatttcacctttgaactaaaaaagaaataaagaataggcagtgtaagtaacaaattgtcatcatgaatatatttctaaatttttatttatttataagtcaacattagcccaaatatttagataactaatacggcccttgaaaacttaaatttcttaaagagaaaagcaattttcaaaaaatcatcgggtcacaagaacccaattaattgtacagttatacattttatttaacccctatgaccatgtaaactaagactcaaagtttaaattagcattaccgaacagaaaaggaaagttttctgtcactcttggggtatttactattttttaaagaatacacactttaagcaatgaatcaatgttttactagaaacccactgcgtccacggacgcgtggtcgacaatatcccgggattccagacccgtaccagcctcttttgtacaacatgtcatagccaca

SEQ ID NO: 480054 - DNA, 446 bp, Homo Sapiens
ctttgcactatcatagtcactgtggtgaatccaagcataaacagacaaatccaactacaactcaacagggtgcagatggggagggcagggcaacatctatgtatatgttcagctgctccagcagaacagacagcatggcttccagctgggactgggggaaaagaaccatttccaagggggtgtgttcccctttgtcgggtgtggagggctgatactatgcatgtggagctgagcagcgggctgggctgtctgggaggttggcagctacaagctagggtgcaagtgggggacagcgggactgtgggcctgccctgggtgccttgcccttccatcctggtgccaccactgacaaccaagacacccagcctgctgctgtgggctcagcacaggaaggggccaggccttctcaggggaaagggctctctccatgtcaacaaggcagccaa

SEQ ID NO: 480055 - DNA, 288 bp, Homo Sapiens
ccccgactagcccgacagggcagtgctgtggcctgcgacctgcaccgcctagaggagctcgtgctcgacaggtgtgtacgcattacggacactggcctctgctatctgtccaccatgtcgtccctccgcagcctctacctgcgatggtgctgccaggtgcaagacttcgggctgaagcacctcctggccctggggagtttgcgcctcctgtctctggcaggctgcccgctgttcaccaccaccgtgctgtcgggctagtcggggacccttgtttggggctagtcgagg

SEQ ID NO: 480056 - DNA, 1077 bp, Homo Sapiens
  misc_feature (416)..(440): n is a, c, g, or t
ccttttatagccaactttgtacaaaaaagttggcgcgccgacagccgagttttctgcgcttccttctccctctctccagacgtcgtggtcgttcggcgccttgcatttcgatctccgtgatgacgatgacgcggaagaagaagggcccaagcgggagcttggtgtccggcgtcccgggggcgcagggaaggagggcgtccgagtcaacaaccgcttcgagctgataaacattgacgatcttgaggatgaccctgtggtgaacggggagaggtctggctgtgcgctcacagacgctgtggcaccagggaacaaaggaaggggtcagcgtggaaacacagagagcaagacggatggagatgacaccgagacagtgccctcagagcagtctcatgcaagtggcaaactccggaagaagnnnnnnnnnnnnnnnnnnnnnnnnngcagcacgggagaagcatcggaaaacggactagaagatatcgatcgcatcctagagaggattgaggacagcactgggttgaaccgtcccggcccagctcccctgagctccaggaagcacgttctctacgtggagcacagacacttgaatccagacacagaactgaaaaggtattttggtgcccgggcaatcctgggggagcaaaggccacggcagagacaacgtgtgtaccccaagtgcacatggctgaccacccctaaaagcacctggccccgctacagcaaaccaggtctgtccatgcggctgctggaatcaaaaaaaggcctctccttctttgcgtttgagcacagtgaggagtaccagcaggctcagcacaagttcctggtggccgtggagtctatggagccgaacaacatcgtggttctgctccagacgagcccttaccacgttgactcactcctgcagctcagcgatgcctgccgctttcaagaggatcaggagatggctcgagacctcgtagagagagcgctgtacagcatggaatgtgcgttccaccccctgttcagtctcaccagtggggcctgccggctggattaccgcagacccgagaacaggagcttctacctggccctctacaa

SEQ ID NO: 480057 - DNA, 524 bp, Homo Sapiens
  misc_feature (23)..(23): n is a, c, g, or t
  misc_feature (58)..(58): n is a, c, g, or t
  misc_feature (84)..(84): n is a, c, g, or t
  misc_feature (287)..(364): n is a, c, g, or t
  misc_feature (420)..(420): n is a, c, g, or t
  misc_feature (424)..(425): n is a, c, g, or t
  misc_feature (491)..(491): n is a, c, g, or t
  misc_feature (495)..(495): n is a, c, g, or t
ccttgttcatggggaacctgaanagggggccaccaaaaggcccaaccaaaagtttggnctccttcctttcccctaaaaaccccnggccttcctcctcccaactaaaaacataatgccagtaagagttatgttcccctggtaagcccctaggggaggggcaaggggcttttggacatttacttacagggggtcaggctggacccacacagggaagaagtcacagaccctcaggtagcgaagacagcaggatgcagagaagcagtcgttggcctggcagccaaggggannnnnnnnnnnnnnnnnnnnnnnnnnnnnnnnnnnnnnnnnnnnnnnnnnnnnnnnnnnnnnnnnnnnnnnnnnnnnngcttgtgcacacatgttcatgcacatgcatgcactcacactcatataaatgcacantttnnacacgtgtgtgcacatgtactcagacacacacaggtgtgcttataaatgtgtccacattcatacancttncactggtgcacacacatgcgctcacagca

SEQ ID NO: 480058 - DNA, 396 bp, Homo Sapiens
  misc_feature (258)..(258): n is a, c, g, or t
taagcgcaagcaggagagagaacccttggaagtgaggggtagggagcatgaggtactgagaaggggagggaggtgggggagtggttggcatccccaagcctcacctcaatgtggtgcaactgggtaccatcagtagccatgatgtagtgggtgccagcttcttttagggtgtcactcacaaccacagcctgggctgcctctcctgggggctcctcgctgtgggcatggagaaggttctaggagaagatggagggccanaggagcccccttccccaagcaacaggcatcaactgaggagtgactgtcaccacagatggactcaagtcagaagggcccagggttcaactgtggctctgccctgttaccaaatgaccctctaccatgtctcttgtaaat

SEQ ID NO: 480059 - DNA, 943 bp, Homo Sapiens
  misc_feature (181)..(182): n is a, c, g, or t
ggctctggtgtctgggaactttctaagcattcttcagagcaggacgtcaggttcaggtctggaaaaaattcccctgtgcccagcccccacgactccagctggaatgggcgtgccctggcatggcagaggggtcttgcagaatagagatgttctgaggaaggaaggagccagaattaaaganncccccccaggaattccacacccctcgggagagagccttgtccccctaggagccctgggtgacagaacggggcagcaaaggagccctggatgacagaacaaggcagggttacccgctgccaccttgtatgctgctgccctgagaccccctcaaggcaccgggcagcagggctattcgcccgtcatctcctcgtcatctgtctggctgcggccgttgatggctggggagccagcctggacatgggacaggtcctcgaagccggggctcagggagggcgagacggtgtcggggctggtgtcacatgagcccgtgctctgttctgaggtggcaatggtggtcgtggtgctgggtgggatggggtcttcatcctcttcctccaggaaggatgcctctgggatatggctgaaggcctctgggtgctgcctggccagtttccctttcagcgtcctgatacggcggaagatgctgtccaggtcccgtttcatctctactagggtcctcgtgtggtgcaggaagcgttcgctcatctgctgcaggcgggcactggacaggttgttgaagttgagcagcatctcattggtcttctcaaagcggtccagcatgttcttctgggccaggatgatggcgttgacatcatctgtgttcaccatgctcaggatgcggccgcagaagaccctcgaggccgagtccgggaggtccatctctttctcctcctccgctgcctgcacatctggccctcgtgccgaattcgccacccaggcc

SEQ ID NO: 480060 - DNA, 974 bp, Homo Sapiens
  misc_feature (612)..(612): n is a, c, g, or t
  misc_feature (643)..(682): n is a, c, g, or t
aaggggccgattcaggcccaagagggggtccccagctgggcttcaagtgccaaggcaatggcccagaaggccagagcctcccgatagaggccagtaacaggtgaggctctgtgcaccccgcaagctccgggcagcacgaagaaggtcctgcaaggttccggggcaatgggcgcagctcaaggcactgcctgccaggtgacccaaaaactgctcaaaggcccggctacggcgggcaatggtctctgcagtaaaattccggcggcagccgcttacgggggaaggagatggcaagccattgggcacccggaattgccgctgcaggtttcggtgcagccgctcaaagtccgagtaacggcgagagatctgggcctggctggcaatctggcggtcctgggccgatcacggcgagggtgtagagctgaggtttgtcacgtacttggagggcgggtccttgacaaacgttagcgctggtcacttcgaagagcagccgctggggtgccaaggtgttccgggacttcttccagaaatcctgcagcatgccgcgccaggagctgactgccccactgcccatcaggtggggggctccgttctgcgtcttctcctgacgtcccnatccccgaggggcagctggtcagggccagcnnnnnnnnnnnnnnnnnnnnnnnnnnnnnnnnnnnnnnnngcgctggtgaagctgagggtgccgctgagtcagggaggacaggccctcggcgtcgtcgtcctccagctctgagctctccaggaaactgctcggccatctggactggccgccagcctccccggggccgtcgccggccaaggcgtgccgcagccggtgcaggagccgggaggccatggcacccatcctgcgtcccacggtgcattcaggggcgcgccgcgccccaggggtccgggtgcagccaccccgcagcccatggaggtcggccgggttctgcagggctccgctgggctca

SEQ ID NO: 480061 - DNA, 553 bp, Homo Sapiens
agcttccgtcaaatccaggtcttccaggaaatccgtgtcttccagcaaatccacgtcttccagcaaagccatgtcttcctcgaatacagagcttccagcgaagacatgtctttgttggaagacgtggacttgctggaagacacggatttcctggaggacccggattttttggaagctatagatttaagggaagacaaggattttctggaagacatggatagtctggaagacctggaggccattggaagatgtggattttctggaagacatggctttttttggaagagcgtagagttttcgctggaagagtctggactttgtgtggaagatccagtaagttgctggaagatctggagtgtgtctggaagagcttgactttagctggaagagcttggagtcttcgttggaagacatggagttgtctcggaagggcatggattgtctggaagatgtggattttctggagctcaggattatctggaggctgagagttattggaagacttgaagtcgctggaagacccggagttgttggagaccttggacgaccaccg

SEQ ID NO: 480062 - DNA, 382 bp, Homo Sapiens
actagtccacgctgggctggaagacctggattttttcccgaacatgtggattgactggaagacctggatttggtggaagacgtagatttttctggaagacactgactgactggaagacctggatttctttctggaagaccctgattgactggaagacctggatttctttctggaagacactgattgactggaagatctagatttttaggaagaccccaattatccggaagacttggattgttgggaagacggtggatttttctggaagactgggaggttactggaagacatggattttctggaagacctggattttctggaagacgtggatcttcaggaacgacatatatgctggaagacctggagcccaccgtggactagt

SEQ ID NO: 480063 - DNA, 288 bp, Homo Sapiens
ccagaaaatccacatcttccagacaatccatgtcttccggacaatccatgtcttccaagaagctccaagtcttccagtaaatcatgtcttccatcaaattaatgtcttccagcctacttgtgtcttccaacaaaggtacgtcttccaacaaaggtacgtcttccaacaaaggtatgtcttccaacaaaggtacgtcttccagaaaatccacgtcttccaaccaagccatgtcttccagaaaatccacgtcttccagaaaatatatgtcttccaactaagctcagactt

SEQ ID NO: 480064 - DNA, 581 bp, Homo Sapiens
  misc_feature (228)..(266): n is a, c, g, or t
  misc_feature (277)..(277): n is a, c, g, or t
  misc_feature (409)..(409): n is a, c, g, or t
tcaagtgaaattgaatttttattccaaatgactagtatctagaaaggcagtagctaacactcaaaacaatgttgtttaagtgtaaattaaaggcagttgatttgcaggagagcaaccagtggggtagtggccatggcactctgatcatggttatatccaagaaagcataaaatacgcaatgtcctgatatgcagtctggatgtgcagcatttacagcaagcaacatannnnnnnnnnnnnnnnnnnnnnnnnnnnnnnnnnnnnnnacgcaccacanagtcgcaaacctcagaaattaacattcacttaagaacacagtggtgaagacttttggtagcaaaatctgcacggttcttaaaatgggagtcttcaaaagtacttcttcaaattcaagagctaagaaaaccanagagggaacagttacacaggcttagtggagatgccgcctgtcatgaagatgaccatcagtcctacttcccagacacagtgagaaccggtcagcctgacgaacctgaaggaaaaggccggctgacgggtgctgatgccactgactatacaagaacacaccgggtcaactcatc

SEQ ID NO: 480065 - DNA, 920 bp, Homo Sapiens
tggtacgccccgggatatcgggatcgccgggtcgggcgatcgtcccccatacctcggccatgcggcccctgctgctactggccctgctgggctggctgctgctggccgaagcgaagggcgacgccaagccggaggacaaccttttagtcctcacggtggccactaaggagaccgagggattccgtcgcttcaagcgctcagctcagttcttcaactacaagatccaggcgcttgtgtctaggggaggactggaatgtggagaaggggacgtcggcaggtggagggcagaaggtccggctgctgacagaaagctctggagaagcacgcagacaaggaggatctggtcattctcttcgcagacagctatgacgtgctgtttgcatcggggccccgggagctcctgaagaagttccggcaggccatggagccaggtggtcttctctgctgaggagctcatctacccagaccgcaggctggagaccaagtatccggtggtgtccgatggccagaggttcctgggctctggacggcttcatcggttatgcccccaatctcagcaaactggtggccgagtggcgagggccaggacatggacagcgatcagctgttttacaccaagatcttcttggacccggagaagagggagcagatcaatatcaccctggaccaccgctgccgtatcttccagaacctggatggagccttggtgtctccctggggccagggccaccttcctggggcctgctatgaactcactgcctctgtcctcacatctgagctcagcgtgatgccttcttttcctgctgtggggctgcagttgaactacctgggcaactacatcccgcgcttctgggacttcgaaacaggctgcaccgttgttgtgacgaaagctttgcgcaacctcaaagggcattggggga

SEQ ID NO: 480066 - DNA, 1096 bp, Homo Sapiens
  misc_feature (122)..(143): n is a, c, g, or t
  misc_feature (368)..(387): n is a, c, g, or t
tttattgtgggggggagatttcccccaacccacttgtttcacgagcccaggtattttcctctgggaaacacgggatttgacccccttttccactttcccctaccggggccccggggcccccnnnnnnnnnnnnnnnnnnnnnnttcatcttcaaggggccgaggccggcccccccaatgtctttttcactcttgggtcgcgccacttttttgcatcgtttcccttttttcagggggaatttaactgggaggccaggcaggttcagcaaccaaggtttattttccagcttagcaaggtaacggggtaggggcatgggttacatgtttaggtcaacttcctttgtcgtggttgattggtttgtctttatnnnnnnnnnnnnnnnnnnnnaaagcgaagcagaagtaacatggagtgggtgcagcctccctgtagaacctggttacgagagcttggggcagttcacctggtctgtgaccgtcattttcttgacatcaatgttattagaagtcaggatattttttagagagtccactgtttctggagggagattagggtttcttgccaagatccaagcaaaatccacgtgaaaaagttggatgatgcaggtacaggaatacacgagggcatagttctcatagtcggtggccaggatccagtacggtgccgatggcataaaccaggaaaacttaacttccagcttggcaggctctgtgaggttaactggggtggcttcaccttcgatttgattcacagttccatcagctctcaactcctggtttaacactttgatctttccgttttccattagtgagtagttggcctggatgcagcgtccattctcaaaggttgttgggatcttctcaatttcgtaccatcttccgagatacttattcacgtcaaaattctcctgcaccggaggattggggcacttcccaagatgaaatgcttgtccctctgccgcaccgaagaggccagccagtgcggaaagcagcagcagcagcatcaccatcttggggctgggtggctggagaagggacctggagcttttctttcaagatgaaggcagtttccagatgcagaatcagccgatttccaa

SEQ ID NO: 480067 - DNA, 647 bp, Homo Sapiens
  misc_feature (341)..(341): n is a, c, g, or t
aaatatttagattaatagcattttgtacatcaaatgaagagtacagcagtctgaataaatccttcagtcacaaaaacaataaaacccactgtaactaactttgggagtcagggtattgcacctcaacaagccgcagtctttagtttgtgattgctaccttatatcccaatgggtggtttgtttgttttgtttttgtaaatatacacacacaccagcaggtcatggtccctgggtgagtcgtttgtgttggaatagtgtaagcattatggattattgtaagtctttaatagaatatattaatttattctagaaattttattttttaaaatgttaaacaaagncaaaaataaaaatgaatccataaattaaccaaagcctattttctgcacattccagttttggcttttatttaacattgactatacaatactctggtactaccacatgtttacaacccagaaagatgtacttttatgttagtgtctgtaaagagggatttaaaatgtgtattttaaacacagcagttgagctgagtgcattttctatagtacgctgaggtgttacctattctatttcaaataaattctcaattcccagccactgaatcataaatgcaataaaaaaaatcaacagaaatgaagaactta

SEQ ID NO: 480068 - DNA, 1812 bp, Homo Sapiens
  misc_feature (33)..(33): n is a, c, g, or t
  misc_feature (45)..(45): n is a, c, g, or t
  misc_feature (61)..(61): n is a, c, g, or t
  misc_feature (63)..(63): n is a, c, g, or t
  misc_feature (65)..(65): n is a, c, g, or t
  misc_feature (1461)..(1521): n is a, c, g, or t
  misc_feature (1729)..(1765): n is a, c, g, or t
ctttattggaaaaaagtccaacaagtgatatcnctagcagctganggggctgccaggaaanangnggagcacctgaggctccatggaagacattggagtagtgcagtgcagcatctgcctctagggtcagacaattccttttatttgctggggtaagaggagtacccacagaaacacccctctctgagggccagaggcaagatgtggggcagctggggatgctcagagtcctgatacaggtgaaatggggcccccatttgggacctaatggagtagggtacaactagtgactctcccctggaccggggaatggaaggagatatcccatctgatatccactccccaggtccaggggcacagactctgaacagacctaccttctggctctgctcacagtggaaagaggatgggtaccaggcctgagattgtgggagtggcattaccctctgggagtctcgggcagatcaccatcttgggctccccctgaccccatccctatccccagttgttagtgcatctctcttctgggtgtgtttcttcactcaaacgtcgatggtgttgatagatggtgactttttcagcccacatgagcaacaccaccacaatgatgaccacttccccagtctgcagtggccgctctccatccagaccttccactgtgatgtcacctgggcttgaactgtttgaaggtagccggtcagaacccttgagagttcggaagtgcacccggggccctgggggactctctccccgaaggccgatgctcctgacctgcactgtgtagtcactgtcttcagccaggccccagagggcacaggcccgggtggtggtgttcacctcccgaatcacacgctgcccggggccattctgccgctgcagggagatgaggggagaggaggacagcctcaccccagtgccaggccacaaggctcaaccagagactcttcaacatccaagcactccgggggagtagcgtgaaaagggcagcctgagccaggatacgccagcttccagatcccccccacttaagtgaagaaatgtgccgaaatccaaggacacaggttgggggagcagaagggtgattcatacttgctgggaaatggagtagccaatgacgatgttgccttctgggacgtcccaggacacagtggccgagttggctctgaggtgagtgaccgtcacattcacaggagagggaggccggtctgctcgcacgaagcccaggtcacagctgaccagcaggaggaccgtggggcttagatatggggaaaggggcaccagcgaagccatgtccccacggagtccgctggggggggaactgtggcatccgcttggcatccgcttgacatccaggtggggctcctccgccggtcctcgcggttggtcaggcctcggggggctgctcggtgcccagagggcggcccatcgcccgactcggtggcgctgcccctaccccatccnnnnnnnnnnnnnnnnnnnnnnnnnnnnnnnnnnnnnnnnnnnnnnnnnnnnnnnnnnnnnctgcggagcccccagggctcgagcgggccacggagtctgtccgggagcagggggcgttgcccggacgctggcctgggtccccggtgcgggaggcagtgcggcggcctccgcccgcccctgcagcgggatgtgaccgtcccggagagccagccgccgccttctgcagcccgctctcgacgaattcgagctcggccgatttggcctgatnnnnnnnnnnnnnnnnnnnnnnnnnnnnnnnnnnnnncgccgccaccgcgtgactccagttcgccctatagtgatctatacatt

SEQ ID NO: 480069 - DNA, 1539 bp, Homo Sapiens
  misc_feature (1263)..(1263): n is a, c, g, or t
  misc_feature (1351)..(1351): n is a, c, g, or t
  misc_feature (1361)..(1361): n is a, c, g, or t
  misc_feature (1432)..(1433): n is a, c, g, or t
agatggtaccggatccgggaatttttttcgatggcatctcaagccaatcattgctcaggttctggcagaactgaaagaatatgctacagaggtggatgttgactttgttctgaaaagctgtgcgggccattggacggtgtgccatcaaggatggagcaatctgcagagcgctgtgtaagcacattgcttgatctaatccagaccaaagtgaattatgtggtccaagaagcaattgttgtcatcagggacatcttccgcaaataccccaacaagtatgaaagtatcatcgccactctgtgtgagaacttatactcgctggatgagccagatgctcgagcagctatgatttggattgtgggagaatatgctgaaagaattgacaatgcagatgagttactagaaagcttcctggagggttttcacgatgaaagcacccaggtgcagctcactctgcttactgccatagtgaagctgtttctcaagaaaccatcagaaacacaggagctagtccagcaggtcttgagtttggcaactcagctaaagaagtagtcttgtctgagctgccactgatctctgaggagacggaccttattgagccaactctgctggatgagctaatctgcccccttgggttctttgggccgctgatgtatcaaacacccccccgcaagctttatggcggtcaggagatccactcaaacacttaactggaaacaagtcaaaaactccatatccacgagaacatcccctgttattaagccgcgactcatccacaaaatagtttcccgtactataccctctctctaccatcacccttgccccaaccctctacgccatagcgtgctacacctaacctcctctacctcctcaccctaccccgcacatagatcctctccacaaaccaactgtttacacaggtatatagtaaccccttttccctgtccacgttcatgcataaaaagcggcatcctggcttccactgttcccgcctcccccttaagaagttcactcaggccgccccgctgttccccccttattcaccacagctctaaatagtcgccaaagttcccatttacttcaaccccgcccatcccgaggcgactcaatgactcagacaacccggacaaaaccatatccacggtgtcttaactgcggataagaattttaatcccatgctttcccggctcatcatctaccccgggcgaacctttgaacgggggccggcttcttcacatcttgcttcttgtaaatacccccatttanatactccccatcactctcataatccgccccccccgccctgttattcccaccttttaggcggctcacttctcgattaagaaaacaactnctactagcanattctttagccccaaattttttcggtaatgaagagcacggagcaatatgggagaaccaatacaccctatanntcttaatttgaagacacagtattcggcacgcgacatacaaacagtgattaatctaggagatgaagatttaaattgctgagcccgatatcccaacacgctcccataa

SEQ ID NO: 480070 - DNA, 758 bp, Homo Sapiens
agagatgggaggattttcccaaggtgtctcctggctgtgacccaggtcaagagtggttggcgtcaaaccacatgcagctttcgtgtcctgcacgggctggggcacctctctttccgcccccaaaagacatatagctggtttccaatggctgccgatgatgtgtgaaatgttcttggggatggtggggggctggtcacttctggcgtggtccacgtcctggtttcaggattcaggacttgtagacaatttcgatttcctgattggttggcacctccaaatacccagatacggtcaggtgtgcaggagggaatgaagctagcatgttcataccggggcaagaggcccttgcaggtatctaagtcccactggtgttttcccagatccatggtgtgcacgtctgagaagcttctgtttggatttgctcccccaacaatgaagaccttccctctcttggcattgccaactgggggtaaatatgaacagctgtggccaactcgagcacaggggctgtctccagggacagtcaaggtgtaccatgttgctttcctgggcttgtctccaggttccaagactggcagttgcttcatggtgtcctgcggcctaggccactgacagctgtccccaaagtccagagctcagttaggctggcttcacgtgggcgggacctcccgcagcagccgccgctaccagcccagcaaatctcatccccacgtggcagttctgcggcgacttaggccagtcgcgagccgtgactcccc

SEQ ID NO: 480071 - DNA, 524 bp, Homo Sapiens
ggccaggtgctgatcggtgaggtggcctatcacccactggatccagatcacgtcgtaagagtccggctccggggtgaagtcctggagcccacaacagaagtagttcctcaccctcttgccctcctcccccaggtaggtcttggcttgaaccaggaagtcctccgttatgtcgaccatatccacctctctgaacagcggcaggagcagccgcttggtgatcctcccaatgccagctccacagtccagggcacaggacgttcctgtcttgttcgggccttccccccaagcatgccgtccaccgtgggtgggatttgtttccagtaggtcttgggccttggaatagaattgcttctcgtcttctatcacctcgctcgtcatgctgtcaccaaccgcggctctactcaagcaccacgatcagcaaccgcgactctctccgggcgggggctcccgggaccgagagaagaagatggggaagaggaagggagggcggcggcggcggagacgccacaagccaaccgcagctc

SEQ ID NO: 480072 - DNA, 932 bp, Homo Sapiens
tagaatgagaccaggtgaactgccggcactagctcgggagcacattggatgggaggaaatcctggagccggggacactcttcattgaagtgcctgctcttccttgtactccaagtgtcggaacgttcagcacgcttcaccgacaatggtcattggcccctgccagcggcccttccatagctctcccagagtgattctcgttgagcttcgtcaggaaagttaagctgttttgaagtcaatgccagagtgtttgttcagggttccatttcggggccgagtgcgggtggtccccttccagaatgtgtccttgtatggaatacggttgagattctggcccatcttctctgcccgctctcggagaagctctctcaggggtgccttggctttgtccacaggcatctctccatacttgttacagatgctgacaagggccccatttgccaccaggtcctctgccacttgatcttggccccaaaaacaggcatagtgcaggggcacattcccgtgttcattcactgcattgatgtctgccttgtactgcaatagcttctgtacaatatcacggtgtccatgactggctgccagatgcaggggggtgtcatccccacggttcattacattgatccgtgccccccgcatgatcaacatctcaaccacagcagagcggccctctcggcaggcccagtgcaagggggagaagccatgatcgtccccctggttgaggtcgttctccgtgttgtccagccacaggcgaacggcgactgcgttgccctcccggcactgagtgaaaatgtcgtccatagcagcgtcccggcgccgagtcccctggattggggaagcctgaggactgtggagtgatccagggaaggaggatgaaccccaagctttatcctcgggactcgggctgcaggatccttctccggggaactcccg

SEQ ID NO: 480073 - DNA, 1071 bp, Homo Sapiens
agcgggttgtgggcgccttagcaaccgcctgggacgccgccgagtggtctgtgcaggttcgcgggtcgctggcgggggtcgtgagggagtgcgccgggagcggagatatggagggagatggttcagacccagagcctccagatgccggggaggacagcaagtccgagaatggggagaatgcgcccatctactgcatctgccgcaaaccggacatcaactgcttcatgatcgggtgtgacaactgcaatgagtggttccatggggactgcatccggatcactgagaagatggccaaggccatccgggagtggtactgtcgggagtgcagagcatcaccagcagcagcagcagcagatcaaacggtcagcccgcatgtgtggtgagtgtgaggcatgtcggcgcactgaggactgtggtcactgtgatttctgtcgggacatgaagaagttcgggggccccaacaagatccggcagaagttccggctgcgccagtgccagctgcgggcccgggaatcgtacaagtacttcccttcctcgctctcaccagtgacgccctcagagtccctgccaaggccccgccggccactgcccacccaacagcagccacagccatcacagaagttagggcgcatccgtgaagatgagggggcagtggcgtcatcaacagtcaaggagcctcctgaggctacagccacacctgagccactctcagatgaggacctacctctggatcctgacctgtatcaggacttctgtgcaggggcctttgatgaccatggcctgccctggatgagcgacacagaagagtccccattcctggaccccgcgctgcggaagagggcagtgaaagtgaagcatgtgaagcgtcgggagaagaagtctgagaagaaggtgatggagaggaaggaggagcgatacaagcggcatcggcagaagcagagcacaaggatcaatggaaacaccagagagggctgatgccaaggaccctgcgtcactgccccagtgcctggggcccggctgtgtgcgcccgcccagccagatccaagtatggtcagatgactgtggcatgag

SEQ ID NO: 480074 - DNA, 961 bp, Homo Sapiens
  misc_feature (61)..(61): n is a, c, g, or t
  misc_feature (97)..(97): n is a, c, g, or t
  misc_feature (99)..(99): n is a, c, g, or t
  misc_feature (299)..(299): n is a, c, g, or t
  misc_feature (302)..(302): n is a, c, g, or t
  misc_feature (305)..(305): n is a, c, g, or t
  misc_feature (308)..(309): n is a, c, g, or t
  misc_feature (316)..(316): n is a, c, g, or t
  misc_feature (320)..(320): n is a, c, g, or t
  misc_feature (455)..(455): n is a, c, g, or t
  misc_feature (487)..(487): n is a, c, g, or t
  misc_feature (601)..(601): n is a, c, g, or t
  misc_feature (785)..(785): n is a, c, g, or t
  misc_feature (836)..(836): n is a, c, g, or t
aatctccgggaagacacggattttgcacgtgacaggaacagagagtttctcgtgggccagnaaaatcattctttggagcaggtcccactcgtcctgnanaaaggcgccatagtgacctctcttggctatcatctgtgggcagccctctgcgctcatgacgccctgcacacccgtgtcccggaggcagcgctccacgtcctgcaggcactggatgttcccgttagcaaacacagggatggccacagccttccgcacagccttgatatgctcccaggacgctgcacccgacaggggccccntcngcnccnnggtgcgnccgngcaccgtcagcaactggcagccggccttctccagcatctgggcgtacctcacggtcttgtcaatctccgggaagacacggattttgcacgtgacaggaacagagagtttctcttgggccagcaaaactctcttgnctatcatctgtgtgcagcccaagttcagtgtnaatggcgtcacagtaatcctgagccaggagagccgcctgaacaaacacctccgggtcattggcacagaactgcacgatgaggggccggtcctcggggcacacctcgcagtacangttctccttccggtagttggcgtcgcggacaaagacctgggcatgcagcatgggcgtgtagcagagctgtgccccgtggcgccggctcagcagcctccaggccagctcgctttggtccaccatgggggccacgacgtggcgggcccctcgcagggtgcggctccagaactcgaagccctgcagntttggcatcgtctccaggcgcgcgagggccccgccgtgtccgccgcgcgcntttggctccgagggcgccgggtgccggtgtcccgggcccgcccctctccggcctcgccgccgcccggggcccctgcagctcccggggcgccgcgaacgcccgcaccgcgccggggccgccgccgg

SEQ ID NO: 480075 - DNA, 714 bp, Homo Sapiens
ctgcatccacctgctgctctccgggccctggtcgccaccaaggcctcctcccttagaagaaacaggtctggggcagggagcaagctgagcctccctgaagtcccaggtgacctcaatcccctgtaaaggggcagggcctgggctgcacaccttaggatgaagtttgctttcccatggctgggggcgggccatgacagggcctctggattaagccaccctgagctctccctccgctagcacacaagcacagagcgtgaaataaacccatctccagtgcaagtgtgcctcaagggtcagtcttcaatctcgtcctaaataggtggggccctattttttgcttccaacccccattttgctccttaacttttccccattgtccctgtctcccagcccacaggcaggcagcctaattgctccttctgcaaccacgactgcctggccctgggccaagaggcactgaggctggggaccagagacaggggcctgaggaaggctgtagagggtggggcggaactcctcctccgaacgcctcctgcagtgtgctggactctagggaaaatggccagtgagcctgcctcccccagccacctaggggactcctgggagggaaaggtcccagacctcaggcctgtgggcgggcgggaatgtgttttaagagagggggtcagtccccctcgtgccgatacaccaccggcctcgtacctagcctaagtt

SEQ ID NO: 480076 - DNA, 1107 bp, Homo Sapiens
  misc_feature (8)..(8): n is a, c, g, or t
  misc_feature (17)..(17): n is a, c, g, or t
  misc_feature (26)..(26): n is a, c, g, or t
  misc_feature (32)..(32): n is a, c, g, or t
  misc_feature (38)..(38): n is a, c, g, or t
  misc_feature (42)..(42): n is a, c, g, or t
  misc_feature (48)..(48): n is a, c, g, or t
  misc_feature (50)..(50): n is a, c, g, or t
  misc_feature (59)..(59): n is a, c, g, or t
  misc_feature (70)..(70): n is a, c, g, or t
  misc_feature (87)..(87): n is a, c, g, or t
  misc_feature (94)..(94): n is a, c, g, or t
  misc_feature (96)..(96): n is a, c, g, or t
  misc_feature (119)..(127): n is a, c, g, or t
  misc_feature (145)..(145): n is a, c, g, or t
  misc_feature (175)..(175): n is a, c, g, or t
aaaaaatnttcccaagnagggccatnaatttntctttntttncaattncnacaataatntgaaggggggnatttttttacataaatncttgcancncctccagtcccctcactgggggnnnnnnnnngcatctctcaagtctttntccaactttggctgctcagaccgatggctngtgacagtcactgcaggggttcaggagtggaggaccttgtgtcaagcagaacacacgtgtctgcatgggtcagttgtgcatgtgcttcctgggtggctgataccactgaaggccagtgtgcaggagcattggggtgactcagggttcagtccagagccaggagtggctgggtgttctcattctctcccttctcctcatgtttcagggtcccagcttctaccacagactgagatcttttcatcagcttgggtgagcattctctctccagattcgaggacgtatgcttcacgtgcattgcattataggatgtgtgagtatagtcattttcatcgctgtattcggtcctgagttacgtccgggcccaagttcccatgtcataaggaggaagagttcctcctaattcagagggctataattcagggtgtattagtctggtgaaggctgttttaaattgtttccatgcaggcaaatccgtttcctggtcttgtctttaagaaatggcttgatgagttgtgtagagggcatgaatgtaccagggctggttgacaaacgtggactcctccaaatgcgggcaggaaagctgtcctgcaaccgttcaatggccagtttaaggattgaaggtgtcagtttggaggcttgtttgaaggaaaaattactccagtctataattaaaatgaagccatttatctgaagctccggatcttcgattaggacttccaatgacagcaggatggcacgaaggatgtctgtgaaggagttccttcacacggccgcccagccttgctttgggaatgtatttctgcaggtgtcctcgctgctgaactgggtgggtgagatcccctattctggcaggttcgggctcagatttctctagaaagctgtgaatgagagctcgggctccacaaggggctgtgattttggtagaagccgct

SEQ ID NO: 480077 - DNA, 581 bp, Homo Sapiens
  misc_feature (44)..(44): n is a, c, g, or t
  misc_feature (46)..(46): n is a, c, g, or t
ttttttttgcaaaacattacacaattttttattattaaatgagnanttttatttgttacatcgtcacattgctagtcagagaaatgttgcagtgatgaagaaagtcaatgttggaccaacccaagtcctcattcctacaacattcatttacaaagaaataatgttcaacacagcccaacaagacattcttggttttcttcatattgattttccccaaaaaatcctcttctaatggggtgtttcacttcataaattatagttcttcatttttacaattcaccccaaactgtatgagagatgtatcacactaaggatttctaaaggctgttagggaaatccttcacacatcgtcggtcatctgatgtatcactgctacttgtctctgtgtcatcattctcagttgtgggtttgaaagtgctgttcttccacggtccaaacttgaagtcacagatcaagccatttttcaaaataccatttttttctcagaccattcttctgtaactgttcactaataacttggaatttccctccctctccatgcagctttgaagagtctttaatccaagggaaacctacagttc

SEQ ID NO: 480078 - DNA, 482 bp, Homo Sapiens
  misc_feature (137)..(189): n is a, c, g, or t
  misc_feature (280)..(338): n is a, c, g, or t
aagattctgaacttttattttctggcatgaaaagtacaaataattaaacaattccatgtaaaagtctgttaccgcggccaggcctgtgatcccggtaataaatagtctaaacgcaacgcgaagtgttcttgttgggnnnnnnnnnnnnnnnnnnnnnnnnnnnnnnnnnnnnnnnnnnnnnnnnnnnnnacagttttttatcacctccaacatggactctgtcgtgatttgaaaccttccgaataaataacaggatgaagggaggggtggaggggctgannnnnnnnnnnnnnnnnnnnnnnnnnnnnnnnnnnnnnnnnnnnnnnnnnnnnnnnnnntcgcctgggagccccggcctggccccctgcggggaggggctggcctccagggagggggcctggctgggctgagttttgtgttttagaaaaagaagtcccctcccagtcttgggggtggcaggggcctaggcctcggtggggggg

SEQ ID NO: 480079 - DNA, 1136 bp, Homo Sapiens
  misc_feature (946)..(946): n is a, c, g, or t
  misc_feature (949)..(950): n is a, c, g, or t
  misc_feature (953)..(953): n is a, c, g, or t
  misc_feature (958)..(958): n is a, c, g, or t
  misc_feature (961)..(996): n is a, c, g, or t
  misc_feature (1001)..(1028): n is a, c, g, or t
ttggctcaccttccggggcagctggggcggccgcggcgcttccgatcgcgacgcggcttctggcgcggaggcgccgatgcagccgggcttccccgagaacctgagcaagctgaagagcctcctgacccagctccgcgccgaggacttgaacatcgccccgcgcaaggccacactgcagccgctgccgcccaacctgccgccagtcacctacatgcacatctacgagacggacggcttcagcctgggcgtgttcctgctcaagagcggcacgtccatcccgctgcacgaccacccgggcatgcacggcatgctcaaggtgctgtacggcaccgtgcgcatcagctgcatggacaagctagacgcgggcggcgggcaacggccgcgggccttgccgcccgagcagcagttcgagccgccgctgcagccccgggagcgagaagccgtgcggccgggcgtgctgcgttcgcgggccgagtacaccgaggccagcggcccctgcatcctcacaccgcaccgggacaacctgcaccagatcgacgccgtggaagggcctgccgccttcctggacatcctggccccgccctacgacccggacgatggccgggactgccactattaccgggtgctggagccggtcaggcccaaggaggcctccagctcggcctgtgacctgcctcgagaggtgtggctcctggagaccccacaggccgatgttttctggtgcgagggagaaccctatccaggtcccaaggtcttcccttgaagccactggcgcccaggagcggtgggccgaagacgtgccctaccctaccacaagggctgtgtctctaccccctagcctgggcgttggatctactggaatgagcagcagccgcttcctcggcagccttgggaagcacgggcgactggacagcagccgccgggcacggttatgggggcggggtgntcnnttnatctntannnnnnnnnnnnnnnnnnnnnnnnnnnnnnnnnnnngttannnnnnnnnnnnnnnnnnnnnnnnnnnntttcctcgttcccgcttcgttaatgcccgcctgtctgcccattctctacaacactaacccctctgctcctcgcacacctacccgctacctctcgatcagccctcgtcc

SEQ ID NO: 480080 - DNA, 1098 bp, Homo Sapiens
  misc_feature (658)..(658): n is a, c, g, or t
  misc_feature (918)..(918): n is a, c, g, or t
  misc_feature (950)..(950): n is a, c, g, or t
  misc_feature (962)..(962): n is a, c, g, or t
  misc_feature (983)..(983): n is a, c, g, or t
  misc_feature (1021)..(1021): n is a, c, g, or t
  misc_feature (1057)..(1057): n is a, c, g, or t
  misc_feature (1061)..(1061): n is a, c, g, or t
  misc_feature (1063)..(1063): n is a, c, g, or t
  misc_feature (1083)..(1083): n is a, c, g, or t
  misc_feature (1085)..(1085): n is a, c, g, or t
cccttacctaagccaactttgtacaaaaaagttggcccttcccatgcaggatgagatgacccatctgttgcatcccggctgctgataaaacaagaccctcggagccaagaaacaacactgagttccagatttcggaaggttcacgagtgttgccgacacgccctcccaactgcagacatcctccctggaggacctgctgtgctcacatgcccccctgtccagcgaggacgacacctccccgggctgtgcagccccctcccaggcacccttcaaggccttcctcagtcccccagagccacatagccaccgaggcaccgacaggaagctgtccccgctcctgagccccttgcaagactcactggtggacaagaccctgctggagcccagggagatggtccggcctaagaaggtgtgtttctcggagagcagcctgcccaccggggacaggaccaggaggagctactacctcaatgagatccagagcttcgcgggcgccgagaaggacgcgcgcgtggtgggcgagatcgccttccagctggaccgccgcatcctggcctacgtgttcccgggcgtgacgcggctctacggcttcacggtggccaacatccccagagaagatcgagacagacctccaccaagtttctggacggctccgtgngacgagaggaagctgacgcgagctgacgcagcgctacttggccttgagcgcgcgcttggagaagctgggctacagccgcgacgtgcacccggcgttcagcgagttcctcatcaacacctacggaatcctgaagcagcggcccgacctgcgcgccaaccccctgcacagcagcccggccgcgctgcgcaagctggtcatcgacgtggtgccccccaagttcctgggcgactcgctgctgctgctcaactgcctgtgcgagntctccaaggaggacggaaagcccctcttcgcntggtgagccgcnccgcgcccgccgccttgcctncagtaaacgcgtttgttccaacccggggccgcggtgcntcctgcgcgtccccccggaggggaaagggccgcgtncccngngcgcgaggccagagaaggcncngctcccaccggtg

SEQ ID NO: 480081 - DNA, 1646 bp, Homo Sapiens
tggaccggtccggaattcccgggatcgcagcgggcactatgagcgggggcgtctacggcggagatgaggtgggggcgctggtctttgacattggctccttctcagtccgcgctgggtacgctggggaggactgtcccaaggtgagccttccagtctcctctccaaatcctaggggcttcggacccttcttcaggctttccagtgacccagggctctcccagatcgcccagaagctctgctgagcgggaatatgggaataaacccaggggcggtctgaggaccctgctgtggggctggacaggggcaagagggtgacctctctccctgccaatactcccccaacccttccccaccaggctgacttccccaccacagtggggctgctggccgcggaggaggggggcgggctggagctggagggggacaaagagaagaaagggaagatcttccacatcgacaccaatgccctgcacgtgcctcgggatggagcggaggtcatgtcgcccctcaagaatggcatgatcgaggactgggagtgcttccgagccatcctggatcacacctacagcaaacacgtcaagtctgagccaaacctgcacccagtgctcatgtccgaggctccgtggaacacacgggccaagcgggagaagctgacagagctgatgttcgagcagtacaacattcctgccttcttcttatggaagacggctgtgctcaccgcctttgcaaacgggcggtccactggcctcgtgctggacagtggagccacccacaccacggccattccagtacatgacggctacgttctgcagcaaggcatcgtcaagtcccctctggcaggggacttcatctccatgcagtgccgggagctgttccaggagatggccattgacatcatcccaccttacatgatcgcagccaaggagcctgtccgggagggtgcccccccaaactggaagaagaaggagaagctaccccaggtctccaagtcctggcataactacatgtgtaatgaggtgatccaggacttccaggcctccgtgctgcaggtctcagactccccctacgatgaacaggtggctgcaccaaatgcccacagtgcactacgagatgccccaatggctacaatacagactacggcgccgagcgactccgctatccctgagggcctgtttgatccctcgaaccgtcaagggcctgtacggggaaacaccatgttgggtgtgggccacgtggtgaccaccagcatcggcatgtgtgacattgatattcgcccgggcctgtacgggagtgtcattgtcaccggcgggaacacactgctgcagggcttcactgacaggcgtcaatcgagagctttcccagaagaccccaccgcccctttgtacccccagagcatgcgactgaaactcattgccagcaacagcaccatggagcgcaagttcagcacctggatcgggggttccatcctggcctcactgggcactttccagcagatgtggatctccaagcaggaatatgaggagggcgggaagcagtgcgtggagcgaaagtgcccctgatgccactcctcccacacacctgctcccaagctcagatggaagtccctaacccccatggcaacattgctactcctcggtccctctgtc

SEQ ID NO: 480082 - DNA, 1318 bp, Homo Sapiens
  misc_feature (149)..(205): n is a, c, g, or t
  misc_feature (1089)..(1122): n is a, c, g, or t
gcccccagagagggaccaaagttggtgaggtggggagggtgcaaataagagctgggaggtcccctctctggcgctgcttcatctgaccactgcgcctatccctgcccttggctgccctgggtccaggaggagagagacaggcagacagnnnnnnnnnnnnnnnnnnnnnnnnnnnnnnnnnnnnnnnnnnnnnnnnnnnnnnnnngagacgggcagctccatctccccaccctcggcactcctaagtccaatagtgcaaacaaagggcggggcaccaaggaaggccagagcctccccgcacctgccctctcctccccatcacggggccccaagaggttgaggaggctggggctgagtgtgatgctctcctgccccttctccagcccccaacatctgtgggcttttacaagctcagcttgtgcccctgcgctggggggagggatggcgagaaaaagtccaaggggtcccttctgccatctgcccgagctgggaagaaactgcaggtaaagtgggtccagcccttcttccataaaagatttccccgcagggacaggcccagggcctctccctccacttctccccattctaggtgctgtatccatttcatgtgacaggtccgtcctaccccctgacttctgccatggcccactctgctctctggggggacctccgatacatttgctggggatggacctcctaggcgggcttgcagactgtccttcctctgagcctcacaaagcggacagtgcggaaagggaaggggtccagatggagggggctcccctctcagtctcagtcctcgacaccaggagctctccacactccctggacctcagcacaggctctgggtcaaggctctccagggtctgggcgcaggcgcctgctccaggctaggacccctcaggccaggatctgttccctcgcacttggggggtgtcaggaggtggtaatgggtggatttagcctttttcctggttggctgaggctcctgttgtcagcggtccctcctttggggccaccgccactgccctctgctcccgacaggctgaggaaggggttggtctgggcagtgaggactggaggtccgcnnnnnnnnnnnnnnnnnnnnnnnnnnnnnnnnnnggccatgagacttgtgttgttgccaagcgagggagccactagggctccagcgggcagcaggggtggagcagacgctgtgggcagcaggccaggggtacccgcagacagcaccggggtggagcttcctgccagcaggctcgcccatgggcagcgacgcgctcgggtcgacgatatcccaaacccggggcggtaccag

SEQ ID NO: 480083 - DNA, 774 bp, Homo Sapiens
gaatcccagtctagaaagaaaggagggtgctttcccctgcccctattatctaaaatatgctgggagctttactcccagaactgcaggaagaatgaaaaagaataggaagggtgtaggggaggttgagggggcaaccacaaacagaatggagatttaaggatccctgtgatccccgagatgaccctgagagcatcgattggggaactagatgaaaattcacagcagacatgcaaattttttgaagaggatgaagagccaggaacagtgaggtcttcaccgaaggagtgaccacttgatctgttctttggctgactgcagcacctgagacacggtctgctccgtaagggggacatcttcaccccttaatgccacccggtgtaccacctgctggggatcactctctaggatcacccctccatctacaatttcatccacagccaagaacagcccctccatgttctccagcagtgctcgcttttctacatttttcctcagcatctggctcaatgagtcgaagagacagttcagaacagccataagcatcagctcattttcataggagctgccaatcacatagaaatagagatctatactgcttttgtataccactgtcaggccttccaagagggcaatttcactgtcagtccgatgggtcttgttgaaaatgttcttctcaaaggccttttgctccttgacactggggtaggtgtcgtcatagtacaaaatcagcgcctccatcttgccccgcagctggtgccgacgtggagccgcccc

SEQ ID NO: 480084 - DNA, 1042 bp, Homo Sapiens
  misc_feature (910)..(910): n is a, c, g, or t
ggggccatggaaacgaaagcggccaagtagagctccgtcctgacgcgccgcctcccgtgggctccggccggctaagccgcggcggacaactatgctgaaagccaagatcctcttcgtggggccttgcgagcaaagacctttatttgcactcattttcacagagtggaaaaactgttttggccaactttctgacagaatcttctgacatcactgaatacagcccaacccaaggagtgaggatcctagaatttgagaacccgcatgttaccagcaacaacaaaggcacgggctgtgaattcgagctatgggactgtggtggcgatgctaagtttgagtcctgctggccggccctgatgaaggatgctcatggagtggtgatcgtcttcaatgctgacatcccaagccaccggaaggaaatggagatgtggtattcctgctttgtccaacagccgtccttacaggacacacagtgtatgctaattgcacaccacaaaccaggctctggagatgataaaggaagcctgtctttgtcgcccacccttggacaagctgaagctggtgcactcaaacctggaagatgacccctgaggagatccggatggaattcataaagtatttaaaaagcataatcaactccatgtctgagagcagagacaggggggagatgtcaattatgacctagccagcctttcacctgggactgccacatcccccggtgaaatcagcatgtttctcggtgcagatctgaaatcacatccagctcctgatgttttcttctccctctgactggagagggagtgttcctacctggaggaaggcacctgtcacacagggcgttcactcagaccatctgtgctctgccctgagttcagttgagaaaatcctattatcaaattttggatttcctggnccccagaaacttcccaaagacctgttaaaatggaggggatttaccacctcacatatgtccagttaaacaagtttggggacttggtaacccgtcgcagcccaattgatacaacagttagttttaatcacgggg

SEQ ID NO: 480085 - DNA, 183 bp, Homo Sapiens
gcaacaaagcgctttactgagggcacccactccacagtcccaaggaggcagacacaggcctgaactgtccaccctctatgtcccgagtggtgactccactccccactgctcagagatcacaccccttctggagagcttgcatcccttctgtcgtcttctcgcagccgtatagtagtagtaggc

SEQ ID NO: 480086 - DNA, 1279 bp, Homo Sapiens
  misc_feature (67)..(187): n is a, c, g, or t
  misc_feature (798)..(850): n is a, c, g, or t
  misc_feature (1001)..(1001): n is a, c, g, or t
ttggggaattcggagcagacgcgaggcccggcgctcgcgccgcgcccgggagcccgggagggagacnnnnnnnnnnnnnnnnnnnnnnnnnnnnnnnnnnnnnnnnnnnnnnnnnnnnnnnnnnnnnnnnnnnnnnnnnnnnnnnnnnnnnnnnnnnnnnnnnnnnnnnnnnnnnnnnnnnnnnnnntcccctcccccgctgccgggccgtgatttgccgggcctgctgcgccccccgcccaccccttgcctcagccgccgcctcgccgcttcccctcgtcggagcggccgctcgtccgcccggcttgaggcccgcggggagcgcggcgcaattcgtcggcccgcgggggggcggcctcccggcatcttcgcggcgaccaggactaccaggaaagggagcggctgggatggcgcgtccgcggccccgggagtacaaagcgggcgacctggtcttcgccaagatgaagggctacccgcactggccggcccggattgatgaactcccagagggcgctgtgaagcctccagcaaacaagtatcctatcttcttttttggcacccatgaaactgcatttctaggtcccaaagacctttttccatataaggagtacaaagacaagtttggaaagtcaaacaaacggaaaggatttaacgaaggattgtgggaaatagaaaataacccaggagtaaagtttactggctaccaggcaattcagcaacagagctcttcagaaactgagggagaaggtggaaatactgcagatgcaagcagtgaggaagaaggtgatagagtagaannnnnnnnnnnnnnnnnnnnnnnnnnnnnnnnnnnnnnnnnnnnnnnnnnnnngtcatatacttcaaagaaatcctctaaacagtcccggaaatctccaggagatgaagatgacaaagactgcaaagaagaggaaaacaaaagcagctctgagggtggagatgcgggcaacgacacaagaaacacaacttcagacttgcagaanaccagtgaagggacctaactaccataatgaatgctgcatattaagagaaaccacaagaaggttatatgtttggttgtctaatattcttggatttgatatgaaccaacaccatagtccttgttgtcattgacagaacccccagtttgtatgtacattattcacaattccctctcgggttgtgttttcggggggaaaaagaactttttagcccttttttaaaaagttacgggatttaaatttcatgttattttgggttgcatggaagtttgccccttaaa

SEQ ID NO: 480087 - DNA, 890 bp, Homo Sapiens
  misc_feature (37)..(37): n is a, c, g, or t
  misc_feature (41)..(41): n is a, c, g, or t
  misc_feature (105)..(105): n is a, c, g, or t
  misc_feature (667)..(745): n is a, c, g, or t
ttttgaaacaggagtgctttatggtctgagtggagtntttnggaggagtgcctcccggctcctgccttcgggctcacctgagcgggcgcgtagggcaagcaggtnccggggcagcgcacaccccacagccaagcggcccctgcccagcctctgtaaacagacccccactccctgagaaacactggcggctctgccccgagagggccagggtgtccaccgagcctggctgaagccagctgtcccctcccttcttgcagagcaggctcacactgggcctgaaggcccagcacctgcagggcccagcctggggaccaccaaatgcaccggcctcttccagctcagaagcagcacacaggcaagccacggggcagcggcaaaggcgatggtacagaggcaaatgcctccccaggcagtgacaggcacgcacacccacgcaccacagggcaggccactgcccacgcacaggcactaagagcatccatcgtaagtcagccacaccccaagggtggcaggcacgcaccaggggccccagcacacacacacaggaaagcactccagcatcatcaggcagccagtcctctcacactgctagcgcagggggcacagctgcatagcacagcacagtcagcacagctcactcaattgccctcactccttcgtccttgcnnnnnnnnnnnnnnnnnnnnnnnnnnnnnnnnnnnnnnnnnnnnnnnnnnnnnnnnnnnnnnnnnnnnnnnnnnnnnnnagagggggttttgccctccttaccttcctcactgctctccttgggtccggcctcctccagccccagcccgaagaggtccgagtcattcttcagtctgaaggcggggagagggagcttgggggtaagggcaggcgcggcaggcctt

SEQ ID NO: 480088 - DNA, 124 bp, Homo Sapiens
actagggaaaatataagcattttgaacaacctcaagttaccgatatggtgacattatgtgtatatattcatgggtgtgtttgtattgtttgtatatctcatgcacttaagacgattctatagcc

SEQ ID NO: 480089 - DNA, 354 bp, Homo Sapiens
  misc_feature (250)..(275): n is a, c, g, or t
  misc_feature (334)..(334): n is a, c, g, or t
atttcttaactttttattgacattggcaaattaaaatagaataaattaacaagtattttttcaaaaaaatgttttgtacaaaaatactgtcaaaatttcctaaaaagctttcaacacagtagtatcttttcatgtactgaatataactattagcacagtgtcaaaaatgttgaagacagaaacaaaataaaaatctgtgaaatgtttgccactgacggcattccacaccctattatcatctgtacatatnnnnnnnnnnnnnnnnnnnnnnnnnncagccaacttggaagtgaacagtatgactttcctgatccagaacagtttggcccacatntgtttaatcttccagtttag

SEQ ID NO: 480090 - DNA, 356 bp, Homo Sapiens
  misc_feature (41)..(41): n is a, c, g, or t
  misc_feature (105)..(121): n is a, c, g, or t
  misc_feature (134)..(134): n is a, c, g, or t
caccattaacgtcatatttattgttatttaactgctcaggnaaaacatatacaggtatatacaatatgcaggaatacagaagactgcactttacatatttttttnnnnnnnnnnnnnnnnntaacactcaattncatgagctattgtcacagtcttccaaccaagcatttcagaaatgaatttcttttaagagtcaaaaaagattacaggattgcctaacacacagcagagttaagttttcatattttacatgtgcaataacattttcgttttctttcccaaagagtttgctatgcagtactgattaccagtgttcggagtctagtgtgtagggtgtgtttttcatttacttttat

SEQ ID NO: 480091 - DNA, 706 bp, Homo Sapiens
  misc_feature (209)..(209): n is a, c, g, or t
  misc_feature (218)..(218): n is a, c, g, or t
  misc_feature (225)..(258): n is a, c, g, or t
aaagcaagcccgttagatttactagggtcatgtctgcaggtgaggtaacagcccacccatacagaatttccacgggcagagatgccaccgcagcatcacggtcagacaccaaagcagcaggagggctcaggaagtggctttggaaagttctcgtgaaaatcaaagggcagctttggtgctcagagattcaaccagaaaaactaatacanaacccaacnccataannnnnnnnnnnnnnnnnnnnnnnnnnnnnnnnnnaaattgcaaaataaaagcccaagaaactaaccaccgatctgcacgtcagtggctcaaaaagtgttagcatagagaaaggcaaaaccatctgtgggggtgatgcatactcaagggggccggcatttcagtagcagaaagagtatttacatggaacccctatttgaaacctcacaatactaggaaaagctaaacacagacaatgtatgtacaagggaagacagtaagtactcttgcgtgacgattgtcagacacagacatttcactgaaaccatccatagctttagagaacactgcattctatctagactgggttcctgcttgcctgcaccccagccaggcgatctcaggctctggaccgtatgttctcccccacctggcctcttcccggagagagcaaacactaagatgttggttgcagcataaattgcaggaatttaaaggtggggca

SEQ ID NO: 480092 - DNA, 531 bp, Homo Sapiens
aactgttaaaaatgtttttattttttagtaagcaaaattttacgaaaagtcagattcacccgtggagccagaaccttctttctcacgggaagactgtggtaccagtgcgtgttggtcgggtggttcatcattagtaagctcccgtgggccagcggcagcctgaccaccgccaccctcctggaggggcttttcccacgggaatccttatgccggaagacacagctggctcttctccagttggctcttgctcctcctgctttctcaaaaggcccccttgagccccttttaccaggaatctgtccatcctgtccccacaggaaagaagggacgtcagtggcgaggccaagacagaaattgctcaagttctatccccagtgcaaaaatctgtttgtccaaggggtctcacagcaacattcctagtttcacattttcattttaaagtttaaaaccatgtcctcgctgccccccaccagtgttaaaatagatcagtctagtgatgctcaagtggatacgattcagaagcgagacgca

SEQ ID NO: 480093 - DNA, 441 bp, Homo Sapiens
ttaactgttaaaaatgtttttattttttagtaagcaaaattttacgaaaagtcagattcacccgtggagccagaaccttctttctcacgggaagactgtggtaccagtgcgtgttggtcgggtggttcatcattagtaagctcccgtgggccagcggcagcctgaccaccgccaccctcctggaggggcttttcccacgggaatccttatgccggaagacaaagtctctgcaggcaccgaaggagacagagctggctcttctccagttggctcttgctcctcctgcttcctcaaaaggcccccttgagcccctttcaccaggaatctgtccatcctcgctgccccccaccagtgttaaaatagatcagtctagtgatgctcaagtggatacgattcagaagcgagacgcaaagaggttaaacacgggtaaaccctcgtgcc

SEQ ID NO: 480094 - DNA, 1011 bp, Homo Sapiens
  misc_feature (920)..(933): n is a, c, g, or t
ttgggctggttaaacaaacacgtctgcagctggatttagcttgcaagctgccaagttgcaacctctttcattctagaaacttctgtcattttcatcatagcaagtctatgcggacaaaagcctccaaactttccaactgtgtaggccagtacagctggcaaggttcatagaatataatggctatccccctctgccaaataagactatccacaacccagctcagacacagtggttatatgattttgtgtccatacaggagaggccttggtgtcttcacatacattctctgagccaacatctatccagcagccctgacctcctgctataatttaagtctatttccttttaatctaataagagttgatagtaaaaaggcaggtgatggaaatcagtgtataatcacaatggagtatattggcaactccacagcttatagtttgataaaggcaaatacatgaaaaataaaaatgctactaatgccccaaggtgtctatcaaaatgatgtagggggtatcttaaactgtccaaggcaatcatgcattgaactttattcctatgcagagcccaaacgaatagtgttgataaaatagctaaactttctaaactggagaggaggctacagtgccagagagttattgtctcttttgctttaaatggtaatcttaaaagttgcattgtgctcttcctttgttttgggatagatatatatagagagagatactataaggaagtttatttcttaaggaagtgcactgcataatgtatttcttttacagtgtaatatgggggtggggatatgcgaaagaaaatgtgtatttttgctagttgcctacccttctgagataaataagcaccatcttgccatggatcccataacccagttaggtactatagattagtatttaagtttgctgtagatnnnnnnnnnnnnnnctaagtaaaagttccactgattcaccattttagtattaacccatgttgcaaagctgtactagccaaccgtggactagt

SEQ ID NO: 480095 - DNA, 903 bp, Homo Sapiens
  misc_feature (542)..(600): n is a, c, g, or t
gctcgcctgttttatctaggtagagtcgcgctggggtgataaaaggtggtgcggtgagaaagagctaatagtctcctcgtggtggcgcggaaagatttgtctcgaagcagcgcgagacgcgtattagttcgccgcggagtgggttcgtcacgccacacagtagtagacaccccgtgcagaaggtgttggtgtaatagtctcgcccgttgagaggccgtgttattaaaacctctgctcaaaggggagcgtgtggctcgcccacaaaatgtggcgcgcccgcccccaccagggaggaggaatgggtgtctctcttcaccacacagagagtgcccacccggctgagccacaggtgtttttccccaccctccagcctgacccctgtggttgtaaaacccaggcggcgcccgtgccctgtggttataaataccgccccccctatatattggggccccccttgtgtgacacaaaaaacggggggacgcgcgggaaaattgggccccccccgagggaggaaaactttttgagcgccgccgccccccccnnnnnnnnnnnnnnnnnnnnnnnnnnnnnnnnnnnnnnnnnnnnnnnnnnnnnnnnnnnattacttgttacataaactacctttaactttaaattaaaaccaggaaagaccctttcccccttacacaccagcacatgcacacacgcacacccacacccgtccctcccttgtcggctgtcgtgcccatggccacctcaaacacccgaggttctcattgtgaccaacctccctcaaacactgtagacccccgtgcagagtccagttggccacgcatcccggttgctggcagaacatgggcccacgcgtcacgcgaacgcgtgggtcgacgatatcccggaatatccggagcgtaacagccttgg

SEQ ID NO: 480096 - DNA, 322 bp, Homo Sapiens; identical to SEQ ID NO: 177461

SEQ ID NO: 480097 - DNA, 194 bp, Homo Sapiens
atttattgaatgcgtttattttaacaaccaaaaaattctaacagcctaacaatgcacataagttaaaaattaattatcacttagtgataacaaagatagttgatttacatggaaaaaagaacatttacaatatgttaatccttattcacattgttgataccgcaataaaacacaatttgtttttttcatttcac

SEQ ID NO: 480098 - DNA, 787 bp, Homo Sapiens
  misc_feature (123)..(178): n is a, c, g, or t
  misc_feature (309)..(355): n is a, c, g, or t
  misc_feature (446)..(473): n is a, c, g, or t
ccggtaccccccagatggaatcccatccctgtgaagagagcgttgtatatgatttgtattttttaattcattttaatctacaggttggaatctaatttttaaattttattggaactcacattnnnnnnnnnnnnnnnnnnnnnnnnnnnnnnnnnnnnnnnnnnnnnnnnnnnnnnnnacctttgaccagtgtcttccaagtagtttggatcaaagaatttaataggtgttttccaaaacacagtcccggagtgtaaagattggaaagccccatggccttgccctgtgtgtatgaagtgtaaatctggnnnnnnnnnnnnnnnnnnnnnnnnnnnnnnnnnnnnnnnnnnnnnnnagatcagacagtgatcactctgaaagattgaagcccaagaatttgtaactatggtatttactgtaagctgtagaacactcaataactattnnnnnnnnnnnnnnnnnnnnnnnnnnnngtccttaggtgaactagactgagtggttccttggggagggaggcacagaggactgtccctgggccagtgagtcccttgggcgtctccccaagttgatgcctaaatttgttctcagtagtcaagaaaaacctatggtacatcttacagctgatctgacaggggtctgccctaagggtctcacagctgctggggagctttaagtggcaacttcagcacccaccctaagtgtgtgatgtgggagcacagtgaggccattcagagttgaaatccattgagccatccgcgcaataaagctgacatctattgaaaaaaaa

SEQ ID NO: 480099 - DNA, 822 bp, Homo Sapiens
ttatcgtgttcttattactcatctgccttagaattaggcccccccggtatgtgggcaagatctaggtcccggggccagcctggatgggttatccgcgatggaagcgctctcccccagcctgcccaccctcagggacagtcataagcccatagctcggttccaggccctcgccaacccgcgttcaacaggctgccaggtggggagtgggaagcgcccagacaccactcgggccccagcaggcagctctgtccgcagcttgtcctccagcagcgggagcttccagagatccttgcggcgatagcagacgctgccggcacagccggccctccaggcgtgcagccgcgccagcgccaccagccaggggttcagctcgtagcccacggccgggcggaggccgcacctgtgggccgccagcacgatcctgccgtcgccagagcccagatccaccgtttttccggggcgtcctcgcagcagcgacaacacgtgctccacctgccgcgcgctcgcgccgacgtagggcacctgcagccgcagcggcacgcgccggaagccgggctggagcagcagcgcccacaccgcgtaggctgccaagcccgagccggccgccgcctgcagcagctccagcgcgcccagccgccgctcgcgcagctccgtcagcgcctcgacagggtcgtcctgctccatggctgcgggacgcgcggctcgtccgcccaaggtccttcccggctcgggtccgcggccctcgcagcctggcctggggctggcggtgtgccctctgcctcctgccgggagccgccgcgcgacaccggaagtggccccgct

SEQ ID NO: 480100 - DNA, 408 bp, Homo Sapiens
  misc_feature (92)..(141): n is a, c, g, or t
  misc_feature (257)..(343): n is a, c, g, or t
cctgcacctcaggggtgaattctttgccgaaatggattgccaaaacggtcaccagcacatttcccaggagcttgaagttctcaggtccacannnnnnnnnnnnnnnnnnnnnnnnnnnnnnnnnnnnnnnnnnnnnnnnnnatcatccaggtgctttatggcatctcccaaggaagtcagcaccgtcttgccatgtgccttgactttggggttgcccatgatggcagaggcagaggacaggttgccaaagctgtcannnnnnnnnnnnnnnnnnnnnnnnnnnnnnnnnnnnnnnnnnnnnnnnnnnnnnnnnnnnnnnnnnnnnnnnnnnnnnnnnnnnnnncttgtgatagtagccttgtcctcctctgtgaaatgacccatggcgtctggactaggagcttattg

SEQ ID NO: 480101 - DNA, 428 bp, Homo Sapiens
  misc_feature (2)..(2): n is a, c, g, or t
  misc_feature (8)..(8): n is a, c, g, or t
  misc_feature (28)..(28): n is a, c, g, or t
  misc_feature (47)..(47): n is a, c, g, or t
  misc_feature (52)..(52): n is a, c, g, or t
  misc_feature (63)..(63): n is a, c, g, or t
  misc_feature (94)..(143): n is a, c, g, or t
  misc_feature (187)..(187): n is a, c, g, or t
  misc_feature (232)..(345): n is a, c, g, or t
  misc_feature (388)..(388): n is a, c, g, or t
  misc_feature (416)..(416): n is a, c, g, or t
ancctgcncctcaggggtgaattctttnccgaaatggattccaaaanggtcnccagcacattncccaggagcttgaagttctcaggatccacannnnnnnnnnnnnnnnnnnnnnnnnnnnnnnnnnnnnnnnnnnnnnnnnnatcatccaggtgctttgtggcatctcccaaggaagtcagcaccntcttgccatgtgccttgactttggggttgcccatgatggcagagnnnnnnnnnnnnnnnnnnnnnnnnnnnnnnnnnnnnnnnnnnnnnnnnnnnnnnnnnnnnnnnnnnnnnnnnnnnnnnnnnnnnnnnnnnnnnnnnnnnnnnnnnnnnnnnnnncttgtgatagtagccttgtcctcctctgtgaaatgacccatgncgtctggactaggagcttattgataacntcagacggttcc

SEQ ID NO: 480102 - DNA, 438 bp, Homo Sapiens
  misc_feature (89)..(169): n is a, c, g, or t
  misc_feature (241)..(241): n is a, c, g, or t
  misc_feature (285)..(334): n is a, c, g, or t
  misc_feature (378)..(378): n is a, c, g, or t
  misc_feature (407)..(407): n is a, c, g, or t
  misc_feature (418)..(418): n is a, c, g, or t
ggaacgtctgccgttatcaataagctcctagtccagacgccatgggtcatttcacagaggaggacaaggctactatcacaagcctgccnnnnnnnnnnnnnnnnnnnnnnnnnnnnnnnnnnnnnnnnnnnnnnnnnnnnnnnnnnnnnnnnnnnnnnnnnnnnnnnnntgacagctttggcaacctgtcctctgcctctgccatcatgggcaaccccaaagtcaaggcacatggcaaganggtgctgacttccttgggagatgccataaagcacctggatgatnnnnnnnnnnnnnnnnnnnnnnnnnnnnnnnnnnnnnnnnnnnnnnnnnntgtggatcctgagaacttcaagctcctgggaaatgtgctggtgnccgttttggcaatccatttcggcaaaganttcacccctgnggtgcaggcttcctggcaga

SEQ ID NO: 480103 - DNA, 413 bp, Homo Sapiens
  misc_feature (83)..(169): n is a, c, g, or t
  misc_feature (285)..(334): n is a, c, g, or t
  misc_feature (378)..(378): n is a, c, g, or t
  misc_feature (388)..(388): n is a, c, g, or t
  misc_feature (401)..(401): n is a, c, g, or t
ggaacgtctgaggttatcaataagctcctagtccagacgccatgggtcatttcacagaggaggacaaggctactatcacaagnnnnnnnnnnnnnnnnnnnnnnnnnnnnnnnnnnnnnnnnnnnnnnnnnnnnnnnnnnnnnnnnnnnnnnnnnnnnnnnnnnnnnnntgacagctttggcaacctgtcctctgcctctgccatcatgggcaaccccaaagtcaaggcacatggcaagaaggtgctgacttccttgggagatgccataaagcacctggatgatnnnnnnnnnnnnnnnnnnnnnnnnnnnnnnnnnnnnnnnnnnnnnnnnnntgtggatcctgagaacttcaagctcctgggaaatgtgctggtgnccgttttggnaatccatttcggnaaagattcaccc

SEQ ID NO: 480104 - DNA, 573 bp, Homo Sapiens
  misc_feature (404)..(490): n is a, c, g, or t
tgtgatctcttagcagaatagatttattatttgattgcttgcagaataaagcctatccttgaaagcgtctgcatcatgggcagtgagctcagtggtatctggaggacaggcactgccacttcagtcaccatcttctgccaggaagcctgcacctcaggggtgaattcttttgccgaaatggattgccaaaacggtcaccagcacatttcccaggagcttgaagttctcaggatccacatgcagcttgtcacagtgcagttcactcagctgggcaaaggtgcccttgagatcatccaggtgctttatggcatctcccaaggaagtcagcaccttcttgccatgtgccttgactttggggttgcccatgatggcagaggcagaggacaggttgccaaagctgtcannnnnnnnnnnnnnnnnnnnnnnnnnnnnnnnnnnnnnnnnnnnnnnnnnnnnnnnnnnnnnnnnnnnnnnnnnnnnnnnnnnnnnncttgtgatagtagccttgtcctcctctgtgaaatgacccatggcgtctggactaggagcttattgataacctcagacgttcca

SEQ ID NO: 480105 - DNA, 871 bp, Homo Sapiens
  misc_feature (367)..(416): n is a, c, g, or t
  misc_feature (752)..(799): n is a, c, g, or t
  misc_feature (806)..(806): n is a, c, g, or t
  misc_feature (818)..(818): n is a, c, g, or t
  misc_feature (851)..(851): n is a, c, g, or t
ggcaatggcataattatttgaacagtgacagatctcctcagaatgaagaataaagcctactaggtctctaactgttgaactcatgaaagaagatagtgtatgagacttaagccatgagttttgtatcatttcaattagaagactactagctgtgagctcagagtttaatgtaaatgaatctagatgattttgaagaaatgattattcgttcaccagatcactcattgtacattctaaaaagctcaaatgagtcttctagatactcttactcatcctgtctggttgctatgtttaaaattatgtggtgctgtgtaggtgaaactttaagaatatttttgaagcatatgtaatatatgcactgctattnnnnnnnnnnnnnnnnnnnnnnnnnnnnnnnnnnnnnnnnnnnnnnnnnnagagcaagagagaggaaactcaaagaggagtgtttgtcttaagacctgttcatactggtatattggtgagacttctcacttctggttggaggtttcacatatggctcaactcaagtcattaatctctttttaatttttactcttgaattccttaaacttcgctcattatgaaatgttttaaaattatgacaaaaattactctgtctaaccacttgccttgtctgctaccagtttgttaaaaattattccccccaaccagtaattccaccagtactacttgatttgtgttatatttcctatgtacatgtacagcctttgttttgcttgcttgtctannnnnnnnnnnnnnnnnnnnnnnnnnnnnnnnnnnnnnnnnnnnnnnnagaaggnatatacagaagnaaaatcttgtcttctctgctgattctttaattnatatgagccggatactttcg

SEQ ID NO: 480106 - DNA, 857 bp, Homo Sapiens
  misc_feature (300)..(409): n is a, c, g, or t
gtcagtgcttctgggggtcccattcctctccacgagggtaagagtctagctcttcatctgagggtgcaaactccttttgaagatcatgacatagcgacagtcatcatcttccccaaaggagaaggatgtcaggccagccacttccaccacatcatgtagtatgctcctctcgatcttgttcattggctgaaactttttcttgatctggccactgtcttgaatgaaatctcacacctccttctccatccttttacgaaactccactttctgttgtttctcttgctcttgtagtttcttcannnnnnnnnnnnnnnnnnnnnnnnnnnnnnnnnnnnnnnnnnnnnnnnnnnnnnnnnnnnnnnnnnnnnnnnnnnnnnnnnnnnnnnnnnnnnnnnnnnnnnnnnnnnnngtgtgatcactgcatcaatgagcgccccagccccggactgtggcctccctgaggggtacccctggtccctaacggttgttcaagaaacaaggggacgaagcgtaggcaaccagcggcccttgaatacttggaaggcgtcctgcctgctctggtccccctggggcacgtggggagctgggacagggctcgtccgtggtcaaggtccgcaggtttgggagttggggtcctgcgttccgccagtatcatcccaagctgcaacacgagcagccccggggaggctcccaccgccctgcagggccgcgccctacgccggccgccgaactccagcccacccgcagggaagctactccgagaacgcaggcggagacagtggccaatcggacccggcgggtattctcatccctccaatcaacactacgatccgcccgggcagctcgggaatttaagc

SEQ ID NO: 480107 - DNA, 1182 bp, Homo Sapiens
  misc_feature (1023)..(1046): n is a, c, g, or t
gctggcacggtccgcgattcttttccaggccaggccagcctcggagtttcagggagctgggagctggagggaaaccacgccacgaaagctatcgcgccacagagggcgacgggggctcgggacacctgacagggcttttgcgcacagctgccggctggctgctacccgcccgcgccagcccccgagaacgcgcgaccaggcacccagtccggtcaccgcagcggagagctcgccgctcgctgcagcgaggcccggagcggccccgcagggtaccctccccagaccgcctgggccgcccggatgtgcactaaaatggaacagcccttctaccacgacgactcatacagctacgggatacggccgggcccctggtggcctctctctacacgactacaaactcctgaaaccgagcctggcggtcaacctggccgacccctaccggagtctcaaagcgcctggggctcgcggacccggcccagagggcggcggtggcggcagctacttttctggtcagggctcggacaccggcgcgtctctcaagctcgcctcttcggagctggaacgccctgattgtcccttacagcaacggcgtgatcacgacgacgcctacattcttgggacagtacttttattctggcgggggtggcagcggtggaggtgcaaggcggcgcaaggagccgcgtcaccgaagtatcccgaagggcttttcccactggtttttttcaaaaccctggtaccccccttttaaatgatgcacccattttgaccacccccccaaaccgttggccctggggccccctatcactaggcggcttatctttgtatccaaatccccgcccatcgcaaccacacctgtgcgcatactcagacccccccagaccctctctgaacggcccacatttcccaactattgtaccccccactcccatctgccctcctcacccaaattgaataaaattctcacccctatatcgcccccctttctccccaacctattttgacagccccattcgcatgggtatnnnnnnnnnnnnnnnnnnnnnnnnttcctgtttccctctccccaccccgctacacactatattcattcatgccaagattcctatattccacccaacgaaggtgttttctacactcctaccaccaccagcttttattcgggccccctcctcgaccccccca

SEQ ID NO: 480108 - DNA, 1002 bp, Homo Sapiens
  misc_feature (844)..(926): n is a, c, g, or t
ccaagcccagtagagctggctggtggggcctgatctcggggtatggtttgggaagacccaggaccttggtccaagcaggatggagaagaggccgggggcggcccctggggtccccaaattagcaccaggaggaaggagggcccagtgggggcgggagctcgggacaaggagtggctcactcggtccctgccctgtgcagggggcaggtcaatgacccctggttcgccccgtctagaagatagcccaggggttaccggcccctcccgggtgggggcatgtccccggggttccccctcccccagactccattgtccactggttgggcccacacagggcataggggcacagcagaggggcctgtcctccacccaagacctttagcccccaaagaggcacggcctcaccccaactgcctgagattggggggccagcgccttggccagggaaccccatagagcctcacttccagggcctgagcaggcctcagtacccacccccggctcccggggccctctctggcggggtgtcccctcagagaaaggcacaggtaggaggcccagagggtggcaggctggcctgggccgcgtggaggctgcgggtcccacccgccaggaccccggtgggcgcgagccgcgtctgtgaagctgccgtgaacatggggggtccttgtctcgggaaaagcgggtctgtcctgtctctctcctaccaggcacaagtgcacggctctggttcggggggagtgttggggcgtggtgacgggtgggggcccctgtccctctttccagcgaaagaaaactcggaaggaacatgtaacaacacgccaagtcctggacccgtgaggctnnnnnnnnnnnnnnnnnnnnnnnnnnnnnnnnnnnnnnnnnnnnnnnnnnnnnnnnnnnnnnnnnnnnnnnnnnnnnnnnnnncggctcacatgatggagcagcatttacaacggtgcttcttcatgtcgaggtcctgggggtcgctggtggtggcctc

SEQ ID NO: 480109 - DNA, 663 bp, Homo Sapiens
  misc_feature (179)..(187): n is a, c, g, or t
ttttcaggcaggcctgagcaatctttattctgcagagggacaatgaccacagatccatacaccacgtggagaccgaggggcggggagccaggggccagtctttcaggggtgggcaggtccaggcggtgggcaaagcctcgggtgggtgaggggcaaatgggcaaacaggcaggggcctnnnnnnnnngatgaaccacacagcaggggtgctgggagctgttccccaccctcccccatcccaccagccagcacccagagggacaaccctaacacgaccggcccaggatccacccaggggcagagtaggtgggttggtgccctttgactaggggggcacatgcctgcccagcccaccacggtagaggcagtttatttcaggaaccaggagctttttgggcagggcctgaccggggccccccgactcccaggccgagcccccctactgttggttcagaagccgaaggtttcctgtgaggcgtagaccatatataggaagccgtcctcgtttttctcctgctcgtagatgtccgggatgggcgtggacacacttaccatgctgtgttggtttaccagcaagaataaggcctgcgttgtgtatatcatcaagcgtgtcctgatgatctatactaactatgtcatgttgacatggtcctggaccaaata

SEQ ID NO: 480110 - DNA, 283 bp, Homo Sapiens; identical to SEQ ID NO: 436896
  misc_feature (119)..(136): n is a, c, g, or t

SEQ ID NO: 480111 - DNA, 323 bp, Homo Sapiens
cttcaattgatgcaactcagtaatttttattgcaactggaagacaatacatcacagaaactttatggtaggtctggggaaaagtgttatttacaataaatgatgaaatagtttgtctttggcaatatgattacatacgaagaatgcaaaatgcaggtatggatgccttccaagcaacaccaagtccctagagttcggctgatcgcgcctgcctccacactgtttctttaggtttacatgaacataacagaacatcacgttctttctcctttatggttctccctttctattcatgatattggcagtttcatacagaaaatacag

SEQ ID NO: 480112 - DNA, 421 bp, Homo Sapiens
  misc_feature (224)..(248): n is a, c, g, or t
tctatagctataaatctttaaagagaaatatgaatacaattcccctaaactctcctcaaaagagaattcagtctacagccatttaaatgatcattgctgctacagaagtgctttaagagaattgcctgaaacatctgtattatatcggccacctgccaatcacagctttactctttcaggtcactctggggctgcctcttgcatgtattactaaataaaatgannnnnnnnnnnnnnnnnnnnnnnnntttctaagaaacaattatgtgcactttgatacacaaccttctctaaccaactatatatcaagacccaaaaattgaaggaaaaatattgttttctcatacagtgaggcaggatttttcaatctacttaattctgtggacttgtcttggtgtgctaggctacaacttctctttgg

SEQ ID NO: 480113 - DNA, 756 bp, Homo Sapiens
  misc_feature (174)..(174): n is a, c, g, or t
  misc_feature (455)..(455): n is a, c, g, or t
ggggagattcccaacccttttccctgccccgggttttcttagggaccaggtttggccctgttccctttcccttatggggccccggcggcccaacggaatggtttagaaaagtttttcggggggcccgaggcggccgcccaagtttacgccagactgttcagtgttgtttgtttngggttcagactccatttcccttttattaaagtcccaagttacccattacatggctgtgttattcaataaaggaaaacttgttcaaataagggtaatatgttatcatcagtatttccaggtaactgttcacactcaagtagcaatgtcaataaatccttggggaagcccatcttaacaacctctaggatacgaactgtactagcaaaatcatttagccgtctgcatgcccgcaaagcagcatcaatgattttgggctctggaaccatatcataggtaacaangtgtgtttatccctttacgcaattctcaggcatctatttctggcttgttgaagtatgttacccagcgagcatcaaactcctcatctgtttcctgtgacccatgggaatagcagcgaactgactggatagccacggcggggccgggggtccgggcggagtgcaggaggcctcgagggtcggcccgggtggttgcggccacagcgcagcggcggagagcggcgcccagcatgacggcgatggcggcgcgcgggctgaggacagagagaagccggtgtaagctcgcgggttgctccggagcccc

SEQ ID NO: 480114 - DNA, 848 bp, Homo Sapiens
  misc_feature (222)..(276): n is a, c, g, or t
taaagacgcgtcgtcgggggtagcggtatttcgcggggcacctcataaacgaacaagtggcaaagggtggcgggggagaaaaaaaacaagaatgagcacaccaggggaggagatataaaacgggaaagagaggcgagcaagactatattggcaagaagtgtagtgcggagaagaaaaaacgggggaaataaggaagggtgggagtaaacggagaagtactannnnnnnnnnnnnnnnnnnnnnnnnnnnnnnnnnnnnnnnnnnnnnnnnnnnnnntacggtagtaattatggggcctgggcaaattgttaatttttgggcattgggtgggggcgaaaaaagaaaagcatgggtgccccagaattcaaaaggtctaaaacaagactagtataaggaaagaaatcacttcagcgtggaaagcagatactctcaatggtagtaattgtataatgcgagctcattcaggtattttacagggtttgatcctgtgaagaggggatcgtagcggcatagtaaagataatgtgggcgagcgtaaggtgggaccttgtccgcgaagccggatgacgagttttcgtctccaggtgagaaatgagctccaagttcttatcttctctgccatcagcatggctgaagggggagagggtgggtgttagggaaaatccagggacccttccacacaggaggtactctggggttccattcaggagggtgccagataattcagatcactctacccaggctttttggcaaaaaacaaccctcaccctccgtaactagtcatcttccttgtccctcctcctcacttcccttccagggccttctaagcagcttactttcttttgtacc

SEQ ID NO: 480115 - DNA, 2565 bp, Homo Sapiens
  misc_feature (12)..(12): n is a, c, g, or t
  misc_feature (16)..(16): n is a, c, g, or t
  misc_feature (27)..(27): n is a, c, g, or t
  misc_feature (44)..(44): n is a, c, g, or t
  misc_feature (59)..(59): n is a, c, g, or t
  misc_feature (66)..(66): n is a, c, g, or t
  misc_feature (76)..(76): n is a, c, g, or t
  misc_feature (92)..(92): n is a, c, g, or t
  misc_feature (95)..(95): n is a, c, g, or t
  misc_feature (110)..(110): n is a, c, g, or t
  misc_feature (123)..(123): n is a, c, g, or t
  misc_feature (695)..(697): n is a, c, g, or t
  misc_feature (988)..(1041): n is a, c, g, or t
  misc_feature (1262)..(1325): n is a, c, g, or t
  misc_feature (1698)..(1698): n is a, c, g, or t
  misc_feature (1829)..(1829): n is a, c, g, or t
  misc_feature (1899)..(1899): n is a, c, g, or t
  misc_feature (1931)..(1931): n is a, c, g, or t
  misc_feature (1941)..(1941): n is a, c, g, or t
  misc_feature (1988)..(1988): n is a, c, g, or t
  misc_feature (2025)..(2025): n is a, c, g, or t
  misc_feature (2029)..(2029): n is a, c, g, or t
  misc_feature (2052)..(2052): n is a, c, g, or t
  misc_feature (2078)..(2078): n is a, c, g, or t
  misc_feature (2080)..(2080): n is a, c, g, or t
  misc_feature (2110)..(2110): n is a, c, g, or t
  misc_feature (2131)..(2131): n is a, c, g, or t
  misc_feature (2142)..(2142): n is a, c, g, or t
  misc_feature (2252)..(2252): n is a, c, g, or t
  misc_feature (2295)..(2295): n is a, c, g, or t
  misc_feature (2345)..(2345): n is a, c, g, or t
ctggcatgcccnactnggctgggattncttcgtttttttactcnccctctgaccaaaanaaactcnttccccgctnttcgatgggtcaagantgngctcagagcccaaantcatcaccccccngttctcaggttttcatctgcctgggtctgatcctggtgcaaattgtgatggtgtctgtgtggctcatcctggaggccccaggcaccaggaggtatacccttgcagagaagcgggaaacagtcatcctaaaatgcaatgtcaaagattccagcatgttgatctctcttacctacgatgtgatcctggtgatcttatgctctgtgtacgccttcaaaacgcggaagtgcccagaaaatttcaacgaagctaagttcataggttttaccatgtacaccacgtgcatcatctggttggccttcctccctgtattttatgtgacatcaagtgactacagagtgcagacgacaaccatgtgcatctctgtcagcctgagtggttttgtggtcttgggctgtttgtttgcacccaaggttcacatcatcttttttcaaccccagaagaattttttcacacacagactgcacttcaacaggttcagtttcagtggaattgggtctacttattttcagtcctctgcaagcacgtatgtgccaacggtgtgcaatgggcgggaagtcctcgactccacctcnnnctcatctctgtgattgtgaattgcagttcagttcttgtgtttttagatctgttagacaaaagtgctcacgtgcagctccagaatatggaaacagagcaaaagaacaaccctagtacctttttttagaaacagtacgataaattatttttgaggactgtatatagtgatgtgctagaactttctaggctgagtctagtgcccctattattaacaattcccccagaacatggaaataaccattgtttacagagctgagcattggtgacagggtctgacatggtcagtctactnnnnnnnnnnnnnnnnnnnnnnnnnnnnnnnnnnnnnnnnnnnnnnnnnnnnnntacggtggcaatattatgtaaccttttttcctatgaagttttttgtaggtccttgttgtaactaatttaggatgagtttctatgttgtatattaaagttacattatgtgtaacagattgattttctcagcacaaaataaaaagcatctgtattaatgtaaagatactgagaataaaaccttcaaggttttccaggcccacaaaacaaagcacacaaccgcnnnnnnnnnnnnnnnnnnnnnnnnnnnnnnnnnnnnnnnnnnnnnnnnnnnnnnnnnnnnnnnntcggggccacccccttactgacaccacatgcctctcatcccaaccacaagtaacactaacggcccgcggcggactcagagtctaaccacacacaggcccacacgatctccatcattctcccctcgaccgtgacgaaacatttgttccttattatatgatagagaattgagtcagaataagaaaatccccttcactacgtcggttcacccgtggcagccctacaatctatagcaaccattagacccatgcgcgcttgctgggccaggactattcgcacctcgtgaccgatgcgccgcgctacgtgagtggactactacaattcctcctccccgtcgatcacctcctacccccccacgtcccgatcgtgttgtgngtatacagcgtcacaacccgtttgatttgattactacttaaaaaactgttccgactctttaacgcagctctgccgctttactggccgcctcgccgtctctgtacctcgccgccggcccatttgtgcaatgntgttttcctcctcgtctgacaatggtaatgtagttgcgtcggttcggtggtccatgctataatattccantcttatgctcccggttttcctcggcgctaacnccgcgacccnccaccgggggcgccttcccgctcatatcacccaatcactcctggcanccccaggaagaataaaggaacgggtccggcggccctngatntgtttcgccacaaacgcccaatnaccctttcacaataccctccctttcnangctctcaggcacccgacacagcccgccaantgaaaactttctgcaaataanacgcataaaanttcccacacaacaagggggcacaaagggaattcccactcactgtccatcattttccctaaaatagccccccatccctttccgtcgggacttcctctcccccataatccgnttccccccaagtgccccgcttatttggggaatggcccctgcgnccaccgatttcaagcttacctgccgtgagactaacacgcatcaacaccancattacagcacacgccaccgcgctacgttcgtcacccatgcgtactacgcccctaccgtgagcattggataagacgcctgaatggtgccgaaactaggccgccgacggcctgtttcaacaaaaggtggcgtcccccaatgctttgcgtctttcacccccgcattagggtcgacgctcccgcgcacgttacagcttacatttgccctgacagcatgggcgt

SEQ ID NO: 480116 - DNA, 456 bp, Homo Sapiens
ttttgtccctaccatttccttacatttcccttggggcccatctctggctccttgctttttgtttcttgctttgctttatcagttcattccagctccctgttagtgaaggacactgctgttagtgaaggaacaaagtctatgagtcctaaaattttaagtcaaagaaaactgctctgtttcccctttagtaacacttctgaagaggaaaaacttcaatagccaaagttaataatcctatataataattgctttggctttcacctaaaattctgggcatcacaatttccttgggatagaggttgtgttggggaatagattgcttattgctgttcactggagacaaaaggtagtgtttttgtacaaggtcataccgccagaagccccaaatcctattttggctcatcttcaggtaaagagtaattcctatcctgtgtgcctcagaagctagaatcgaag

SEQ ID NO: 480117 - DNA, 212 bp, Homo Sapiens
ccagttctctagtatctttattatccattcccgggggcactcctggctgcccaactcaggggtgcagatgtctccctgcaccatgccaggtgtggtgcagaatgggaggcagggggatggagcagagagaggcctggactgcctgtggcctttgtcgagtcactgcccttctgtcgtcttctcgcagccgtatagtagtagtaggcggccgc

SEQ ID NO: 480118 - DNA, 473 bp, Homo Sapiens
  misc_feature (361)..(361): n is a, c, g, or t
aaaagaggaccccagctgggctgcaccctccttcaaaaacctttgaatgaacttcctgtttgcccaattctgaaacttgaaaaggtttgtttctgtctctggatgaatcaaaacttcttcccattttggagcattcctcccttggaacaaacacctgctcatgatcttcctgccagcagtcctgaagaactcactctacctcgcctagaagctggcaccatggatggcccttgctggtagaagagggaaagagttggccttccaagcctcctttatcattcccactagactggctgtgtagtgcaccacacacgtttggcccttcttggggaatgtccttccgtctccgggggagatggtntcgatctccacgcccatagcggtcccacaggccccgcctctggggggtccctgctgctgcccgaccccggctcggctccggccccagccccaccgtcgctccggctcgcctc

SEQ ID NO: 480119 - DNA, 1316 bp, Homo Sapiens
catctgcaaagatcctgcctaccaaaataaaccatatggtgccactgggcatcttgtgcaaacacaagactctgtgtagatcactgtgttccgtgagtcttggaaaatgtatggttaaacctatggaatgattcatcaactgtgtttacttcagcctataacatggcgagcggagagttggtttgtaagacaaaggttctcactttcttcatttctaatatcagtcttcaaaattaaacatttacctactaagtctagtacactgactgcctccatgtactggcagtgggggcttgttcctcaggccaatttacattttggacaagtcatcctttagggagtcagcaatcatgtctgccatttcctggttaaaatgggtgatgaaagcatgaggtatgtttttctcacagagtcgaatgtctccttctggaaaatccttcttaatgtcttcatagtactcttttggacaccaaggatctatagtaccataataaaatgtaagcttacataaatgctcctttatggtttcgtcatctctcttcaccacctccatcatttcttggcccccaaggtaggcagcattagcaaggcagaatggttctaatatattcaatggtgaaaattcattctctaggttcattacttgaaggccccttctgattagcaaggacttgattttctcaggacacggtttcaataataagtagccagtaacatagagaacatatcgaaaccagcacaaaagtggagtggcaattctgccattgggtgactcagacattcgttcaattgttggaaagagcagaaaggcacgaattaccgggagctcagggactcgcttcagcatctgaagtgtgaaatagctgcctattgaatggccaatgagcacaagtttcatgtcctttggcacatgagttctcaggaaagctagtttgtgctctatttgtccatttagtccataaatgtccttaatttcttgagcgtttgaatcctctgatgttgtaagaatcttcttgtctttgggagccaacgcatgcccagcatgactgatagtccaaactggaaagcgtctgtttgtcaaagagtataaagcctttgcaaatggcacataaaaggcagaaaaacctgggttaccaggaataatgaaaataagcagcttaggccttttgacactttgatcatgaaagaggtctgtccagggcccacattttagaacctgggtttcggctccaccacacaaaatgaattcctcatgcacaggaatttcttccttgagttctgagtccatttctgtccacctggaaggctgcccgctc

SEQ ID NO: 480120 - DNA, 579 bp, Homo Sapiens
agcggagactctcaggcaggtggccctagtgcctggggtccaaagaaatattcttctcagggctttgaagcaccacgtgaacctgattctactcatgatacaatctggggaaagggattagtacagttcatttctagaagttatcttgttcagtttcaaagccttgttctcactggagccacagaaaatcagtggattctactcaagggaccgtctcaattctattctgtgtactcctgccctggccatactcctatccagaccaccgggctcagctacaggctcagctgactacccagccagccaggcacaagttccacaccttctcaacttgttcttctaatgattggtatgtatgtgtctaactggataaggtgtggcatggagatgggtagaggtgggatgaggagtggagaggtgtctaccaagaatggctgacactctcagaaatgtttgtccttctgctcttaatggaaaatctctccatgtggtaaccccacactggagagattttccattaagagagaaggaaaatctctccagtgtggtaaccccacgtggagagtactccgtcgaact

SEQ ID NO: 480121 - DNA, 1563 bp, Homo Sapiens
  misc_feature (939)..(939): n is a, c, g, or t
gtatgtccccaggagagggcccagcagcaaaatggtgagaaaaagccagtggcttttttgccccagcctgccccaatggtgggagggaggcactggagctgggttcctgggcccacagctgtgcctgggaatagtccaggctgtgcctgcagaggagctgctccaagcagacccctgaggaaggggcacatatccccaaatgctgcttgcttcaaacaggcaccctcggtgctgctccctctgaggctggcagttccttcctggatatgcagggtcaagagcggagggggaagcagagagagtgccgcctcacacgtactccccacagtcggcgatgatcaccttctgctttggcttcccgtccttgctgccctgggcctcaatttgccgcaagacatctaggccttcggtgacctctccaaacaccacatgcttgccatccagccagtctgtcttgtcacatgtcaggaagaactgagagccattggtgtttgggccagagttggccatggatagtagacctggtcccgtatgcttgaggataaagttttcatcatcgaacttcttcccatagatggacttgcccccagtgccattgtggtttgtgaaatcaccgccctggcacatgaactgggggatgatgcggtggaagctgcttcccttaaagccaaagcccttttcatgagtgcacaggcagcggaaattctctgctgtcatgggcacgacatcagaacgcaggagcatctggatgcggccagccggcttgttcccaatcttgatgtccatgtacacctcctgggtctctgctttgggaggctcttgaccgttcgttcctctttattctcttcaagcgtcttcccagaaaacttcgttcaaccagtcatcatctgaccaaactggcctggaagagccttccttaattctcattggtttggccanaattgacacgaattgtacgtccaaaagctcagattcattctccccatgcaaccttgtaactttggaagtccagaacactgatatatgaataaggagcctccgtgtaccaccaaaaagcaactttagttagaattaagattcccagccataccatgttgtcgatagctgctgcagcatcctctgccaactcaaattcaacaaagcaaatcctcggtgcttttctgtttcataatccagaggaatctgaatatctgtgatgtctccaaaaggaatgaacgcagcatgaagaactttgtcgtccacttcctctgccagtccacctgaggtgtgtggcaaggctgttcactgcaagggagtcgcaaaagcagaggcccaaaggtgtgaaataacctgaaccttgggggcaagtgggtcatttttcgggagacccagcgaatcgggaagcaaagcaaagaagctggagaagtgcgtactgctaagaagtctgcactttttcctgaggacagtgggaaaccttggaaggagtttaagcacagccagagctatcgccagcactaccgccagacccccggccttgacagcagctcgccgtcctcctggttcagagatgcgtcccaccccacg

SEQ ID NO: 480122 - DNA, 700 bp, Homo Sapiens
  misc_feature (594)..(620): n is a, c, g, or t
gtacaaaaaagttggccggcaatggcttgcgctgacgagagtcctggtcagctgagtggaaatagaaggatttctgctgccatcatcttccatgggctttcctggtcacacgacctacaagtagggagcagggaaagaagagtgagcctgcatgccaattctaagctcttcaggatcaaatgtcgttcgtcctgtccagaatggcagcctgtggaggcacctgcaagaacaaagtgactgtgtccaagcccgtgtgggacttcctgagcaaagagaccccagcccggctggcccggcttcgggaggagcaccgtgtgtccatcctcatagatggcgagacttctgacatctatgttctccagctttccccacaggttcttcccccggccccttctaaatgggctctacctagcccggaaggctctcaaggggctgctaaaagaggcagagaaagagctgaagaaagcttagaggcagggggagctgatgggctgcctggctctggggggtggaggggagcaccctgagatgcaccgcgcaggcccaccccctctccgagcagccccacttctgcccccaggagtctcggggctnnnnnnnnnnnnnnnnnnnnnnnnnnnacctcttcctcctcgcttcgggaggaggcagaagagcaggagagcacctgccccatctgtctgggggagatccagaatgc

SEQ ID NO: 480123 - DNA, 1021 bp, Homo Sapiens
  misc_feature (252)..(387): n is a, c, g, or t
  misc_feature (396)..(397): n is a, c, g, or t
  misc_feature (579)..(611): n is a, c, g, or t
ggtggagaggggcgacatgtttggcccccgccggcgggcgcgttgttttgtttttgggaagtgagagtcagagcgcttgtgttctatcactcagcggggtgtgtccggagttaagggaaataaaaagcgcgcgggttctgcttttgggtcgcgggcaaccgcggggcgccaccgcggagggtaggtaaagagaaaattctttcggggcggcggagcggggcgcacccccggaaataaacgcatataaaagtnnnnnnnnnnnnnnnnnnnnnnnnnnnnnnnnnnnnnnnnnnnnnnnnnnnnnnnnnnnnnnnnnnnnnnnnnnnnnnnnnnnnnnnnnnnnnnnnnnnnnnnnnnnnnnnnnnnnnnnnnnnnnnnnnnnnnnnngtggggtgnnactttcaaaaaaaatttattcaatgaatacacaatataattccatttcgagtgattaaaacctatttgttgtttagaaccaaacaaaactacaagaaaacattttcaaaaccttttttttcaggctgaagaaatcgtttaatccattttaaagaaatctcacatgatgttctgtcgggattnnnnnnnnnnnnnnnnnnnnnnnnnnnnnnnnntatacacagaaagaagctcgcacagagtcaggcgtgcagcaacgtcacacactcattcctttctgtttcctctggacactcaaaatgtgaaagcaagtaagaggggggtggttaaccaaaccttttggtccaaggaataaaatttctttaaaaaatttgaaacgtcaaaacctgccagaataagacaatagaagagcgtatcgtcaggcgctgggaatggcaccacgacaaggcattaatgtggattcacttgcacagctgctctcataaaagctacacgattcagaggtaaccctaactatccgcaatcccaaccaaagtcatgttcatgccgctgtcctagtctggacaatcatctgtcactcatccaacacagttatatacagaatgcgcagtcccagcaacagtgt

SEQ ID NO: 480124 - DNA, 994 bp, Homo Sapiens
tcaccaatttccccttttcccgtggggcttttgggaaaaggctattcagtccacatgttagttgcctggaggggggttggggagttgtgttctgggggaactctcacctcgggggctttcccctaaggggagaggacaccccgggaagaagtagggggttctcccagccctgtaccccagcagatcagactcctgggcacactaagaggaaaactcaacacaaatggggccaggtatttgacagatgctgttcagaggtcagttcaggccactttctgcagggtcctggaccaacaggcacttctctcctggaggttcctcgaagccagctggcgggccgtgcggagggcccagcccatcaaagtccctcgtcgttgtaagtcggagaatggggcttcaggatgctctgaggattcttctccactagagggcgccagctcacctcccctgtcagaagcagatcctccccgttcatggagtccaggtactgtatctgtttcctcacatactctaccagcaattcaagatgtcgagggtcttcacatttccggttgaagaaggttctccagagggcagcggccagcccatgatcatctgaaaggatcccctcatcatatcccaagatcgctgcatagaaatgatttgtcatgaggatcatgttcttcttcaggatatagggattaacccccatgactctgccgcgctgctgaacatcctcccacataaaatgaactatgatacgacacatgtacttcccactccggccttcctgcttcattcggactagacacatccagacgtggagtagggttataagaaaccatgaattgaatgtatcaggcatctgacaccctgggaagtgcgagacagagccctgtccccctgtccttgggtaggagacacaggtatcaatcggctgcatactggaacccactgagaaatgctagtctggttcctaaggactcgccctcgtgccgaattcgccacccaggcc

SEQ ID NO: 480125 - DNA, 297 bp, Homo Sapiens
tcactttagtagttaaaagtagttttccagaaaaaggacataagagacctggtcaagtataaaaaatataaaagtctgggaagtgaggagcacctctgcccggctgctgccccgtgtgggaagtgaggagcgcctctgcctggccgcctgcccgtctgggaagtgtgaggagcgcctctgcccggccgctgtgcaaccttccacgtgtgaagtgacagccttgtgtgtgatgttttctgtcttccccaagtttgcattttcgacattaaagtttactttttagttaaaagttttaaa

SEQ ID NO: 480126 - DNA, 1129 bp, Homo Sapiens
  misc_feature (69)..(112): n is a, c, g, or t
caaagggagccacgaggagctttatttatacatgaacgaaggtagatttccctcacatattacaaaatnnnnnnnnnnnnnnnnnnnnnnnnnnnnnnnnnnnnnnnnnnnntttgcatctagaaagttcctcagaggtaagactactcctgggctggggcgggcgcacacaggggtgaccactgggcttgtggtccaggctgctcactctcctcaggtgccagcagatggagaggaaattttgaaagaagaaaccgggagacatcctggaggtcaggagtcaggagcggggaactggaagccgctagaggctcttgcaccatgtggagcggatgtgaggcacgatgcctcatctttcctcactgcttcccttgggaggcgcctggggttgcgccagttccccagcccccattgcggccatgccaagcccctcagagtgcagcaatggctttagcagccacctggcggcccaggggcaggctgaggtccgtgatggccagaaccaccttggggctggacatggctgacaccttcaccagttccgacacggtggtgaagggcatgaactgcaggacgctgccacggccaccctgctccaggcagtccacacactcctccatgaaccactgcacgaactgggtgtgggggccagcggtgcgagaccccaggatggaggagatgagcaggaacaggttggccaggactcggttcagagggtcccgcatgttgaccgtgtggagctgagaggctgagagggagctgctcatggatcggtctgtggggctcgaaaggatgttggcatcgtcctcattagagctcagcagtcgcatcaacttcgaaggctgcacatcgtccagggggaagaggctgatataatcctcaatgtcttcgcggtgtctcttcttctggcgggtggacgcctgtcccttgtgggaggagtaggaactgagggcacaccacacggccagcttggcaagagcagtgcccggggggtccatgaggctgtgccacttggaggagtcagtgagcaggccaggtaggatgtggcccagcaggaccagggtcacttgctgcatgtccaggcagaagatggagtagagcagctccactgcccgcagcgtgtgcccaa

SEQ ID NO: 480127 - DNA, 1038 bp, Homo Sapiens
  misc_feature (10)..(10): n is a, c, g, or t
  misc_feature (16)..(16): n is a, c, g, or t
  misc_feature (21)..(21): n is a, c, g, or t
  misc_feature (23)..(24): n is a, c, g, or t
  misc_feature (28)..(29): n is a, c, g, or t
  misc_feature (33)..(33): n is a, c, g, or t
  misc_feature (36)..(36): n is a, c, g, or t
  misc_feature (38)..(38): n is a, c, g, or t
  misc_feature (44)..(44): n is a, c, g, or t
  misc_feature (46)..(46): n is a, c, g, or t
  misc_feature (51)..(51): n is a, c, g, or t
  misc_feature (54)..(54): n is a, c, g, or t
  misc_feature (56)..(57): n is a, c, g, or t
  misc_feature (70)..(70): n is a, c, g, or t
  misc_feature (75)..(76): n is a, c, g, or t
  misc_feature (79)..(80): n is a, c, g, or t
  misc_feature (95)..(95): n is a, c, g, or t
  misc_feature (97)..(97): n is a, c, g, or t
  misc_feature (99)..(99): n is a, c, g, or t
  misc_feature (106)..(106): n is a, c, g, or t
  misc_feature (115)..(115): n is a, c, g, or t
  misc_feature (121)..(122): n is a, c, g, or t
  misc_feature (126)..(127): n is a, c, g, or t
  misc_feature (129)..(129): n is a, c, g, or t
  misc_feature (137)..(137): n is a, c, g, or t
  misc_feature (139)..(140): n is a, c, g, or t
  misc_feature (156)..(156): n is a, c, g, or t
  misc_feature (166)..(166): n is a, c, g, or t
  misc_feature (195)..(196): n is a, c, g, or t
  misc_feature (220)..(220): n is a, c, g, or t
  misc_feature (300)..(300): n is a, c, g, or t
  misc_feature (305)..(305): n is a, c, g, or t
gcaggatccnaaaagngcccnanntctnngatntantntattananaattnctncnnacaacaaattttntcaannacnncttttcccaatatgntnanccatcanctgtagttncttttnngtgnncntcagcatncnncaaattctttaagttnatttcctctnatgatcctatctagatacattttctctannatcccataggcagcaagttgctgncacctttcatccttaaaaaggagtagctagcatccgagaacgctgctgccctgctgatgctaaagttcgtacattgcaangcatnttttaaggcctctagtctttcactttcgttgactattgtcttgtaagagagctcattgtacctttgtgcagcttcaatggaatgtttctttctataatcaagaacacgtgcatagcataccttataatgtatctgtaattgttcattggttgattcattctgaagcaacgatgcctcgatttatgtaagcctctgcctggactggatcatcatcctccagatatagcctagcaatcttcaagtaagtctccagtttataatctacattgtactgtttttgtcctgtttccaaaggaattcccaccaacacttgggctgcatttctccaatcttcttctttctcatatatagatgcaagatgctgtcttatggaagcaacctgctcctcaaatgaaatgactctaggctggatcttttccaaggtgaagtgatagatttctttggctgtgctatcaggcaagttatgaagatgtgtgcaaaaatcagtcagcaactgccgcgagatcacgagactgacattctcatttaccattgcttccacaaaagctttcaaagcttctagttgttctgctccagataactgaatggctttttccaggatctgacgatacttgccagccagatctttatgagagccgctcgaattcatgagctgggccaaatcctgtcgcacggctgccgccatctttctcccagctcagcggtggatgcgggggcctcaggcagccccgct

SEQ ID NO: 480128 - DNA, 1365 bp, Homo Sapiens
ttcagaggctgctcaataggtcaggggtagggtataggaactggggatcaggcatgcagggatggggtggcagaaaaaacgcctgtgggttatgctccagacagagcgacccccatcagggctacccattactcaatgacatgtaatgaacagggacagatgctgagctcttaaggaaacaagggagagagcatggcagcggggagcaatggaacacatgaagtcacaaaaaacagaaagtaccaacaaaaacatgacctacatttgcctcctccctagagaaggtgtgatctatgtttggggttaggggaggtgaagggtcatgaacctaggattatcagctggccaggggcacagaaggctctctgaggactcctaagaggcaggcaggcagctgggaccccacatccccagggaggaaacgacagtcctttcaattcgacttggaccaaatcttggcgctccctcggagccccttgccctttgaggctttcttgcttggctggcgctggtttggtgccaggagctggttccctcagctcagtcaggtgttgctcagggtcctgagatgtggctgcggctgctgctgccgtcgtaactttaatggtttttttaaggttggcaacctcactctcaatctgctgcttcaggcccagctgctgctccttgtgttggttggcacggctcacctgctcctcaatgcctgacagcacgacctcacagcccacacaccattcctgcagggttcgggcaatggcactgaggtcctggcgctggatgtcccgcccgatgctgtagtcaacctcgagccgctggttgcgctggtccagggagccacgaagcacgtcagcatacacagcctcaatcacaaggtcttccagctgccgcacattacgcagggcaagagcctccagcaacactgcatatgggatacactttactttagcagccagggtgacaactgagaggtgtcgaagcttattcttctgagcctctgttagtggaggaagattccgggcttcagctaagtagtcagcgtatgtcccataagcaaacactgtgagcagccggaaggtagaggcaaagtcactctcagccagctctctaacattgggcatgtccagcagttctccaaacacgtagacaccaggggcctcccgcacctgatggatgagtgtggccagcgctgcccccttggccgacttggctaggagcagaaattgctcctggttctgccctgtcaccttcacttccgcactcatcactgcactgagtgtgggggacttgggctcaggatgtccaccgcccctgggtcaggctctgcggccgctacctggaagcttcgacctccagcgcaccgggcgg

SEQ ID NO: 480129 - DNA, 144 bp, Homo Sapiens
aaagccacatttcattgtcttagtcaaagcaggattattaagtgattatttaaaattcgtttttttaaattagcaacttcaagtataacaactttgaaactggaataagtgtttattttctattaataaaaatgaattgtgaca

SEQ ID NO: 480130 - DNA, 1252 bp, Homo Sapiens
  misc_feature (7)..(7): n is a, c, g, or t
  misc_feature (22)..(22): n is a, c, g, or t
  misc_feature (27)..(27): n is a, c, g, or t
  misc_feature (30)..(30): n is a, c, g, or t
  misc_feature (34)..(36): n is a, c, g, or t
  misc_feature (41)..(41): n is a, c, g, or t
  misc_feature (49)..(50): n is a, c, g, or t
  misc_feature (52)..(52): n is a, c, g, or t
  misc_feature (56)..(56): n is a, c, g, or t
  misc_feature (79)..(79): n is a, c, g, or t
  misc_feature (81)..(81): n is a, c, g, or t
  misc_feature (91)..(91): n is a, c, g, or t
  misc_feature (97)..(97): n is a, c, g, or t
  misc_feature (132)..(132): n is a, c, g, or t
  misc_feature (144)..(145): n is a, c, g, or t
  misc_feature (150)..(150): n is a, c, g, or t
  misc_feature (489)..(528): n is a, c, g, or t
ccttgtntggccacactttttnttttnaanattnnngcaanagtctctnncnaccnccgtcacggcacacatgccagananatcaccactnttgganatacttgcctgaacacattattttgtgccactctnaagtccagtacnngtgcnccgtacccaatcccacaccaccaccttcaggtcatcgctgccactggccagccaggtgccgcgctggttaaagtgcagggtattgacacaaccagtatggccctcaagcccatgctgcaggcggaaacgctgcacaaagactcttgcccccacaggcctcatagacaaagcgggcacttgaaccccagctcccgctcccgaagggcagggagggcttgccagcgaggtcggggtagagctgatgtttctgaggacacccagtcctctagggcccgctcatcatctgatgagtcctggtcacggttagctcccttgcgctgtacacggcgccgaggctgnnnnnnnnnnnnnnnnnnnnnnnnnnnnnnnnnnnnnnnngagcggtcatggactcgattttcatcattaatggagtaatgaccagtgtcctccatgctgtcagagtccttatcttcacctgagctctctgtgtctgtgcctcgactttctgtgctggtgcggttggggccaccatcatccccagtcaagctcaaactcaggtctgaggcctccacttcaatgcctgaggatgtctccctcccctcttcagctccagacatctcctctggactgctagacaggcttccattagctaagtctgttctgccatctgtgctgctccctttgctggacatcttgaatgatgtttgctgtagccagcctttcctccttttatcactgaagtaaggccaggctgagctcctgagaaaataggtctgtagattcactgaaggactgaggaaagggcaaccagtactcccagcgatgacttcgggtcggcggaaggaaaagacctgagcgctaagagcttgggatacgggtcaggcccatccttaggggaaaccggctgggaagcgagggggggcgcaggccgagccggaacgagacacagaccgggtaggtcaagggagggggggtgtccggctggggcagttacaagcacgggaatcggcgaggctcagcagcccgcttcccgtcttgggtcatccttctgctagcggctgctccgactgttccaggcccagccgccccgtccactgccacatcccgggaattccggacc

SEQ ID NO: 480131 - DNA, 1328 bp, Homo Sapiens
  misc_feature (275)..(276): n is a, c, g, or t
  misc_feature (351)..(455): n is a, c, g, or t
cccgggttttttcatcccttaaaggggaggaattgaccccaggtttccttcaaggctgtcaagagtccttatacttcaccctgagcttctcgggggtctgggccttggactttctgtgccggtgccggttgggcccaccatcatccccaagtcaagctcaaactcaggtctgaggcttccacttcaatgcttgaggatgtctccctcccttcttcagctccagacatctcttctggactgctagacaggcttcctcgtttgtctacttccatatnngccattacagtaaaacataaggcagccagagtgctttttaaaaatgtaaggtctggccgggcgcggtggctcatnnnnnnnnnnnnnnnnnnnnnnnnnnnnnnnnnnnnnnnnnnnnnnnnnnnnnnnnnnnnnnnnnnnnnnnnnnnnnnnnnnnnnnnnnnnnnnnnnnnnnnnnnatatgtcagccaaggtccgtagacccactgggagccacagaaaaaaagccacgtcagcatctctccagccagctcttttggaggatggcctaaatcttgtagctgctgcataagatccagcaccatctcaaaacgagcgttttgagtggtttcactgtctgtgggggtctctgcctcaaactgctcacatattttgcacatgacgctgtgctgctcctgatatttttcaaactgctctggaggtagagattcccgatgactctgcaaccattctggatacttttctgtgatctccttcagtgatgggtacagcacatccttggagagtaggttctgcataatactctgcatgatggggaggatgttcccttccccatccccttcgtccatgcctagcccctccatggccttggtcagctcttcttccgacatgctggagttctgaaggtcagtggcatttttggctaatccacttagtgtttcctttaggcaagaagtgaattcttgttgggaggtcatatcactgcccactctccctgcagcctctgagagcttttggaactgctccaccaggtggggttcttcctcagccaactccttcattgccttctcgaactccgcagtggcttgggaagccagttcactgtcgaatagttcctggaaaaacttctcttgggaagcgaagagggcatctttggcagtgtctcctggcgatctcttctggggccccgaagcatcaggggccgtggtggtagaagggggtgctggggagggtttggctttatcgaaatcatcaagagcactttccagaagctcctccaattccctgtccgcttcggccccgacactacagccttcctcagcggcggccaa

SEQ ID NO: 480132 - DNA, 483 bp, Homo Sapiens
  misc_feature (12)..(12): n is a, c, g, or t
gatacctatcanaatgccaaagctgcagggacacgaagacggttgaaaattcaacctatgtatactagatccttccagtttgatggtttggtcattcttcttcatgattataccatggagaattttctgtgacaagggtggtcatggaagtaagtgagtgatcccctggtttctcattccttaaagcagtggttcgcaaagtatggcacaagaccagcagcatcagcagcctttgggaacttgttagaaacgaaaattctcaatcccatcccagatctgctgaatcagaaactctaatgagaggacccggcaatccacgttttaataagccctcctggtgattctgatgcacactaaattcaactgttttaaagggaaagccctttatagtattggagttcccacactctcttccagattgctcttctgccgaattatttgtatctattccgagctgattatgtaataggatggaaaaagtaa

SEQ ID NO: 480133 - DNA, 787 bp, Homo Sapiens
  misc_feature (316)..(316): n is a, c, g, or t
  misc_feature (664)..(685): n is a, c, g, or t
tccttcaattcagttcttttgcacagatagcctgattgcttctgggtctgggaactaatattctcaaccgttcactacgtaaggaagccttatgcttgcacagcctgagtctgggatggccacttgagaagttttgccaactcctgggaacctcgatattctgacattttggaaaaacacatttaatttatctcctgtgtttcattgctgattattcagcatactgttgattcgtcatttgcaagacacacataataccgtcagagtgctgtgaaaaaccttaaggggtgtgtgggatgggcacaggatcaataantgcctgaggctgattgacgacatctacatttcagtgctttttccctaagctgtttgaaagttacgcttttctgttgttctagagccacagcagtctaatattgaaatataatatgatttgtcaggtcttataatttcagatgttgttttttaagggaaattgaccatttcactagaggagttgtgctggtttttaaatgtgcatcaagaaagactactgaaaagtattattttgtaactaagattgctggtactattaggaaaaatctgtgtgtattgtgtagctctagctgtttgactatctgtaatgaaaatgctgcacttcaactggtatttcattagagaaccnnnnnnnnnnnnnnnnnnnnnncctttgagcaactgtatttatggttaccatatgtttaaaaagaagttttggcaggatgacttagcatggactcttttagggtattaaaacaatctagattat

SEQ ID NO: 480134 - DNA, 929 bp, Homo Sapiens
  misc_feature (74)..(83): n is a, c, g, or t
gaaaaccggcccctaattccaggttaggattgggcaaacggtttccccacccttcccttggggaccaggggatnnnnnnnnnnttgacatccactgtagggaatatattttttaaaagccccacgttttgtgaaaagatgaaataaaaaacccaaggccccagcattcgggattgaaagtgcccgtgatgggagttcaagtattgactgagctgggagggaaggggctagagcccccaatccgacatgggcaactagagtgtggggtgggggctcccagtttgtcccaacccctcttggtcttgtctcgggtctggggggattcggggggttcagcagtggctcctaaagcagccaccggtgcctcctccatcttcctgtcctcagacagtgtgggccccgggcagaacgtgtcccctcggcccgcccggccaagcacagccatccagcgtcgctgttagttcctctgtctcagggctgaagtaccagctgaggtggctctgggtgatcttgaagacatgccttctgtcaggccgctcccctgcctcgggcggtcccacctcgaagccaatgaggggcaggctgcgctgggctttcacatcctgaggggctccgtagatatacagcaccaagggttcattttcagggaccacgaaccatgccttgtgccatcctttgccacccttctccatgtagtgcaggaagctgcagatgacgctgttctctgcagccactgaggcctgtttctccaggatggacctccggcgctggggtgtatgctggctgcaggctggactgctcccaggcaccccgtgcaaggccacatagcaatcagtgcacacacggttggagcggttgttgtcatagacgaggcgggcccggaactcggagcacttcccacaaaccacatgcccgcaggccttcatcgca

SEQ ID NO: 480135 - DNA, 952 bp, Homo Sapiens
  misc_feature (33)..(33): n is a, c, g, or t
  misc_feature (97)..(97): n is a, c, g, or t
  misc_feature (106)..(142): n is a, c, g, or t
gtagccattcataccacctttctctgaggaagncgcagactgttcctcttgaatggaaactgatttactggaatctgggatgccgttacttggttcngcggcaggnnnnnnnnnnnnnnnnnnnnnnnnnnnnnnnnnnnnncctgttactgtccattctttgagtacttcactggcactacccttccatgaatgcttgtactgttttgtccacacagttatcaaagtgctgcaaaaccaggataatttcattgttgctcttattaggaactattgcacgtaccgcatttatcttctctttcatgttctcaaaagctcctccctgggccagtacggtattggactgcaaatcaaaaatgaatcctgatgaatccttctggttctgtttcctggacattgtcgtttcttcgatctcaaaaaatatacaagaaaagtatccttttgccttgtctgggttttgagtgtaggtatctctgatttaaaagtgggcaacggaagtgtgcagttggaagcaaaaaatacgaaatcctgctgttcgaaattctgctcactagctgttaatctcctttccttttcttgtatcaacttcttgtcaggaagtatcattgcagacattcatgtctccttttccagggagattatatgaggtaaccagggtagtcacattcatagagacagaaagtagaatattggtagccagcagttagcccaggcccccgcaatcgcctcgtcgccccagctccgggctccgcgtcccggacgctcccgggtctgagaagaggaaaggagatcctccacctccccttctagagccaccgccgccgtcgccgccgcgctcctcccccagctctctcagagccggacgccgccccgcccccaccgccgcctccccacttctctcctgggccggactgcaggatgctgccggagatccagcagatcaccccgatcc

SEQ ID NO: 480136 - DNA, 1216 bp, Homo Sapiens
  misc_feature (156)..(192): n is a, c, g, or t
  misc_feature (1045)..(1045): n is a, c, g, or t
  misc_feature (1126)..(1126): n is a, c, g, or t
  misc_feature (1128)..(1128): n is a, c, g, or t
gagaagataaatgcggtacgtgcaatagttcctaataagagcaacaatgaaattatcctggttttgcagcactttgataactgtgtggacaaaacagtacaagcattcatggaaggtagtgccagtgaagtactcaaagaatggacagtaacaggnnnnnnnnnnnnnnnnnnnnnnnnnnnnnnnnnnnnncctgccgcagaaccaagtaacggcatcccagattccagtaaatcagtttccattcaagaggaacagtctgcgccttcctcagagaaaggtggtatgaatggctaccatgtcaatggtgccatcaatgacactgagtctgtggactcactcagtgaaggtttggagacactttcaatagatgccagagaattggaggatcccgagtctgccatgctagatacgctggatagaacaggatccatgctgcagaatggtgtctctgattttgagaccaagtctttgactatgcactctattcacaattctcaacaagccaggaatgctgccaaatctctctcaagacctaccacagaaactcagttttcaaatatggggatggaagatgttcccctcgccaccagtaaaaagctaagttccaatatggaaaaatctgtaaaagacctccagcgctgcacagtgtctcttgcacggtatcgagttgtagttcaagaagagatggatgcctccattcacgacaatgaaaccaagcctttgctgaattggagagctgtttaatggatcgagaagtggcgttgcttgctgaaatggacaaagtgaaagctgaagcaatggaaattttgctcagccgacaaaagaaggctgaacttctaaagaagatgactcatgtggctgttcaaatgtcagagcagcaattggttgagctcagagctgatatcaagcactttgttagtgaacgtaaatatgatgaggatctgggacgagtagcccggttcacctgtgatgtagagaccctaaagaagagcattgattcatttggacaagtgtctcatccaaagaacagctattcgaccanatcccgatgtagctcagttacatctgtgtccttgagtagcccaagtgatgcctctgctgcttcctctttcacctgtgcctntnctccaccttacaagtgctaacaaggaaaaactttgcaccgggagagacttctgcagccatagcaaacttcaatgggcaagcctaccag

SEQ ID NO: 480137 - DNA, 975 bp, Homo Sapiens
tctttggcgaatccactgttcgtgtctctgcccgaagtcctcaccttgagtgttttgtgccatctgctgtcactccatggtactttcacgattcaatctatggttatcgcgaagtataagtcttcatgtatatggtacatgcattcaatgttcttctttctggccatatcgaggagtctggtgaatcaagctgttaccaatattatgctagtaatcatagccatcgtaggcacttgtaacccatttgtacatttgtctacatgaggaccactcctgatgtcattaatccagctcttcataacttcatgtgtgtccaatcccgtccttctgtcatgctttctgtaactgtatgtccctgattcagccaagtgacatctatggaatcctcgtatctacatgtcctctgttagcgtttaatgttgatattgacctccaagtattgattccagtaatggatactctcccttctcatttgtgaatgtaagtcccagctggataatcttttaaaaggtcaacattgcaccgcagaagctgatattggtaatctatggatactacgaaattcaccaattgttctcaacctactaacactctggtaaattctgtgtccatggcaaatatacactgttacctgagccacgatttcctcggatcttcctcatctcttcttctagattactggcccacacttcacagataacctggctattctccacaagttgctgcaggcatcctgaagaaacctgagaagtcgtcttcagctaactagttttacagtgcaagccagacaatgtttggtctgatactctttcatcttacgctcctctttccggtaacgccagcaggcccgcttaccgggaccgacagggcccgcgaagcagctggctggcagggctgacgagctggcgggctggcgggctgactccccgacggcggcgacggcagcccctggcccggagctcttttccctctccc

SEQ ID NO: 480138 - DNA, 898 bp, Homo Sapiens
ccacatggacggatgtggctgctgccatttcagcaagtgttccttcattctggcccataacaagttagggcctaacacaatcgcaatgttgctgggagtcattttattcacatcgctggtctgagcaagctttgcaaggaacttgatcaaatatctaaagttaacaaaatttttgtggtggcaacttctgacatgttctccacaagtcttgaagttttttgtcttgatcctgcacacttgcaacttgtgtccattcttcatacagattaaaagtcatcaaaggttcaggcaattcccgtaaataggattttaaagcacctgctacagcatgggggtctgaatagaactcatccaggtgagaagtagaacagtccaaagcagctttcagcttctttaacttggaggccccagccccaattcggaaaaggccctcctccttcatgcctgtctccagaagcagcatgacacaggcttcaatgggcagcgcaatctcgcgcccgctcctcttcaggtgttcttctaggggagtcccaaaggctggtttttccgcccacttatcttgatgggctcgcatttcggggagggtcttttctaagactgctaatgcttttctatggtaatctgcttgggcttctaataacgtaacaaagaatttgccatactccccttctttggccataaagttgtacatgtctgctgcaagttgatccttgcactgttctactttatttccagcttcatccatctcttcctttagagtatctatttttgatggaagcccctgaaagttggttcctgaggatttgtgagcttggttccacctggctctgactgaatcccagtctaacaccaatcttgcaagctgcttcctctgcttctggatgttgggaatctccaa

SEQ ID NO: 480139 - DNA, 1087 bp, Homo Sapiens
  misc_feature (335)..(350): n is a, c, g, or t
atggcggggtccgatgtcggaacgcggcatggtagggccgcggaggctgcgtcggaattttttgtatacgggctcgcggcagagaggccagacgcggtagtggggagggtggtggggagggcggtggatgtgctttccccttaatgtggtggtggtgctgactgggttggggaaggcaaaggacgcaggccgtatagggtgtcttctcaagggagagaagaccccaagggctgaataattggcgcgcatgtgggggccgggatggaaagggaattgcgggcccacaaaaacccttggtgtttgccacggggagttcaaagagtcccgggccacannnnnnnnnnnnnnnnccccaatgaggaaaggcacagcccttccaggatgttggcccagggcgaagagcggggaggggcgacacttccagacggagctcaatggtgcccagcaggtttctcggctgtgtcgttgaggcctggatcacctcacagaagcgctccgtgttcgcgttccacagcactatgactttgtccagccccgcgctagaccggaagtctcggatgtccctgcggatctgctccagctgctgcgcacgcgagcctgggatgaggttgtccgcgcgcgcgctctggttggccgcgatgaattcggggatgtaaacagaaggccggggccgcagggcctccatgtgcggccacagttgctcctgcagcccccagtccagcaccttcgcgcgccgcatcgcctcggccaggttcagcgacgagatgtcccagccatcgaacacgaggtcgttgggcgccaccatgggcagcaccgcagctgaagggtacgaacacctcctggccctcggcgtccaggcccaggctcacggtgcccgcctgagtcagcgagccgtagtagttggcctccattgagaacgccaccctcgcggctgacgcgcgtcgtccggtactcgtattgcgcctcgatggcctcggggccgtagaccacgtccgggctctcgacgaagaactgggcggcggcctccatcgcaggcgggcggcgcagagtcgactcaggcagcggcgatcccgggaattccggaccg

SEQ ID NO: 480140 - DNA, 927 bp, Homo Sapiens
  misc_feature (373)..(373): n is a, c, g, or t
ggtgttgcggttttgcgccgcccagttgttcggtcccccacgcccgccttgggtgtttttgggacacaccctcccttataaggaggcggggaacttcccaaattgccccgccgaataaggtttcttccccccaatccgttggttgcccccagggtggttgtgtaaactccaacgatgggaacattggtctgtgaggcccggaagccaaaggagggaagtccccaaggcacgggacttgactttgggtctggcttgactggaagtcatctccgccccacaaaacccgggtgctcccacgcgagctcaagagctccgggcaccagggtgttctgcggagacccattgaggaaggcacagccctccaggatgctgnccacggcgaagagcgtggagggcgacacctccagaccgagctcaatggtgcgcagcaggttctcggctgtgtcgttgaggcctggaatcacctcacagaagcgctccgtgttcgccgtccacagcactatgactttgtccagccccgcgctagaccggaagtctcggatgtccctgcggatctgctccagctgctgcgcacgcgagcctgggatgaggttgtccgcgcgcgcgctctggttggccgcgatgaattcggggatgtaaacagaaggccggggccgcagggcctccatgtgcggccacagttgctcctgcagcccccagtccagcaccttcgcgcgccgcatcgcctcggccaggttcagcgacgagatgtcccagccttgagaacgccaccctcgcggctgacgcgcgtcgtccggtactcgtattgcgcctcgatggcctcggggccgtagaccacgtccgggctctcgacgaagaactgggcggcggcctccatcgcggcgggcggcgcagagtcgactcaggcagcggcggcggacagcgcgg

SEQ ID NO: 480141 - DNA, 994 bp, Homo Sapiens
ttggggagatgcttccagggtcagccagcaaggtgctggaggccatcttacccctggtgcagaacgatcctcgaattcagcacagctcagccctctcttcctgctatagccgagtgtaccaaagcctcgccaacctcattcgctggtctgaccaagtgatgctggaaggcgtgaactcagaagacaaggagatggtgacgactgtgaagggggtcatcaaggctgtgctggatggagtgaaggagctggtcaggctcaccatcgagaagcagggacgtccgtctccgacgagccccgtgaagcccagttcccctgccagcaagcctgatggcccagcagagctccccctgacagaccgcgaggtagagatcctaaacaagacgactgggatgtcacagtcaactgagctcctcccagatgccacggatgaagaggtcgcgccccccaagcctcctctgcctggcattcgggtggttgataatagtcctccaccagcattgccacccaagaaaagacagtcggcgccgtcccctacccgagtggctgtggtggcccccatgagccgagccaccagtggctccagtttgcctgttggaatcaataggcaggattttgatgttgactgttacgcacagaggcgactgtcaggaggcagccactcatatggtggagagtcgccccgcctctccccctgcagcagcataggcaagctcagcaagtcagacgagcagctgtcctctctggacagggacagtgggcagtgctcccggaacacaagctgtgaaacactagaccactatgatcccgactatgaattcctccagcaagacctctctaacgcagaccagatacctcagcagacggcctggaaccttagcccgttgccagagtctttgggggagtctgggtctccatttcttggccctcctttccagctgcctcttggcggccatccccagccagacggacctctggccccagggcagcagacaga

SEQ ID NO: 480142 - DNA, 625 bp, Homo Sapiens
  misc_feature (64)..(64): n is a, c, g, or t
agaggctggcgggaactttgcaggagcagaaaagcgctcgctgacccaagggtgctctgccacnagaaggggcaccggccagacggcaggaggtgctcccctccctttatcaagacaacggagggcacacactctgactgttagcagcaatcagcacattggactccccatctggtagtgccctccagcacacagcactaacaaattcatttgtatcatcttcttttcggtctttgtcgagaacacttttgactgtatcaaacttaaaagttagcaaagtcttagaaagtcctttatagtacaggtagagagagttattttcacttccacaagctatataatctccattggaagccaggcctacaaagtttttttcattgatatgacccttgaaggaacgtaggcagaatggtttccctacattccacagttttagctgactgtctgttgaggcagagacaatttcctcaccactcacaaactttgcataagagactgctttacggtgtcctttgaataccatgagttggactgtttagtgttacgaagatcatagtagtggacacagtgatctgcacagccgaaagccaaatggtatctggaatgggggagtcctctagagtcg

SEQ ID NO: 480143 - DNA, 840 bp, Homo Sapiens
ttcgacagtcgtacgagatgcttgttctccggtcggaagctccgcgtggtgtcgaccacatatgggccccactcaatcgctttggagggtcttccccggtatatatatagtctccccaagagggggtttcacaccccttttaagacatacgcatctgtgaactgcaatccagtggtttgagtgccaccctgtccaaatcaggcccgtatgaccgccctttagcaaaatcctgtgccaaactgccaggttttccaaaggaagaagcagggaattttactggttcaaacataagctctgtcagttttctcctctcctttgctctaagtattcccggtgcctcttgacatgagaacgggatggagactggcttctgattttacatgcattttgtaggtatgatccaaaatagcttggaaactatcgcagtcttcaaccatcccattttttagaggtgaaatggcctccatattctccctcggaacacgcagagcattagtatctatgtagtaggtgggaccgccttgtttgcctttatcgccatctatttccattaatgtgcttccgtcatctctttctaccaccataccaatagctgtaggaaaatccaccttggggcagtcctcaccagcataaccagctctcacagtataggatccaatgtccaaaacaagggttcccaaacttcatctcccccgtacacgccgccgctcatgagcatgctagcccgagcgcgatctccctaccctaagggcataactggcgaagtgaatctgcatgtggcccgcgactgcgagtctcgaggagcgatagcccctgcctcccttaacttccaccgccacc

SEQ ID NO: 480144 - DNA, 940 bp, Homo Sapiens
gcacacttcattgatgtacatcttaatctggccctgactttcaatactcgcatttaagttatcccggggcacacgaagcctctctaacagtggggtctggagtggggctcgtgtttctagccattgagaggctggccaaatggccattgatatcctggctaaatggaaagcccgcatccttgggctcggcaaacaacagttttccctgaatgaaaagacacttggagaggtccagaacacaactgccatttttacaattttgagcactccaagtatttttatgttcataggggaatggccgctgttttattgggtgtgctcggttggccttgcctccccctgagggcctgtcctcagtgccacctggggccccaggttcagtccaatccccatcctcagtccagggccgagccatagtttcaaaatcaaaccaaatatcaggctcctcctcatccagctcctggtcatcgtcccactcctcttccccctcctcctccagcttctcactgtcatctcttcctatggtcagtttgtaaacgcagtagcaggcaccagccccaatcatcagtcctgccgccatccaacccacttcccgagcccggcccatgctcaagtctgtgccagccttggggcaggacaggagagggccttgctccacctgattgaagaggtctctcaggtccagggtgagtaaggatggagggtagcagtcttcagcttcttccaggctcttgtagctctcttgtgatgaatctgcacggtccgagctagtttccttctttcttctctcgcctgcagagttgtgccgaaacctacaggccaacagacctacaaacctgcacggtccgagctagtttccttctttcttcacacgcctgcagagtaatagggggctggtacccagacggaggcgactagcaggacttgtgctctaggcggc

SEQ ID NO: 480145 - DNA, 1070 bp, Homo Sapiens
acacaaatattttacaactgatgaagaaatgggaacgtgatttggaaaagaactcaattttaggcctttcatcctttaataatctgaggaaattttttaaagtgtattaaaatgtcatcaagtaagtctgataatgactaaaactagaagttcagcaaacattcaaatatattttaagatcattatgcttttggtatgactataaatggacgatttcactttacctcaaaaacttcaattgggattcctcaatttcacacttttcctcataagtaagttttagcttctccagttctagctgctcaccagcagatgcagctttgccaaaatctgcattgtcatgggaaaatggtcttttggaggtttcgcccaccccagaatcttcacctgttgtaatccaagaattgtgcatgtttccctaaaataaaatgtgccagtaaggatgcatccagaagtgtttgttccctcagtgtctcctcttgtctttgagattttagctgttgctggagcccttcgttttcaagcacaactacttgtattttatttttcattccagagagttcctccttgcagaacttaacttctgcctctaaatgatgaatatattgagactggtcattaatagtatgaacaaggtcgtgcatagtaggcatattggtttcctcatgttctaatgacctcaagggggacatttttcttcttcttgacggagatacttcactttccttatctgcttgttggcgcaacaaatctttgagctgattaacagcatggctctgttgtaattcgggccaggctgtcctggcgtcctcatttcccacactggtgctaaaagaaagatttggtgcatcttctccaatagtgacatcgccttctttcagggcacatgtcagttggtgaatgcttctgctggcatgttcccggagactccgttgatactgccccagaatctcctccagggtagagttctccggggacttcgccatgcacgcactctaggcccagagctgggagttacgtggggaaatgtcctgctttctcccttccgagaacaacagcctgtggccggg

SEQ ID NO: 480146 - DNA, 789 bp, Homo Sapiens
gtttccggcctaaagtaaagtttcttctttcccagaaagaatggctaagggaagggaggagggtgagaagaggaagccagaaagagccggagagaatgaggaggtgagaagggggggacagtaaaccactgttctatgaagtctcacgagggcaagtgctcaaggtaaaaaaagagtcctggagaatcgtccacggctgcggggaagcatctcggtttccttctgcttttaagtcctctcagggaaggctgtcgccgctgccgctgcattaaatagttaggtacatcgcagagagtcccaggccatgggcaggtgggggaggggcgtcatttcaccaggggccgagttttatcatcgtcaccgcactggtgagctttgtactttttcacttctgccatgtacttggcccacgcgtcacctttacttgttaatacgaagctaagtgtggagcccggaccgccctccctcttcggatccccggggccagcggcggcggccgactggtcgggtcgctgcggacccgggggcggctcctcctgccgctgccgctgctcctcctccatcttccgcttgaacagctccaggaagctgccgtcgttggcgaacaagttcacgccgcccgacaccgggctcgaacccgcgcccgacacctcctcgtccccgctctcgggcgacgtccccgatcccgactcagcccaacggctcccgccaccgccaccgcccgcggggcccggagcctcccggccctgaggctccgcccgtctccctcgggcagccattttgtcgccc

SEQ ID NO: 480147 - DNA, 709 bp, Homo Sapiens
caccacaccccatcccccccagcactgttgcaacccgacgtgtttgtaaacgatggcagtaactataacgttactaaggtagctgaggcctgggtggctgaattcggcacgaggcttcgaaatcgccgtcgctctcacaatggcttgggtccagactgcgccacagcctctcgggagacgtggtgccctcggaacctttttatgtgccggactccgggccgcaggcagtccctgctggcagcaggatcacaggtggaggaaggagatggccagtctaccctcccctgccatgaccctgtcatcagccattgacagtgtggacaaggtcccagtggtgaacggctaaatgctacccatgtcatcatgaattctctgatcacaaaacagacccaggaaagcattcagcattttgagcgacaggcagggctgagagatgctggctacacaccccacaagggcctcaccaccgaggagaccaagtaccttcgagtggccgaagcactccacaaactacagttacagagtggagaggtaacacaaagacacgagaggcagcctgcatcagcccagtccaccccaagcaccactccgcactcttcacctaaagcagaggcccaggggctggttcacttctgcgttcttccacagccttacctggcccacatcctagcaccatggactctggaagtggggataaggacagaaactc

SEQ ID NO: 480148 - DNA, 791 bp, Homo Sapiens
ccgggtttgaggttattggcccttggtgcctgttttctttccgttccatcactgggatgtccatcttgggggggccttcaaggctgctggatcttcagccattcggttggcctgggcacgtatcagttccaatggagagggcttctgggctcctcggtaggcctgggtggcaaaacttccagaatcgtacttctgaagggatctcggtccaaagaggctccacttatctgacaagtttctgtccttatccccacttccagagtccatggtgctaggatttgggccaggtaaggctgtggaagaaccagaagtgaaccagccctgggcctctgcttaggtgaagagtgcggagtggtgcttggggtggactgggctgatgcaggctgcctctcttcttttgttacctctccactctgtaacttcagtttcaggcacttctggttgtcttgaagccattgaaagactgggatccaggtgctttttctatacagaattccgagctgagtccctgccaccacagtgaaatgatgtgatgactaagcggacagacagatgttaatgaggaacattgtccagctgctgcaaagtagcaaagcttcccaggaagagtccatccagaggttctgtgatcttgctgccgcgggactgcctgcggcccggagtccggcactaaaaaggttccgagggctcatgtctcccgagaggctgtggcgcagtctggacccaagccattgtgagagcggcggcgatttcgaaggtccccaagacccactaggtagcagcaccccgct

SEQ ID NO: 480149 - DNA, 868 bp, Homo Sapiens
tgcacctgcccccagaggcctgttgggaaaaggaccaaggtcaggaagggtgggacaggggctcgaccggctcagatccaagatggtgccacgccttgcttgctgagtcccccatgagctggggtactgcactggggccagcgactagttagacaggaggccagcagcttctcaagaaattccttcacagctgccatctcctgaggacaggagctgtgcatgacacccgggtatgtcttgaactggaccctggcaggtgtgacaacagaccggagcttctcagccgtcagggccccaaaccgtacgggcaccatggggtccagctccccatggcactggagtatggccaggtccttggcactgccattagctgcctgggggaaggcccggtgcagaggcagccagcagctcaacgccacgatgccagccagagggtgggggcaggtgagggccgtgtagagggacagggccccgccctgtgaaaagcctcccaggacgattcgattggcagggatcccgttcttcatttcatgctcaatcaaggccttgacaggagggcatcaccatcttcatgttgagggtcacagggatcctaggcgcatggggacagatgtacttgacgtgagggagccggatggtggagagggcgtcagcccagctgtgccctgtgtctccaagtccatgtaaaaaaataaccgcggccgtttcccgctcagctccagacacggtggcagcatcggtgagcaggggcacagacatggtgttaccacacatacaccacacggctccacggcgggggcctccactccctgggacttccgaggccgcttgggcgattctcctctttctcccgcagacacactcttcc

SEQ ID NO: 480150 - DNA, 716 bp, Homo Sapiens
  misc_feature (75)..(75): n is a, c, g, or t
  misc_feature (101)..(101): n is a, c, g, or t
  misc_feature (115)..(115): n is a, c, g, or t
  misc_feature (141)..(141): n is a, c, g, or t
cagacaagaaggagaaccccccagagatatcaagtgcagggggaaagaaggggggctgcttgagtcccctgggtnggaatcccaagtcactgacactcagnaatcccaggtggtnaaggtgggaactggccctcccagcangggtgaaatgagcccgaggtccaggctcctgtcgagtcggggaaagggtggggggcgcccaactagctgtccttgagaagcagcttctcctcagggcagcggaaggggccagggggcccggcagctgccagccgggcacaagcttcgggtgagagctggcggcaggagcgcaggtctaggcggcgtagacgagggcagcgggggacccagccgggctgggcccctgggccccgggtctgtacaatacggtttgctataaaactcaaaatcttccagccggggctgcggagttcgtgtgtgtatctgcggggtccctacctacagatgagtgggctcacctctcctggactcagggagggatttggaagtgtggacacctggggtgtccagctgtaccttggagggggctggggttggcgtgcacctcggtggggtccgggcgcttggataacgttcttggtgggtaggggtcgcggggaatctctgcgggcccgggactgcggggacttggtccccggctccaccccatcatgtggctagccccggctccgcctctgtcccagttcctgaattgg

SEQ ID NO: 480151 - DNA, 1119 bp, Homo Sapiens
  misc_feature (25)..(25): n is a, c, g, or t
  misc_feature (72)..(72): n is a, c, g, or t
  misc_feature (74)..(74): n is a, c, g, or t
  misc_feature (76)..(76): n is a, c, g, or t
  misc_feature (82)..(83): n is a, c, g, or t
  misc_feature (88)..(88): n is a, c, g, or t
  misc_feature (93)..(93): n is a, c, g, or t
  misc_feature (138)..(138): n is a, c, g, or t
  misc_feature (140)..(140): n is a, c, g, or t
  misc_feature (149)..(149): n is a, c, g, or t
  misc_feature (151)..(151): n is a, c, g, or t
  misc_feature (155)..(155): n is a, c, g, or t
  misc_feature (167)..(167): n is a, c, g, or t
  misc_feature (179)..(179): n is a, c, g, or t
  misc_feature (183)..(183): n is a, c, g, or t
  misc_feature (191)..(191): n is a, c, g, or t
  misc_feature (194)..(194): n is a, c, g, or t
  misc_feature (202)..(202): n is a, c, g, or t
  misc_feature (205)..(206): n is a, c, g, or t
  misc_feature (209)..(209): n is a, c, g, or t
  misc_feature (211)..(212): n is a, c, g, or t
  misc_feature (215)..(215): n is a, c, g, or t
  misc_feature (217)..(224): n is a, c, g, or t
  misc_feature (226)..(229): n is a, c, g, or t
  misc_feature (231)..(232): n is a, c, g, or t
  misc_feature (234)..(235): n is a, c, g, or t
  misc_feature (238)..(241): n is a, c, g, or t
  misc_feature (243)..(243): n is a, c, g, or t
  misc_feature (245)..(265): n is a, c, g, or t
  misc_feature (271)..(271): n is a, c, g, or t
  misc_feature (280)..(280): n is a, c, g, or t
  misc_feature (284)..(284): n is a, c, g, or t
  misc_feature (289)..(289): n is a, c, g, or t
  misc_feature (307)..(307): n is a, c, g, or t
  misc_feature (309)..(309): n is a, c, g, or t
  misc_feature (324)..(366): n is a, c, g, or t
  misc_feature (381)..(381): n is a, c, g, or t
  misc_feature (385)..(385): n is a, c, g, or t
  misc_feature (389)..(389): n is a, c, g, or t
  misc_feature (392)..(392): n is a, c, g, or t
  misc_feature (400)..(400): n is a, c, g, or t
  misc_feature (403)..(403): n is a, c, g, or t
  misc_feature (405)..(405): n is a, c, g, or t
  misc_feature (413)..(414): n is a, c, g, or t
  misc_feature (425)..(425): n is a, c, g, or t
  misc_feature (427)..(611): n is a, c, g, or t
  misc_feature (847)..(847): n is a, c, g, or t
  misc_feature (937)..(937): n is a, c, g, or t
  misc_feature (956)..(956): n is a, c, g, or t
  misc_feature (963)..(963): n is a, c, g, or t
  misc_feature (966)..(967): n is a, c, g, or t
  misc_feature (982)..(982): n is a, c, g, or t
  misc_feature (985)..(985): n is a, c, g, or t
  misc_feature (990)..(990): n is a, c, g, or t
  misc_feature (993)..(993): n is a, c, g, or t
  misc_feature (999)..(999): n is a, c, g, or t
  misc_feature (1012)..(1012): n is a, c, g, or t
  misc_feature (1019)..(1019): n is a, c, g, or t
  misc_feature (1031)..(1031): n is a, c, g, or t
  misc_feature (1039)..(1039): n is a, c, g, or t
  misc_feature (1046)..(1046): n is a, c, g, or t
  misc_feature (1050)..(1050): n is a, c, g, or t
  misc_feature (1062)..(1062): n is a, c, g, or t
  misc_feature (1064)..(1065): n is a, c, g, or t
  misc_feature (1068)..(1068): n is a, c, g, or t
  misc_feature (1083)..(1083): n is a, c, g, or t
  misc_feature (1087)..(1087): n is a, c, g, or t
  misc_feature (1090)..(1091): n is a, c, g, or t
  misc_feature (1098)..(1098): n is a, c, g, or t
tctttaatgtttactttaaagttgnctcacggtggggttgtatatgtgtttagtaaagtgtgccaagtgctnanantgagannagtcnagttnaaattagtgtactccacgagggtgttttctgtgcccagcaaggtngnggggggggntngggnttttcttggttngggggggtttgntggnggggtgtnttnggggagtntgnnggngnngtntnnnnnnnngnnnntnntnngtnnnntntnnnnnnnnnnnnnnnnnnnnncgtttngtggggtgngttngggtnagtttgggcgggggtggngnggggcgagggtcgcnnnnnnnnnnnnnnnnnnnnnnnnnnnnnnnnnnnnnnnnnnntgggtataaaaaaanatgnatanatngtaaatantananaatagtanngaaatgaatanannnnnnnnnnnnnnnnnnnnnnnnnnnnnnnnnnnnnnnnnnnnnnnnnnnnnnnnnnnnnnnnnnnnnnnnnnnnnnnnnnnnnnnnnnnnnnnnnnnnnnnnnnnnnnnnnnnnnnnnnnnnnnnnnnnnnnnnnnnnnnnnnnnnnnnnnnnnnnnnnnnnnnnnnnnnnnnnnnnnnnnnncacctgcgtgcgagcggtagtgggcagtgggattagcctcccgcagagctctggcctcctccagagcttctctgtatcgggagggccaggcctgggggtctttcttaaagaccctggccaggaactccatgatttgcatcttggtgatttcgcggctggcccgggagccccaaaagaactcgtattcgggcggctccacgtatgggacgcgctggtacttcaggtaattcatttgngacgaactcctccgtgatgagcttccgcacgtccccgaagtggagtgcttcttccagggccgcagccccaggatgcgcaacagttcacanacggcgctctctctggcgncgcggcnctnnacgtagatgaggctnagnatatnagnaggagnctgtcatgggcangcggttntacacgcacccngtgcagtnctcgggntcancgctttgacagngnnacnccatggtgtgagggnggtnacnntggtgtngcggacaccgggcgggatgag

SEQ ID NO: 480152 - DNA, 896 bp, Homo Sapiens
ctcgctgatagctgacctgggagcatggctgcgtgggcgtggaccaggtctgaggcgaggaagcctggaagccagtgctgcggggagcctcccccttcgactgcagcctcgctccgtgccttctgcgcgcctgggatccctggagcctgcctagtgttctgtgcgctccctgcccagtgcctggtgccctgccgccctgcctgcgccccaggcaggtcccaggcctccggctgctccctggccgaatgcccctgagtgcgagatcgagctgtcctgagcgcctgacctgcagccctggatctgcctgctggcatgcgcggcctggaacagaggtgtctgcggttgtcagcccgcgaggcctcggaagaggagctgggcctggtgcacagagtacctttcactgctgcgcggctggccgcaggggctggactgcagctggtggacgctgtgctcactggagctgtgcaaaatgggcttgccctggtgaggcctcccgggcaccatggccagagggcggctgccaacgggttcttgcgtgttcaacaactgtggccatagcagctgcacatgccaagcagaaacacgggctacacaggatcctcgtcgctggactgggattgtgcaccatgggccagggtgatccagtatctctttgagggatgaccccagacgtcctttacttctcctggcaccgctatgagcatgggcgcttctggcctttcctgcgagagtcagatgcagacgcagtggggcggggacagggcctcggcttcactgtcaacctgccctggaaccaggttgggatgggaaacgctgactacgtggctgcttcctgcacctgctgtcccactggcctttgagtttgaccctgagctggtgctggtctcggcaggatt

SEQ ID NO: 480153 - DNA, 451 bp, Homo Sapiens
ttttttttgtcgccacagcagcggacacgtttaatggcaggcgcctctacagttacaagacatgcctgaggtcagttcgcccccttagggggcactccccgagctaaacacagatgacagcgacccagggtgctggaggcccggggtcacctgaggactgcagaagtcctgcgctccgctaactgtgtggacacgcggctgccaggggcacaggtaggcaacatggatgggaagagagcccaggccgcccccgtctcacagcctgggcctgcccctgcagggcccgggaaccgagcccaggcctctgtttctctgagaggctggagcagagcccttggtggccctggaaagcggctgcaaggtggccttagtcaggggaggcacgcgggcgtcgcgtccagaatcttctgggctatggaggtgagtgcagcgaaggcggggccggacgcgt

SEQ ID NO: 480154 - DNA, 879 bp, Homo Sapiens
  misc_feature (521)..(613): n is a, c, g, or t
attaggctaggtacgaggctggtttgaatcggccgagggggaggcggctagttacacacgcacctgagtgagtggcaccagaggaccctctccatgtttagggacctcctgggcctcaggagcgtggcgcccgcccctgggcggactccccccatccgcgggcgcgaatggtccgggccgcgtccgcagtgctgctggctgctccctggttgctgggtgcaaagtgctgggttctgggtttctggattcgcgggccgttcacacgtagcctgtgccggctcctcgggtgagtccgtccgcgcgcggtgccccgggacggcctaggctgccgggggtccggggccccaggcattccgggctgcagattgacggggatcccggatgcacctggcgcccccgcgccctcaccgacgggtccagacctggtgggaagaaggtgcggggacgggtccctgaggatcccgatgcctacgagccaagatgctcagctttataggtgtgacctacacatgtgacttcannnnnnnnnnnnnnnnnnnnnnnnnnnnnnnnnnnnnnnnnnnnnnnnnnnnnnnnnnnnnnnnnnnnnnnnnnnnnnnnnnnnnnnnnnnnntgcaggagggagcctcggaagcagggcctggccggcagaagcacacctgctgtcaccagtgaccacaggcagcatgaagacccccgtggagctggccgtcagtgggatgcagacccctcggccttcagcaccgctgccgaggtggctaccgggtcaaggccaggacgtcatatgtgggatgagactctgtttgggcagcccagcaggcacccggctaaccccaccggacttcgatccggcctgtgtggagaaggctaacagaacca

SEQ ID NO: 480155 - DNA, 1129 bp, Homo Sapiens
  misc_feature (118)..(159): n is a, c, g, or t
  misc_feature (741)..(741): n is a, c, g, or t
  misc_feature (771)..(771): n is a, c, g, or t
  misc_feature (853)..(853): n is a, c, g, or t
  misc_feature (918)..(918): n is a, c, g, or t
  misc_feature (973)..(973): n is a, c, g, or t
  misc_feature (996)..(996): n is a, c, g, or t
  misc_feature (1017)..(1017): n is a, c, g, or t
  misc_feature (1045)..(1045): n is a, c, g, or t
  misc_feature (1051)..(1051): n is a, c, g, or t
  misc_feature (1065)..(1065): n is a, c, g, or t
  misc_feature (1076)..(1076): n is a, c, g, or t
  misc_feature (1083)..(1083): n is a, c, g, or t
  misc_feature (1108)..(1108): n is a, c, g, or t
  misc_feature (1118)..(1118): n is a, c, g, or t
  misc_feature (1124)..(1124): n is a, c, g, or t
ttttttttgaacatgacctgttgccttttatttaaaaactgttactagccctgcctggggctcctatacaaaaacaaaacacaacctaaaataaggtttcttcctgaccccagagacnnnnnnnnnnnnnnnnnnnnnnnnnnnnnnnnnnnnnnnnnnctcaacaaatggaatgtgtgctgggaagggccacctggaagcccccactccacccccacccgatcctcaggatggcgctgggctgtcccctcgcctctgtccttgccagaagatggaggagaggcggcccaatcttctggggtgctccgtgggagccgtgtgctgatgggctggttaccaggccggggccgtgttggcaagacgcctcatccgcctcgtgttcctgttctggtcgcggatcttcttctccatctcagcgtctgttagagtttccagcagtgggcaccactggtccgcatcgcccgtgttccggatggcaatctccactgtgggcagagggttctcgctgaaggcgtaggtcttctgatgccagctcagctgttcccggatgctgtatgcgatggtggtgacaaactccccgcccaaccccagctctgagcacagcttcagggcaaacttctctggtgagttctccttctctgacatgtcccactcaaactggtccaccagggaaatgtttcccacatggatgttcagcttgatgatgacgcgctggtctgactggtcctccaggatgctgtncgtggggtaggactcgatctgctgtctganggcagaggcgatggctggcacaaacgtcagcgggttcaaatccagatcgtcacagaggatttctgaaaacatctcaggcgtnatcaacttctcattcatgttccaggtgaaggcgtttcgcagcttctgcccatcgatctccatgtncagccggatggggaccagcacctcgggctgagatgcgtcctcatggatcacagcngggtcatgggtcatcaaagcaanggggaaggttctcttcttgtntcggccatgcggttcctgttgaagggtntagagntggcacggcatctnagttgtgggancgttggnagggtgggtccactggctgttcctnttggcctttnttcctnaggag

SEQ ID NO: 480156 - DNA, 767 bp, Homo Sapiens
  misc_feature (38)..(38): n is a, c, g, or t
tctttctttcttccctttccccatccccggcccaaacntatgaaagactggtaccggtccggaattcccgggatggagaggctgagtggttggtacgctgctcgctggcctcccagtcttcccagcaaccggtgacactgcccgcgccagactgaccactagccgacgcgggcgagagggacaggagcgtgacctccccatcccgaggggccggacgctcgggcgcctccccgctccccccactcggaggccgcgcgcgccgttagccccttcctcgctcccccgccccagtcccgcagtccgggaggcgggggtcggcagccggctgagtgggaaccgcgcggtgtctgaggaggcagtcggcgaccggtttccacttcaagcgtgacccttttgcctgtgggatgagctccagcatggggtgaggtacagaagagagacttgaagagcgtgccttgggactcaagcgccaaacctgtaccctagcgagtgtcctactccgcatccgtaatggaaggaaatgcccatcttactccagaggcacaagaggaggacactcccatgcgggtactcctgcccagcgtggtggggcagcagaagctccagagtccagacttgcagattcatcatattcaaaccttcacaaacaacttggatatcctgacaattattatagaatggatgccccttgattctccccagcctttcctgaaaatgggaaaagtgttcttggataatgccaccaacttttaataatgtaatttgtg

SEQ ID NO: 480157 - DNA, 572 bp, Homo Sapiens
ctcatagggtagttttatttaaatttcaaacaaaccaaagcagggaaaagagtcggccacggtgaatccgtccactctgtgctggacgtggctccaggacctggagctgacaggcaggaccgggcctagtgaggtaaactcggcaagtttattctggtggtgtcaggactcctccgtgccagagtcatcctcatcgtccccgaagcagctgtcggcctcctcctccacctcgccgtcctcgtagtagtcgtcgtagaagaggtctgagccctcgtcgggcgccggcgccttggtcttcacgcagtactcggccagcgtggtgggcaccttcacgccgtcacgctccgggtccaccttggtccctaggacctgtttgcggatgatgtttgtgtactcccgatccttccccttgctctctttccacttcctgtacatcacggaggcgtccacgtttgcgggcgagaaggtgttgggctcgttcaggagggagatcacactcaggagaatggtcctgtggggagagtgggtcggagtggggcggcccggggcacccagccttccggctcttctct

SEQ ID NO: 480158 - DNA, 1096 bp, Homo Sapiens
  misc_feature (106)..(154): n is a, c, g, or t
  misc_feature (195)..(205): n is a, c, g, or t
caggaatggacagccgtggtcctcgggggcgggtgaggggaccggccggtgctataaggcccctcccgcgtggctcagaatataggggttttccagtggggacccnnnnnnnnnnnnnnnnnnnnnnnnnnnnnnnnnnnnnnnnnnnnnnnnntgtaataagggcgtgggatccaattgaacccgggagacccnnnnnnnnnnnaaagtaaaacggaacccttcaaaacttcccccctgaacctggatatcggatttttccggaagttttcgtgatcccggaggatccacggcttcccgggttgcccgccccgttcaggggccaaactttcccggtcctattttaccttcaatatgggctccttttaccaggccactttctcgtgtaagaggatagagggcccactccgcttcctgtgctgttggaggtccgagaatgatgcctcaagaagagaacatacagctgcccgtatatggtagccattgcgatgtctctgttcggaaaaggctgggtttagttgacttaggcgcagctggtaattcaatgctcaaatttgggcagcttcgacatagtgccagccctaaagtgaaaaggctgcaggacattctgccaggaccgtggtagacagcaagatcacggcgctctcggggcagtacatgtaccaattcacattgagattgtggctcttcaagagtttcagactccgtttctctggtaatacctggtaaaattcgattccttgatctgttatgaagacaatttcagttgaactagtccagcagaatcctagaatgttggcattcttagtctaaatgagatgggattcctatcatctgggcctttaactaccacgccagtagctccaccagatcgaacagcaaaaacctgcttgttggcctcatcgaagaagacgcagttgacagggttcgccttctcgaactgcaccggccgctcgcacagctccagatagtagtcctcctcgcccatggcgggcgccgcgcccgcggcgggggccccgggggcggtcgccagagtggagcaggatgcgcggtggagcccggcccggactgtagcgatcccgggaattccggaccc

SEQ ID NO: 480159 - DNA, 1134 bp, Homo Sapiens
  misc_feature (1005)..(1038): n is a, c, g, or t
actataaaaggcaactttgtacaaaaaagttggcaccgccggcggcgagagaagcggatcccgtccgagccccggccccaagtaacgccgccgccccggagccgccttggaggtccccctccccactaagtgcctctttgcatagcaccagtccccacccgcacgctctctggaccactacagctggacgggcaatggcgggtcggggaggcgcagcacgacccaatggaccagctgctgggaacaagatctgtcaatttaagctggttctgctgggggagtctgcggtaggcaaatccagcctcgtcctccgctttgtcaagggacagtttcacgagtaccaggagagcacaattggagcggccttcctcacacagactgtctgcctggatgacacaacagtcaagtttgagatctgggacacagctggacaggagcggtatcacagcctggcccccatgtactatcggggggcccaggctgccatcgtggtctatgacatcaccaacacagatacatttgcacgggccaagaactgggtgaaggagctacagaggcaggccagccccaacatcgtcattgcactcgcgggtaacaaggcagacctggccagcaagagagccgtggaattccaggaagcacaagcctatgcagacgacaacagtttgctgttcatggagacatcagcaaagactgcaatgaacgtgaacgaaatcttcatggcaatagctaaagaagcttcccaagaacgagcctcagaatgcaactggtgctccagggccgaaacccgaggtgtggacctcaggagaacaacccagccagcgggagccagtgctgcagcaactgagccccctttgcctgcccgctgcccccgcctcctccgcctgaatgacccgactggaatccactctaaccaaatcgcacttaacgactcgggccaccctcggtcaccccaacctctggctctgagccctgttctgaccaaatcatgatgatgagtatttnnnnnnnnnnnnnnnnnnnnnnnnnnnnnnnnnnacggaaccaactttttctgtattttgtattgtatgttttcttcaacatgtaaccaatcagtatcttgtcaatatagtcagccgatcgatcgacctc

SEQ ID NO: 480160 - DNA, 981 bp, Homo Sapiens
  misc_feature (885)..(885): n is a, c, g, or t
ttggggactacagtgatgagcgcgactgcccaggtgtgaaacgccccagatgccctctgaattacttcgcctgccctagtgggcgctgcatccccatgagctggacgtgtgacaaagaggatgactgtgaacatggcgaggacgagacccactgcaacaagttctgctcagaggcccagtttgagtgccagaaccatcgctgcatctccaagcagtggctgtgtgacggcagcgatgactgtggggatggctcagacgaggctgctcactgtgaaggcaagacgtgcggcccctcctccttctcctgccctggcacccacgtgtgcgtccccgagcgctggctctgtgacggtgacaaagactgtgctgatggtgcagacgagagcatcgcagctggttgcttgtacaacagcacttgtgacgaccgtgagttcatgtgccagaaccgccagtgcatccccaagcacttcgtgtgtgaccacgaccgtgactgtgcagatggctctgatgagtcccccgagtgtgagtacccgacctgtggccccagtgagttccgctgtgccaatgggcgctgtctgagctcccgccagtgggagtgtgatggcgagaatgactgccacgaccagagtgacgaggctcccaagaacccacactgcaccagcccagagcacaagtgcaatgcctcgtcacagttcctgtgcagcagtgggcgctgtgtggctgaggcactgctctgcaacggccaggatgactgtggcgacagctcggacgagcgtggctgccacatcaatgagtgtctcagccgcaagctcagtggctgcagccaggactgtgaggacctcaagatcggcttcaagtgccgctgtcgccctggcttccggcttnaaggatgacggccggacgtgtgctgattgttgacgagtgcagcaccaccttcccctgcagccagcgctgcatcaacaacccatggcaagctataag

SEQ ID NO: 480161 - DNA, 1223 bp, Homo Sapiens
gggagtccggccagcagtccctcctgtcctacactcaggcaagaaaatcatatcaataaatctacaagtttacataaatagataaataattacagcgggctgcggggctctggtgccagtctcatgggttgtggcagggccgcagctctggcttggtgacgggcgtcctccagcaggtgcacagggtgccggcccaccaccacatcccgcaagcagcccacaaagcctgttccgtaggccttgggcagttctgggtcccacgggcagctccggcaggcccccaagccacagggctccatcagtgtccatgctgcgtggtcgccacagcgtgggaggagccggtcacatggggccatcattgcccacctgcagggaaccttccctctgctccctatgtgccacgacccgcaaccagcaggttggtgttgacgggcacgttggaacgcagcaccacgggctgggagcccagtttttagctcagttgcaggtgccacgtccacatatggccagtgccacatagtctgcccgctccgttggccttgccactccagagcaccagcccctgcgtggcctcagtgcgcaggctcagttcaaattggttgctctgcagtgccttctctgctgtgaagggccccggaatccagagtttcggggacggggatctcattggccagttcgctctcggtcacagcgttgaggtactcgacaaaggtccgcccagtcaaaaggccaaggtatccacgtcccccagctgactttctccaccagccccttctcgcaatgtgcggtcctgagaatcccccgggacacaggcacacataggcagcctccctcgggacagcaggaggccccaattgaggcaggggtggcctgaggcccgggtgcaggggtgacctgcaaaggacgtgacgtccacctgccgcagcacgtgctccggggtcagcagctggcggcctccgagggagaccagctggatggcaccgtcgaagccagaggacacggcagcagcacagggccagcttgctgaagtcgggagcgccccctacgtagagcggctccttcaggttgaggacggtgtgcaggaaccttgcgggatttcggggactcccccaacacacgggggccgtcgcccacacgcacgggcacccttgcggccgtttcgctccagtgagacctggtcccgacgcgtggtcgacaatatccaaagattccggaccgtacca

SEQ ID NO: 480162 - DNA, 1333 bp, Homo Sapiens
  misc_feature (20)..(21): n is a, c, g, or t
  misc_feature (42)..(42): n is a, c, g, or t
  misc_feature (54)..(54): n is a, c, g, or t
  misc_feature (62)..(62): n is a, c, g, or t
  misc_feature (66)..(66): n is a, c, g, or t
  misc_feature (81)..(81): n is a, c, g, or t
  misc_feature (100)..(113): n is a, c, g, or t
  misc_feature (117)..(117): n is a, c, g, or t
  misc_feature (161)..(161): n is a, c, g, or t
  misc_feature (164)..(164): n is a, c, g, or t
  misc_feature (175)..(175): n is a, c, g, or t
  misc_feature (187)..(187): n is a, c, g, or t
  misc_feature (189)..(189): n is a, c, g, or t
  misc_feature (222)..(222): n is a, c, g, or t
  misc_feature (230)..(230): n is a, c, g, or t
  misc_feature (236)..(240): n is a, c, g, or t
  misc_feature (242)..(244): n is a, c, g, or t
  misc_feature (249)..(249): n is a, c, g, or t
  misc_feature (251)..(251): n is a, c, g, or t
  misc_feature (253)..(253): n is a, c, g, or t
  misc_feature (255)..(255): n is a, c, g, or t
  misc_feature (257)..(257): n is a, c, g, or t
  misc_feature (261)..(261): n is a, c, g, or t
  misc_feature (265)..(266): n is a, c, g, or t
  misc_feature (268)..(268): n is a, c, g, or t
  misc_feature (272)..(272): n is a, c, g, or t
  misc_feature (276)..(276): n is a, c, g, or t
  misc_feature (278)..(278): n is a, c, g, or t
  misc_feature (280)..(281): n is a, c, g, or t
  misc_feature (283)..(283): n is a, c, g, or t
  misc_feature (289)..(291): n is a, c, g, or t
  misc_feature (293)..(293): n is a, c, g, or t
  misc_feature (299)..(300): n is a, c, g, or t
  misc_feature (307)..(307): n is a, c, g, or t
  misc_feature (315)..(315): n is a, c, g, or t
  misc_feature (317)..(319): n is a, c, g, or t
  misc_feature (321)..(321): n is a, c, g, or t
  misc_feature (326)..(326): n is a, c, g, or t
  misc_feature (328)..(329): n is a, c, g, or t
  misc_feature (334)..(334): n is a, c, g, or t
  misc_feature (341)..(341): n is a, c, g, or t
  misc_feature (344)..(345): n is a, c, g, or t
  misc_feature (347)..(348): n is a, c, g, or t
  misc_feature (350)..(350): n is a, c, g, or t
  misc_feature (823)..(901): n is a, c, g, or t
  misc_feature (961)..(961): n is a, c, g, or t
  misc_feature (966)..(966): n is a, c, g, or t
ggctgaacaagcacccagcnngggggctagacaagccaattnatttcccatcgntgagtggntcgngggaggcagcgccgnccttaatcacatggtgttnnnnnnnnnnnnnntaantaggggcacgtggcaggaaggggaggcaaggccaaggcaggggnttnccccaccggcngccccccaaacncntacccatggcccccaataaatatttgcaggggntgccaggntttttnnnnntnnnggggntngntntncgcnaacnntntttnaggnancnntnaaattnnntngagccnntttatcnaccccgcntnnntnttttnannttttntttaaanagnngnngntttttctgcaggacctctgcggcctcctttgttcagtgggtcctcggggttgggctccaaagaagagatactgcaggccataaattatggagtttatcgtaaggactggcttccagtcctctctgaggatgttgaggcagacgttgccctcgaggtcaatgttggggtgatagaccattgtctcacacttcaccttggggggatcatgcgggtaaccctggcccaccttaaaactgaacacaaacttcccactcttgtagaagccctcatcaggacagatgaccagcttgaagttgaggaggtcgtctggatctgagaagctgatatcacacgtcttgggcaggttcagctcgtttatgtccttctggatccgcagctgcgccgccgacgccttcttgctgctgcccttggtgccgcccgccgactcctcctccttcttctgctgcttcagcgagaacagcttgatcatcctnnnnnnnnnnnnnnnnnnnnnnnnnnnnnnnnnnnnnnnnnnnnnnnnnnnnnnnnnnnnnnnnnnnnnnnnnnnnnnnccgctcctcggacccgcagctgcggcctcctccgctgctgccgccacccgcccggcctgncgcgncctccgctcctcttcgcgcccaccgcgcggcccgcctcggctcccgtagtccggctccggcctggcccagcgcctcggactcgctcggcagcgctcggccaaattcggctgttctcgggcccgcccggccccgcccccactgcccggggccgctccttccttgccctcgccaactctggtctcaggcccccgctgcagctgcggactcggggctcccccgaccgtgccgtttggccgctcagctgatccctccgcgagggggtgcggactaggggtgggaggaggacacggcagactgcggtgacgcgcgcggtactggagatcgtcttccgcgcagcagcgatcccgtaatccgggccgtacagct

SEQ ID NO: 480163 - DNA, 847 bp, Homo Sapiens
tgctatatataattggctgattgtgcgggtgatgagcgccccctcccccagcccggtcccagctccatgttcctaagcctgcctcactggtttcggagggctggagagcagctcagctcgctagctgcgcgcttcccggcacaggcagtgccactgcgcaggttgatcagcgaaacagcatccattttaatctgcggggagcccctgccttaccagggcgttctctccgcccgccggtggatgctccgcgcctgccctccgcagcctcgctcagcagtcctgcgttggggtctgcgccctaggatgcactgagatggtacatcaggataactgctcgtatcaggcacagaaaaatgagagagagtctatcagacagaagttggcacttggaagcttctttgatgatggcccaggaatttataccagctgtagcaaaagtgggaagccaagcctttcctcccggcttgaatgaagagttggtccagctgcttctcatccgagatgagctgcacacagagcaggatgccatgctggtggacattgaagacttgaccagacatgctgaaagtcagcagaagcacatggcagagaaaatgcctgcaaagtgaaaagaagccattcaaccagagaacaagctagaatttatttttcttctgtggttgtaaaaaatgcttgctaaaggtggcgcagaaacaaatatcagtgttagtcattgataatgtctggaagcttaatgtccagtgattgggcctttgcttcttaatttattttaattttttacttgtgccacttaatatcaggcattttaataaatattgttccacaacaatgtccgtactgaccacac

SEQ ID NO: 480164 - DNA, 698 bp, Homo Sapiens
  misc_feature (45)..(45): n is a, c, g, or t
  misc_feature (70)..(70): n is a, c, g, or t
  misc_feature (81)..(82): n is a, c, g, or t
  misc_feature (85)..(85): n is a, c, g, or t
cggggaacgaaagggggaagacgacaggagagacaagaaaggganaaacaggggacgggaggagagaagncccaattctcnncanttccagaccatgttatgcagagagtgagtagcaagggggccctagtgctttggagtgagagtcgaaagtgatggaacttgcctgcaccacatcctgcttgccccacacacgcacacgcttgctcgctgcgcaggccaccacagtctgtctgggcccagccagcgctggacgccattacatggatgcagcccaggatggtagggctatagagggaacatttggtagagggactgtttcgggtccactgatttccagcaaattcttgtctagttcctcctgttctagttcttctaattccgccatgagctcatcctcgtcaaactcttctccaaaccctacaggtttcgaaattgctgttgaaatctcctctgcaagttcttgctggtcagcaatgtcctgcattaactcatcaactttatcgatgtccatgttgtcatgggccgccttcatggccttggcggcatagcccatgttcttgagcacctcggtgttggtgttggcattctccagggcctcccgctggaactcgatggttgataatgtgccgtcgatgtgcgccagctgcttctcatacctcttcttacgcttcagtgcctggagggccgcgcgcttg

SEQ ID NO: 480165 - DNA, 542 bp, Homo Sapiens
ggcggtcggcgtggtaagtgcctgctgtttataatgttgaatttctgtaaaataaactgtatttgcaaatccaacattgagcttctggactacgctgactccactgctgaatcctcaatggaaagggtcgactggttgcagttgaaatgacctgaaatgtagcctctgtccttgtaagtcagttgacttgccgcacatctctttgtgtacttgtacggtactggcagaaaagtcatttttcttcctccagagctgtgtttctgtccatcacctgtgtattggccctgtgtttaccactctggcccactcctcacccccttgctcccctggtcttctggagtttgtgacattgatttgaaatggatggtgttctcttgagagcaagtgagattgttagaattaagttccaactatacagttttctaacatagctataaggtccttgttgctgtttgtgataactgatagataactcattggaaacgtgcatacatttatattcagatgaaattatggtttgcactgtctattaaatatctcga

SEQ ID NO: 480166 - DNA, 1498 bp, Homo Sapiens
  misc_feature (220)..(220): n is a, c, g, or t
  misc_feature (222)..(222): n is a, c, g, or t
  misc_feature (384)..(384): n is a, c, g, or t
  misc_feature (531)..(531): n is a, c, g, or t
  misc_feature (1178)..(1187): n is a, c, g, or t
  misc_feature (1479)..(1479): n is a, c, g, or t
tttttcccttataaaataattactgtagtcaatagtaggctatttattgttgtttttaacatccatacttggcaaaatgaaaagttgtcatcttatgttagtccccagttgttttctttgaaactgtactaaactctaaaaatctagaatgggaactactactattgaaattatcagtgagaacttctgtgattttcctttccatcaagcccagggcttngngggaggcatgtacaactcactgccttagttttatttaggaaaactgaagcttcatagcagctttgagtgagctggaaagagttttctcgcatctaagacattttctttaaaggataaattgtatatcctggtttccatcaatcttcaaggagctggattaanatatcattgactgctgaaatacatattacaacatagttcctcaaagtagtatctgtcatgatttaattattgcttcatctgaatccctctcacattgaagatttactctattttgtaaaatttagcatcattgggttattttaaaanatatttcttaattccgttatccatttccataaccttcagtcaaaagatttaggattaaacgctcatgtcactgagaatccgtatttgtaattggcaaaatcatccagtattccaggatcactagaagtaatgtgaagttgataaaattgaaaaatgtcctatgtggtttgacacagacttgagaaaatacggggtccctgtgagttcggtcctaggtgagttatggtgcatttgatgctctgttgttttcttccttctttctactttccagtgaaatcagatgagttacagaccatcaagaaagaattaacccagatcaaaactaaaattgactccttgctagggcgcctggagaagattgagaaacagcagaaggcggaggcagtttctacagataaagtgatctgaaataacgcatgatgccgcaaagcagaaaagagaaactgtgacaacccccagaaatgtgaaaggaggtttcttactggacagcagcatctttggttcaatttatataaaaacccaaataaataaaatggacagtattgctcagttttagaaattccatttcttctatgttttaagctgtacaattgtcaggtttttatggtttaaattgtaaatgtgttttcccctttgcttaattatgnnnnnnnnnncagtcttaaaatgtgaaaggcatttatgaatggtaagggagacactatatacaaatgtatatttgtaaaagctatttttatgattagcatgtttcactgttgatcatatataaagtcaggtgatattgcaattctgtatttaaagcttatttgcaacaatgtcatgtaagaaaagatgcatcttatgctaggttttataatgtattataatttatagtgtaaagtcttgagatcataatggtaaatacttggaaagattattggtaacctgcgtaagcgcgcttgtatttantaagaagcaggttttgaga

SEQ ID NO: 480167 - DNA, 213 bp, Homo Sapiens
aaaataaaaaatgtaatctttattagttttgcacattttaaatgttggttagcattatttagcataatagtagcattttccagcatgcagttcacgaatacagtttatctaagtagttttaaggaaaagaggagcctatggtttgcttctgtaagaaacacaaaatgtcctgatgtaattgactatataagttgactactctgtttttgtggg

SEQ ID NO: 480168 - DNA, 571 bp, Homo Sapiens
aattatcacttttagtaaaagcacaaattagtgctcccttttttccaagtatctgtttacccaagttatagttccctcttactctcccacctgatcacctgccaccctgaaatctgccactctgctcagcattacccctctcccatactgcaatacctgattgtcttcaggcaaagaaaatattgttggaactgcagtttgttttaaatatcgaataccccatctgatgtcaagagagtcaggagtaaaatggtcactacatagaaactggtatttactgggaacccatgaatctcgcttcatattctttaaccacttttccagtctttctttgtcatgtagaggaaatggataaaaactcagcttccggtctttattgtttcgtccccggcggttcttacaacaaatcgctgcgcaatagcggggcatgactcgggtgaggcccctggagaccggggccggcgacggatgcagtgcggccctcctcactgaggatgcgccacaggtccaggcctcttgagcccctgcgcctgcgctagcattctgccgggaaagccgcctcgactccgct

SEQ ID NO: 480169 - DNA, 916 bp, Homo Sapiens
  misc_feature (12)..(12): n is a, c, g, or t
  misc_feature (22)..(22): n is a, c, g, or t
  misc_feature (64)..(64): n is a, c, g, or t
  misc_feature (66)..(66): n is a, c, g, or t
  misc_feature (87)..(87): n is a, c, g, or t
  misc_feature (126)..(126): n is a, c, g, or t
  misc_feature (137)..(137): n is a, c, g, or t
  misc_feature (178)..(178): n is a, c, g, or t
  misc_feature (325)..(325): n is a, c, g, or t
gagtcaaaatangctgacaggnctccctgagcaggggcagaatttctttcgagagacctgggtntnccttgaagataggcatggagnttagggtgggtacttgaggcaggggtcagcttcaggggnggagagtgggngcgttccaggacttcacagatcgttgtttggagtgccacanggggacagaaaatagccaactgccgcactggctcattgtgagtgttgaaaaagatagtcatggcaaccaggacatcatagctgtgagcctggcagaaagcatggagatctgcaaggaggttagacctctgcagaaaggcctccaaanccatatatattgcactaatggccacctttgacgccttgtctatagatagtcttctggtctttttctcagcatctgctcagtggtcagtcttggataagatatgatggtcgacaaggatgagggtgagttggccagcctggtataatgcatggaggtcaatctcatcccgaaaaatcaagatactctctggaatatgaaccttctgaagaaagaagacaatttcacctcgcagagttatttcagaactttttatatttaaaactggcacaaagacttcctcagcctcatttttcttttctagttaaaaagccagggcaagagcagacacctgtggagtccaaatcacaggcttcatttcccagcacaacatgtagaggtcgggactcctgcagagcagctcgacaaccctgcaggtagtcctccatgatgaagcccaaagtacgccgtcgcccctggtcgagtagaggtgcccctggtcgaggagaggtttccccgacgaatgcagcccgcccgggactcagggactagaggccagagtcaggaggcgggactcgaacccgccacacggcgaatcggcctccgatcccggga

SEQ ID NO: 480170 - DNA, 832 bp, Homo Sapiens
  misc_feature (264)..(309): n is a, c, g, or t
  misc_feature (632)..(632): n is a, c, g, or t
  misc_feature (643)..(643): n is a, c, g, or t
  misc_feature (763)..(763): n is a, c, g, or t
  misc_feature (777)..(777): n is a, c, g, or t
  misc_feature (796)..(796): n is a, c, g, or t
  misc_feature (815)..(815): n is a, c, g, or t
gccatggagaaaaaaacaagaaaggtttatttaaatcagagagcctctgaaggcacctggtttctgtcaaatatatttttaaaaaaggcagtaacgtggcaactgtacagggtgcatgatgggtaagaactgggcatggggagttgggagggggacatggagagaacacagaggaggaggcgcaggggagaatggagtatatcaggtcaaaccatacaacggtcagacccagctcctagccaccccaggacaggcagacagtcnnnnnnnnnnnnnnnnnnnnnnnnnnnnnnnnnnnnnnnnnnnnnngtgttctccaagcccaagagcctccactggcctgcacaagcagggatcagtcagagccaagagtggagaaactcaagcaaatgccgaggctacaccccgtccctcgactctgagccccaaacccacaatgtccccgctgtccgtccagaggctccctccccagggcctggagatccgggcccagcacacgccgtggtaagcagaagtcagttagatgaaaaaaccgtcagaccactcaggatcaccactggcagaaggaaggtgcaggaggcagacatggatggaggcaggcagtccttctgtccatcctttgtcacacaatngccccgaacangaaggagaaaacagcccccagtgccagacccagacacaggaagaaggccatgatggctcctgctgtctcttgctcagctggcttcacttttcttgggcccgaagcacatgcagagggctngcgaggtagcccgntgatgaagggcaaagcagncatgaagaagatgaaccangcatcgtgctcgaagac

SEQ ID NO: 480171 - DNA, 1372 bp, Homo Sapiens
  misc_feature (354)..(354): n is a, c, g, or t
cggggccaatacccgtacgcccaccgggacagagaggagacagaagtgattaggggacctcgcagggggaggacagacgatgctcacctataaacatcgcctctgtactagatcccggagcgcgccgtccgatggctctacgtgtcgtgattctaattgagtattcatgttgcaatagtccctcccctatacgatatgggcaggagctccagtgatccgccctgtgtaacggggatttcaatatattgctccgtataggattatggcggtgtatcgcatactactgcgttgtttattcggtctgttgcggtggacaagtaagccgttttacgtcagatcaaccacccgcatgtngtatgggtgtcgcttcggctccggatcatgaccaccaggactgccaaaggggcgtacacgttttccctcgcggcgacgtaaaggaaagcctctcccagcagggcaggacgccgtaatgttcttttttcccctcgtatatacagacggttctatccttttcccctatagtacatgtgtcttgcggtttttgtccgcaaggaaggtcaagtagccccccatgctttcggaggcgcccttccgataccctcccgtatttacaatcgctcgagcgctttgttttttctgtggggatgacggggcgcctttcttgccccagtggaaactagactttttgggcttgtcccagcaagacttgggggatggggtttttcccctggagggcccctgggggttcaccccgttggtggtggggacccggcgtcccctttctttagggggcgaaggaacgcccgtttcaccttggaggaaagtttgtggttttcccagggaccacgggatcaccctttccctgagggccctgggactgtttttcttggagttgagccccctttacttatagacacagagtccccttgtccagaggggccagcgtttgcctttcccttgctcacagggtcctccttgcccaccgcgaggggctcggccttccgtgaggctgtgggagccgcctttccagaggccaccagacctgccttctccgaggacaggggatctccttttccccccgtcgctggctcagcctttactgcagatgggggacctgctgtccccaaggacctgggatcgcctggacttgaagacacagggtttgtctttcttgaagactcaggattcactttttcagcatgatgtctttctacttccagcagatatggggtcctcccttctggaggacaccgggtcctcttttcctggggatacagttcctgcctttcccacagacacacgctctgcctgtcccctcgtgccgaattcgccacccaggcctcgctacttaggaggttttccgactccctta

SEQ ID NO: 480172 - DNA, 164 bp, Homo Sapiens
caggcacagtggcagattttctttaatagatatatttcaaacagatacaacaaattaaaaaatctaattcacggcaggtaaacatgggtgctcaaaaagttccacatagacatttacacttgggccatcagtatttccctcacattcccttctgtcgtcttctc

SEQ ID NO: 480173 - DNA, 1480 bp, Homo Sapiens
  misc_feature (139)..(163): n is a, c, g, or t
  misc_feature (175)..(441): n is a, c, g, or t
  misc_feature (904)..(1111): n is a, c, g, or t
ttggggctaactggtccagaaatcgcccaggagaatgaaatggatgttccatttttttctactgacattgactagcatataaaaggtatagaaacagcactaagactttctgaaaatacctaatgaaaattttacatcnnnnnnnnnnnnnnnnnnnnnnnnngagacagagtcnnnnnnnnnnnnnnnnnnnnnnnnnnnnnnnnnnnnnnnnnnnnnnnnnnnnnnnnnnnnnnnnnnnnnnnnnnnnnnnnnnnnnnnnnnnnnnnnnnnnnnnnnnnnnnnnnnnnnnnnnnnnnnnnnnnnnnnnnnnnnnnnnnnnnnnnnnnnnnnnnnnnnnnnnnnnnnnnnnnnnnnnnnnnnnnnnnnnnnnnnnnnnnnnnnnnnnnnnnnnnnnnnnnnnnnnnnnnnnnnnnnnnnnnnnnnnnnnnnnnnnnnnnnccaaaaattttacatcttttatagagggaaaaaaactctttataccatggcaaggccttttctttcacaaaaagctgggcctactgaacaattcaagctgtgcagtagtagactgaaagcaggatttgttgaggagttacagctcctgtccagagcaaatcctgtagtgatacaaggagaatgtaaacttgccagcttagacagggatcagtcctgagactgctggcagtagcaaatggctattagagtaactgtataatggttttgcctgcactttctctatgtatatacaaatgtacatgtataaatataaaaattaagtgatcatggttcttggtaacctgtcccaagtgctgtgattcacacgcctgacactaaaaggttcttcctggtccagtcagccagctgtgaccaccagcagcacagctgagtgctgagaatctggctggaaagagaaacgtgnnnnnnnnnnnnnnnnnnnnnnnnnnnnnnnnnnnnnnnnnnnnnnnnnnnnnnnnnnnnnnnnnnnnnnnnnnnnnnnnnnnnnnnnnnnnnnnnnnnnnnnnnnnnnnnnnnnnnnnnnnnnnnnnnnnnnnnnnnnnnnnnnnnnnnnnnnnnnnnnnnnnnnnnnnnnnnnnnnnnnnnnnnnnnnnnnnnnnnnnnnnnnnnnaaaacctcctcataagcggcttagaaattattcatgtttggtacatatttattgcaagtcaagcagatccaacttttttgaaagctggtggtctaggagtatagttttaattatatttgtaaatactcaaaagtattagatgccagtctaatttaaatgcagtctgactgtagcgagtaactgacctgggcaatgaaaaaacagttgtatttttcctgtgggtttttcaaagaaaatatccctttttataccggattttagaaaaggaaaaaatcaattggcctaatattcggaaaatttgaatttggtgaaacctaattttggttttaattaccccgaaaaaaacaaacccctttataccaccagaaa

SEQ ID NO: 480174 - DNA, 972 bp, Homo Sapiens
ggaacggaagccgggagggaacgagggcggaagcggaccaggccaggcttgtgttcgcagccttgccggggctggggttccgatgtggtccccggagcgggaggccgaggccccagccgggggagacccggcgggccttctgccccccgagtgggaggaggacgaggagcgcatgtccttcctgttctccgctttcaagaggagtcgcgagtcgaggggagctgcagcgggagtcagacttcatggccagtgtagacagcagctggatctcctggggggttggggtcttcctgctgaagcctctcaagtggactctttctaacatgctgggagataataaggttccagctgaggaggtccttgtcgctgtggagctgttgaaggaaaaggctgaggaggtgtatcgtctgtatcagaactcgcccctctcctcccaccccgtggtggccctgtcagagctcagcaccctctgtgctaactcctgcccagatgagaggaccttctacttggtgttgctgcagctgcagaaggagaagagggtcacagtcctcgagcagaacggggagaagattgtgaagtttgcccgagggccacgtgccaaggtctctccagtcaatgacgtagatgttggggtgtaccagctgatgcagagtgaacagcttctctcacgcaaagtggagtccttatcccaggaagcagagagggtgtaaagaagaagcccgccgggcatgccgagcagggaaagaagcagctggtttttaacgcctaccaggctggggtaggagcactcaaactctccctgaaaggtggcccaggggagaagggataaagcctcctgaatcaaatccaaaagttctgtgaccccccggatgaaggttccccgactctgactggtggggtaacaaatgggcttagattttaacagggggaacccggaaaaaagaatgggacatcctccctttcgggtccccc

SEQ ID NO: 480175 - DNA, 821 bp, Homo Sapiens
agcggctgggagttaccgcccactcgctgcggcgcttctggctccagaccgccctccggatcggaccctgcgaatggttttggctgtatcttcatgtaggacctactccctatcccgtcggccgcggtgaatcccacctgcggtgctttaacttgtgtaacagagatgctgcctctgggagaggcggggagggacgggccaactggagcgggcggcgggagggtggagggcggggcgcggcttggggcctgggttcctttgccccttgcccaccagggaggggtgggagacgagagagggtgaactttcacctgcgagattctggtgaaacggggaaatatgcttcgagtcagtaaagctgcgcaagtgcacagtcaaggagagagtcttgggaaaaccaaaggatagttcccggagatgacttatggactgcggaaacgtttgtcagaggaaagaggcttcagtttaatgctgggcttcatcaccaggcctcctcacagattcctggtcccttctgtgtcctggactccggatacctcaactctcagtactttgtgctcagcccaggcccagagccatggctatctcctcttcctcctgcgaactgcccctggtggctgtgtgccaggtaacatcgacgccagacaagcaaacagaactttaaaaacatgtgctgagctggttcgagaggctgccagacttgggtgcctgcctggcttttcctgcctgaaggcatttgacgttcattgcacggggaccctgcaagaggacgctacacctgtctgaaccactgggtgggaaactttgggaagaatacaccc

SEQ ID NO: 480176 - DNA, 738 bp, Homo Sapiens
  misc_feature (258)..(258): n is a, c, g, or t
  misc_feature (527)..(556): n is a, c, g, or t
  misc_feature (610)..(610): n is a, c, g, or t
  misc_feature (658)..(658): n is a, c, g, or t
aaagagattttcagactaaatagaaatgtcaaaatgatgtatcaatggttcttttttagaacaagttttcaaagcataaaaagaggttgagagaaataacatatttattgattcacataagtatgtttttcttcattaatcgtctggagaaacccacttgtcattaatttgttttgggctaggttttcaaacttaccaaattgctttaaaaaagcaatttggaaggtaatttgataggctttccaacttaaccaaatnttttattgtaattcttggatagtatttttgtctttttcaattcatttgtctttttcagtatagtttttgttaaggcaaatgtcttcccttaatatccaaatattgctaataaacggtagaagatgctttggaaattaaaattatctcgctgttggttagacttaacactgttaatcttcagccaaatatcacatatggatcaaattattttcttttttgttgtttaccctatcctcaacaacatttttagtttaaattattgtagagannnnnnnnnnnnnnnnnnnnnnnnnnnnnnctccaaaataataaggtgcaaagctattttatgcttaactgttgctctgtcaanacagctatgcagtggagttgcatttgatgttctagagtttgattacangcagagttgtatatagccaaaacttctcttatcaaactctgttatgtaggcatatttatatataaattaaagactgttgt

SEQ ID NO: 480177 - DNA, 929 bp, Homo Sapiens
ctaggccgggcaacggagcccgctttacctccccactcggcgtccagtctcttagcaacgactccggcttcctaggaactgctcctttctcaaccattcctgcccacaacaccccagcttgctgccagcaaagcccctccacacccctcaaactccagacccttcacatcaatttactgttttcttcgacctcaccccagcaattttctctgaatcaaccccctttcctcctctcctaagtctctgagtttctctctcctcctgccatcctgagttctgccatccttaggggccgccaagacctctcttttcgttcctctcccgcctcagaccagcagccttttattcttagatcatgtctggagggaagtcagcccagggtccagaggaagggggcgtctgcatcactgaagcccttatcactaagcggaacttgactttccctgaagatggggaactgtcagagcaagatgtttcacactcttgatgaactgcagactgtccgcctggaccgggaggggattactactatcaggaacttagaaggcctccagaatcttcacagtctctatctgcaagggctccagcccatttcctgttttgaagaagaggaaactatgaagattcctgtacatcattcagatcctacttgaaggctgtttggctggtggtggtggtggtcgggttgatcttcagccttcccctgaataagatccagcaaattgagaacctggcttgcatcccctccttgcgcttcctgtctctggcaggaaaccaaatcaggcaggtggaaaacctcctcgacctcccatgcctccagtttctggacctttctgagaacctgatagaaaccattgaagctggatgagttccccaggagcttctcatcttcaactgtctggaaacagttgcacaaccaggatggtacg

SEQ ID NO: 480178 - DNA, 156 bp, Homo Sapiens
ttattaaaaatctcttatattgaaaataacattaagagcatgttgttttcataataaataaccccaaaatacctttcatttcaacaacaaagactttaggatacgataaaacaaatccaaatcagtagcttaatttaactgaaatgtttttaaagg

SEQ ID NO: 480179 - DNA, 904 bp, Homo Sapiens
caggaggggaggaccgcatggttttgcttgcaaggggatttgtgcaaccctgcagttcctgggtttttgtgggaagatcagccccaggttctgtcggttcccataagcccctagaatggtgttccttccaagtcttcccactcccgggctctgtggagtgtttgttcatcaatcctcttcgctccttttcttcttgttcttcctgttgctgagctgcttttctgaattcctctggtgctgccttggctattgcctgatccggtaatgctccatatttccgatgttgctcataccagtcactcaccgtcatagttggcagacttggataaccagctccaaatactttggcttgagccatgttccgagtgagaatgaagggtttcactggaggcctctcctggcgagatgagttagaagttgatgcctctgtattttaggcctgtctttgagatgccatagcaacgagtactaggataagccatggaggaattggcagtgtgattttcagcagagttgttcatggttttgggcagctcaaactctgccacatgatagcaatggcactgagttaagtagtttataaagtgttctcgagcccgctgcaaatgatctagacgcttgctggggttgacttgtttcatggtgagggctccttgaaacgctggcaccaaaaggtacttcaggtcggtggaagcaatctcttccaaatcttcatttcggctgaacaagtcgagctgcgataacatttcggcagccttctcaaggaggtccaagcccttgaacaccttctcctggactatccgggaaccggcgggttcagtcgccacttctacttcgtccagtaactgtctaccagtttcgaacagctcggggagccgcggcagctgtaactcgtcctcagcag

SEQ ID NO: 480180 - DNA, 242 bp, Homo Sapiens
  misc_feature (78)..(93): n is a, c, g, or t
aaccgactgaaatcactttgggatattttttcctgcaacactggaaagttttagttttttaagaagtactcatgcagnnnnnnnnnnnnnnnnttttcccagtcctttttttaagagacggtctttattgggtctgcacctccatccttgatcttgttagcaatgctgtttttgctgttagtcgggttagagttggctctacgcgaggtttgttaataaaagtttgttaaaagttaaaaaaa

SEQ ID NO: 480181 - DNA, 833 bp, Homo Sapiens
  misc_feature (22)..(22): n is a, c, g, or t
  misc_feature (44)..(44): n is a, c, g, or t
  misc_feature (281)..(342): n is a, c, g, or t
  misc_feature (406)..(416): n is a, c, g, or t
acatttttggtatatattttantaagcttgggaacctggtcgcncagtgtttctctggacaaatgtgaaactggataaagtatggataaagtcttgagttcctcagggtaactgtgttgatgtctcccgtcctcttcagtaaggcttgaatatgattttactcatcattgattctgcatagtgtacccagcaagacttagaaggacactgaacctgtcagagattttaagaggcacattttagtcactttgaatatggtagtggtgggcgcggtgactgannnnnnnnnnnnnnnnnnnnnnnnnnnnnnnnnnnnnnnnnnnnnnnnnnnnnnnnnnnnnngttacagtgagctgatcgcaccactgcactgcagcctggatgacagagtgagactttcttgggnnnnnnnnnnntgacagtgaagcagacttttagaatccgagatgtcattgcagaattattggtataaaattcagctgcaaagtgaagaaattgaaatggcccacacgttgatatcctgtggcaggttatacccttcatgttagcaaagacgaagccacgtcgctgtgttaagagggacaggctgggccggctgcagctgtagtggaagtgagggacacagggaaggaatggggagcagcaatttggggacagtagactggagtcactttctgactcaaaaagggtcaagtacttattaaaaactatcttggttttctgttcagacttaggctcattttgatcattttaaggtcccagtttcaaaaatatcaagtgaatttgtctcaggttttcagaaacaaaatttacaggaaggaagcaaaaggcca

SEQ ID NO: 480182 - DNA, 434 bp, Homo Sapiens
actgctttcttgattttatttcaaaagtacacaaggtcacaaaactagagcaagttgtttttcttaacaaattttgttcttacaaatttcaaaatctgcaccattggatatataagccagaaatcgtacatacaaaatctgaaactgacactgtcagttctatactttgcacacgtgaagtgtcagaatattttcttcagtagtacaggtgtatttatcactaaaattcacaattagggaaaagaataagtgaatcaatgaattgtggttctcttaaaacttgtgtcattaaataagttagcagaaaacacaaagttctgttttgatggagcttttagtctcgatgaccaaaaccaaacccaactgatatgtactatattcttaaattataaaataagataaattataaaagttaaccataatgaataagaggc

SEQ ID NO: 480183 - DNA, 103 bp, Homo Sapiens
taaaaggcttaaaatgtattttaataggttgatgctgcattactgctccatttttcagaaaaactccaaatatatgagacaaatcaaacacagtacaccaatg

SEQ ID NO: 480184 - DNA, 179 bp, Homo Sapiens
tttgagccccaggcttaagcctttccaaaaaataataataacaatcatcggcggcggcaggatcggccagaggaggagggaagcgctttttttgatcctgattccagtttgcctctctctttttttcccccaaattattcttcgcctgattttcctcgcggagccctgcgctcccgaca

SEQ ID NO: 480185 - DNA, 792 bp, Homo Sapiens
gggtcagggtcgggggtggcctgtaaggctgcacgagctggtccagcgactgcagcagtgtgtgggggctccagcaggcatccagggagggcaggaaggggtcaggcgtgcagacctccacacactcggtgtccgtggggatgcgcaggtagaaagcgtgcagcatcattctgaacggccggtcctcccggcccgagacttctccgtaggtcaggtcgcccaccacggggtggcccagggcactgcagtgcacgcgcagctggtgtgtccggcccgtgagcggcttcagcagcactttggagacaggatcgcctgcgtacagcccgtgttccagaaccacgagatctgtgaggcttggctttgggttctcacaaccaatgccaggtaagccttggtcacgcgccgctccttgaagcacctgtccgcgctgccggcggctgccttgtttagggccacgcacagcgccccgctggtggagaaatccagctggtggcagaacctgaacccgtagcaggtgtcagggtcggccagctcgggaaagcggtaccgcagctgcttctgcagggtcagagtctcccgccacgccttgctgtcaatgcgaacgtcccagtgcttgttgaccaccaggaagtcgcggctccggtacacgatggacaggttctccacgctgcctggctccatggccggcctgctgccgggccgtgcagtccaggcccccgatgccgtgcccggcgccggctccagccgcgcgcccgcgcgctggcgacccagagaccctggaagctccgccaa

SEQ ID NO: 480186 - DNA, 482 bp, Homo Sapiens; identical to SEQ ID NO: 162520

SEQ ID NO: 480187 - DNA, 783 bp, Homo Sapiens
gtctggcctgttcggaccgttcaacccgttcatggcgcagtaacacattgttgagattgtcattgacgatgagcagctcctctgtcagctgctcattggcgatctgagggatgagctccaggacccgctgcttgcatggctcggcacgtgcggttgagctcctgcagcagctccaggtctgcgggctcggcctgggtgggcaccagctccgtcagcatctccgacatcaccctcacgttcccactcaccatctccagctcactgcgcagcttccccaatctgttccggggttggtgctatgggcgtgtcaccggagagtatgggcggggcgggcagaggggcagcatgctggccagagtcctcttgctggctggagtcagtgcccacagaatcctgtcctgattgtgtctctgagttgaacacggtcctctggggtgtgtggatgggtgacagcatgtccaggtcagtcatggggaactccaggcctttcctccgcaggtcctcatagatggtgaccacacctgtcagatcgggcgagctgcggaacgcgtcagcccaggactggatgaggttgagcactttactgctcggagggcatctttgggaccttcctccgtctcgttgatgatgtcgcagatctccatgttgagggcccagtcctcgctctgcagggagccatctgtggctttctcgatgcgctgtcccactggagagctgaacgggttccccaggagaaagtccattgctgctaccgccgctgccaccaaccccgggaaccccgct

SEQ ID NO: 480188 - DNA, 1184 bp, Homo Sapiens
  misc_feature (120)..(120): n is a, c, g, or t
  misc_feature (249)..(249): n is a, c, g, or t
  misc_feature (753)..(753): n is a, c, g, or t
  misc_feature (790)..(790): n is a, c, g, or t
  misc_feature (798)..(798): n is a, c, g, or t
  misc_feature (838)..(838): n is a, c, g, or t
  misc_feature (841)..(841): n is a, c, g, or t
  misc_feature (843)..(843): n is a, c, g, or t
  misc_feature (847)..(847): n is a, c, g, or t
  misc_feature (856)..(856): n is a, c, g, or t
  misc_feature (861)..(861): n is a, c, g, or t
  misc_feature (892)..(893): n is a, c, g, or t
  misc_feature (901)..(901): n is a, c, g, or t
  misc_feature (904)..(904): n is a, c, g, or t
  misc_feature (907)..(907): n is a, c, g, or t
  misc_feature (909)..(909): n is a, c, g, or t
  misc_feature (921)..(921): n is a, c, g, or t
  misc_feature (932)..(932): n is a, c, g, or t
  misc_feature (957)..(957): n is a, c, g, or t
  misc_feature (976)..(976): n is a, c, g, or t
  misc_feature (981)..(981): n is a, c, g, or t
  misc_feature (983)..(983): n is a, c, g, or t
  misc_feature (987)..(987): n is a, c, g, or t
  misc_feature (1032)..(1032): n is a, c, g, or t
  misc_feature (1090)..(1090): n is a, c, g, or t
  misc_feature (1096)..(1096): n is a, c, g, or t
aattaatttcaacaaagctgtttctttaaaagaagcctattggatcattcaccacccaatagtatttatgctatggatcgctgaggcacagattcagaaaaggcaggcaaagagaagtgnctaagattttgcctaatggtgattgagatggctgccaggaacttttatttaagaaccaagtaagtagaggtaattcttgattctgaatacaggcaacttgtgtacatttttaaacactactttctgttntttgaacttgggaaaagtttgcctaattacaatgcaatttttctctaagtttatgaataaaatataaagacctaaatgtaatctcttttctttttctcctcctcctaccctttttactttaaagggaatttacactgggagagtgcttagccttcaagaattattgatccaagtgggaaagttaaatcctgaagctgttagaggtcagtgggccaatctttcatgggaattactttatgccacaaacgatgatgaagaacgttatagtatacaagctcatccactacttttaagaaatcttacggtacaagcagcagaacctcccctgggatatccgatttattcttcaaaacctctccacatacatttgtattagagctcattttgactgtaatgtcatcaaatgcaatgtttttattttttcatcctaaaaaagtaactgtgattcttgtaacttgaggacttctccacacccccattcagatgcctgagaacagctaagcnccgcaaagccggcccccttagccaccctaagggcccnaaaaaacngcaaaaacacccccatgcccaagacaaaagaacgacctgnccnanaccngcgcccccnggacnctagtaggctttggtaaatgtgagaaaaccnncgtagaantancananaatgaattttgnaacgctctctnaaatgtgttataggtgaattgccanacaaagttaacagctatgnaactntnacanacttaagagataaacatatcagtgttctaagtagtgataatggancctgttgaaggttaacataatgtgtatatatttgtttgaaatataatttatagtattntcaaangtgctgatttattttgacatctaatatctgaatgtttttgtatcaagtagtttgacatcatagacgcaaatcataaacataaaaaaac

SEQ ID NO: 480189 - DNA, 1199 bp, Homo Sapiens
  misc_feature (607)..(615): n is a, c, g, or t
  misc_feature (934)..(935): n is a, c, g, or t
  misc_feature (1000)..(1000): n is a, c, g, or t
  misc_feature (1002)..(1002): n is a, c, g, or t
tttttttgggggtttccatttcaaaaacccccattttaatgcccaggccttagggagcccccaggaccagcccggggtaaattgtcccgcaggggcaagctggttgacccgtctggttaggagggttggaccaatttggcatggaaggtcggcccagcccgggaccgacaccagggtgtcaagtcccggcacacgccaaggcaggtccaggcagttgggcttctccttgtcctcataggagcagctgggcaggatggtttgccggcggcgctcagcgcacgcctggtcttggcaggagcagaagagcatgcggtaggtgtactcgctgggcacccggtcgaagaactggcgcagggccttgtggcacttgcggcggttgcagcgctcggtgggcgagatctcgcggttgcagatggagatgtaggaggagcgcagcttcttgcagttgtcattcaggttgcaggccttggcagcatccaggcaatggttgctcttggcgctgaccaccgggtctgcccctgtccctagaaagaagaagaggcagaagacgtttgccaagatcatgttaaataaatcccaccgtttttttgtctttctcccttgggtnnnnnnnnntaatagtagtaacaacaacaataataatagccaagcagtggtaatcagccccaaatccaatgcggagatcccagctagtccacccgatgaagatcccgagtcctgcgattctcgcctctggctggagggggtggggtgagaggcgggcgatgggctgctgcctctcgacgccccccttgcccgctacaatcaaatatacgcgtatctgtgtatcggctttctaagccaacagcccagtcctggggtcagccctcccctccaatcgtccgggaaggcgtgagtccccgcgggtccaattcccctgcgcttcccaggaggnncctggggaggtggggagagaggcgatttgcgagtgaagggctggaaggaagcggcgagggagggncncggaataaaatgcaaatagaaaagaaatccacagacgggtgtcagcgcccaagaacaatccagtcggagcttcgaggacgagagactggagtcgcttctttcgcaccaagacgaagacaagattcaaaaaaatcttctcccgctaacccttgctcggctcacttttttctaatggaattccagtgaccgtgtgtctc

SEQ ID NO: 480190 - DNA, 1533 bp, Homo Sapiens
  misc_feature (34)..(34): n is a, c, g, or t
  misc_feature (40)..(40): n is a, c, g, or t
  misc_feature (73)..(73): n is a, c, g, or t
  misc_feature (109)..(109): n is a, c, g, or t
  misc_feature (289)..(381): n is a, c, g, or t
  misc_feature (387)..(443): n is a, c, g, or t
  misc_feature (612)..(612): n is a, c, g, or t
  misc_feature (747)..(747): n is a, c, g, or t
  misc_feature (1214)..(1440): n is a, c, g, or t
tacttcatatatttgctcccatttttctgcattnccagtntaaagatgagcaaactaaaattcagagaatgtnaggtcctgtgttaacaatccatacagcaaatgagtngtgaggccagaaagcagaatctagagctcctgctcttcctcctgcaggtgctccctgaggaataaggagagcaaactaaggccatcttttgatccataactgaaacatctatttgcactcaggcactattttgttttttcttcttcttcttcaccaggaactaaaaccaggcttttaagnnnnnnnnnnnnnnnnnnnnnnnnnnnnnnnnnnnnnnnnnnnnnnnnnnnnnnnnnnnnnnnnnnnnnnnnnnnnnnnnnnnnnnnnnnnnngaatcnnnnnnnnnnnnnnnnnnnnnnnnnnnnnnnnnnnnnnnnnnnnnnnnnnnnnnnnnggtccagggcccatggagaactactactgtggtcaagtatttgctaccttgttgaaaaactgttactcatcaagcttcaacttaaaaagttaaataatgctaaacatcgtgctaagtgataaaaggggttgagctacagggttttgagaacacacgcgctgcctgagtnaagtaaacagtctgctgtgatactaatgcacttgcctgttaagaatttttttcctgaaagtagttaagaacacaaagaagagttctcagaaactattctaggctgccctccttgtttcacggaggagagactctnaagggcaattcaacagctccttgacacccagcatcctcttacccttgatgtggagggctccagagttatactttggcttaactccagagactctagtgaggtaaaactggaaggggttccctttatccagcatgtcccaaatgtcctggccctcccctgatgtctcatactcgtcttcctcctctttgagcctgtggcaggcgggagcgccatgattttcagttctttgggcagtgccgtcattgggagcagagatgtctttctcctttttgatcaccactttctcagcctgcttctgcggcatttctggttgcagctcatcatcactgctggacagacaccagccgaggtcctcctgggaaccgcttttctgccttttgggaggtaaaactgaatctgtattgctgaatttcacaggtgatattttcctcttgtgtgcagctttctgggcctcggaacaggtgtannnnnnnnnnnnnnnnnnnnnnnnnnnnnnnnnnnnnnnnnnnnnnnnnnnnnnnnnnnnnnnnnnnnnnnnnnnnnnnnnnnnnnnnnnnnnnnnnnnnnnnnnnnnnnnnnnnnnnnnnnnnnnnnnnnnnnnnnnnnnnnnnnnnnnnnnnnnnnnnnnnnnnnnnnnnnnnnnnnnnnnnnnnnnnnnnnnnnnnnnnnnnnnnnnnnnnnnnnnnnnnnnnnatacagctgtgtgctgcaaactctgaggcgacacagaaccaacgctggccctgtgccgattcaaacccaggcctcgacctagcatatgtttgg

SEQ ID NO: 480191 - DNA, 1185 bp, Homo Sapiens
  misc_feature (168)..(263): n is a, c, g, or t
  misc_feature (401)..(467): n is a, c, g, or t
  misc_feature (563)..(786): n is a, c, g, or t
  misc_feature (882)..(932): n is a, c, g, or t
ccacctttttatccatcgcgcccccatgggatgagatagtccgcccaacgtgaggggtgtcgcccctactcagaccactgagcaggtgtctcaagtctttaaccttgaacgcaggtcccccatgtgcgtgtttctcaggccttccaacttagcccaacccatctaccnnnnnnnnnnnnnnnnnnnnnnnnnnnnnnnnnnnnnnnnnnnnnnnnnnnnnnnnnnnnnnnnnnnnnnnnnnnnnnnnnnnnnnnnnnnnnnnntggcagtctttgtgtggtagtcttacatggcagagagagaaagcttttgtgtctctctttataatgccactgccatgatctgaatgtgtcccctgaaattcactcataaaacagtctcctccaaaaacatggtccttnnnnnnnnnnnnnnnnnnnnnnnnnnnnnnnnnnnnnnnnnnnnnnnnnnnnnnnnnnnnnnnnnnntcacagggacactctacaagtaactggtaaacccaccagaagatcagggtccagatgcagaaagcaggtgctgatgagtttttaaatatcttgggnnnnnnnnnnnnnnnnnnnnnnnnnnnnnnnnnnnnnnnnnnnnnnnnnnnnnnnnnnnnnnnnnnnnnnnnnnnnnnnnnnnnnnnnnnnnnnnnnnnnnnnnnnnnnnnnnnnnnnnnnnnnnnnnnnnnnnnnnnnnnnnnnnnnnnnnnnnnnnnnnnnnnnnnnnnnnnnnnnnnnnnnnnnnnnnnnnnnnnnnnnnnnnnnnnnnnnnnnnnnnnnngcgatggtctgaatgtgtctcccaacattcatgtgttagaaacttggtccccaccagctatatggaggctgaggtgggaggatcgcttgagcccannnnnnnnnnnnnnnnnnnnnnnnnnnnnnnnnnnnnnnnnnnnnnnnnnntacacaggggtctgggaaagacagaggctttgttagagccggcagctgagggccgaggccgagcagggtttaggccagcacaggacgaaaaggaagaaagttccaggtggagtctggtggagaaagaccgacctggaaggcaccagcatgtgcacgtggcaactgaggtcgaggacgtgcctgagagagaggaggaaggtggcttcggaccgggtagggtgcggaatccggagaattccggaccggtaccagc

SEQ ID NO: 480192 - DNA, 1608 bp, Homo Sapiens
  misc_feature (403)..(416): n is a, c, g, or t
  misc_feature (418)..(494): n is a, c, g, or t
  misc_feature (792)..(842): n is a, c, g, or t
  misc_feature (938)..(1161): n is a, c, g, or t
  misc_feature (1257)..(1323): n is a, c, g, or t
ttggcgaagagttcttttgacagccgtgagcttccccgccaggaacttactggggctgcatcaccctagaaacgtggctttgggctgtggaaacgctgcctctgtggaagtctctcctcgcgggggtggacgggtcgctgcgcgcccagcgttcttctgcggttctcacagcccgccgccgccgccgcctcggggacctttgcggggaggcctcaggtcagcgccgcccttgcgatggcgggagagcagagcggccccagggcctctgagctccggccccggcacgtcccgccctctcctccgcttgcgggagccggggcgcctcggagggaaaccttccggacacaggccgggagaagaggggccgtggcgccatcgcgcagcttcctggtttcggccatgnnnnnnnnnnnnnngnnnnnnnnnnnnnnnnnnnnnnnnnnnnnnnnnnnnnnnnnnnnnnnnnnnnnnnnnnnnnnnnnnnnnnnnnnnnngttgaagggactctccggcctcaggccgcggtgttcttgtaaattagaaccggcctatgcgccaagcgcgggtctcgcggctgcggagagaggcccagcagggggcggggacgccgggaggcggggcctggccgagctgcgcacacccgggtggttctggctacgggtacccggacctgcccaacgaccgttctccattcccgacctccgcaccctacccgggtccgcggggcaccttcctcctctctctcaggcacgtcctcgacctcagttgccacgtgcacatgctggtgccttnnnnnnnnnnnnnnnnnnnnnnnnnnnnnnnnnnnnnnnnnnnnnnnnnnntgggctcaagcgatcctcccacctcagcctccatatagctggtggggaccaagtttctaacacatgaatgttgggagacacattcagaccatcgcnnnnnnnnnnnnnnnnnnnnnnnnnnnnnnnnnnnnnnnnnnnnnnnnnnnnnnnnnnnnnnnnnnnnnnnnnnnnnnnnnnnnnnnnnnnnnnnnnnnnnnnnnnnnnnnnnnnnnnnnnnnnnnnnnnnnnnnnnnnnnnnnnnnnnnnnnnnnnnnnnnnnnnnnnnnnnnnnnnnnnnnnnnnnnnnnnnnnnnnnnnnnnnnnnnnnnnnnnnnnnnnncccaagatatttaaaaactcatcagcacctgctttctgcatctggaccctgatcttctggtgggtttaccagttacttgtagagtgtccctgtgannnnnnnnnnnnnnnnnnnnnnnnnnnnnnnnnnnnnnnnnnnnnnnnnnnnnnnnnnnnnnnnnnnaaggaccatgttccggaggaagactgccaaatgcacgtgaactctcaggggacaacattcacgatcatggcagtggcattatacaagagagacacaaaaagcttgctctctctctctgccatgtaagactaccacacaaagactgccatctgcaaacccagaagcaggtgggcttccctcagacaccaagattctgcctgcaaccttgatccttggcacttgccagccttccaaactctaagaaagacatggtagcatggatggctaagttggaaggccagacgc

SEQ ID NO: 480193 - DNA, 505 bp, Homo Sapiens
  misc_feature (454)..(454): n is a, c, g, or t
  misc_feature (491)..(491): n is a, c, g, or t
agagttgctgggtcttcgacaagagcacattaccacagtggtggtgcagactttccgagacctggtttggttgtgtcctcagtgtactgaagctgtatgtcaggccctgcccggctgtgaagagaacattcaagatagtgaggggaagcaagcacttatttggctacttggtgtccatggggaaagaattcctaatgctccttatgtgttagaggactttgttgagaatgtgaagtcggaaacatttccagctgttaagatggagctgctcactgcttcgctgcgccttttcctctcccgacctgctgagtgccaggacatgctaggacgtttgttgtattactgcatagaggaagaaaaagatatgggctgttacgggaccgaggtctcttctattatccgcctcctcttagttggcattgatgaagtttaagcggatttttgttgtaggccntaaatctgaaccctactcttgggacttttgggaggtnccggcagaaagacc

SEQ ID NO: 480194 - DNA, 666 bp, Homo Sapiens
  misc_feature (152)..(198): n is a, c, g, or t
  misc_feature (478)..(538): n is a, c, g, or t
aatcacctcatccctttgcaaaaacagaaaaattacatttctcaaaagtgaaaactttgtatgcatacactcttgcccaggaaatttataagatctcccccataacatttatagtttatttgacaataaaactggttaagactttgaactgnnnnnnnnnnnnnnnnnnnnnnnnnnnnnnnnnnnnnnnnnnnnnnntatgtgtttggagccattttccttctcttcagccttgctctccaatcctcaggaagggcttcaaaattagcatttctctctgccatgccactaaccagctgctgctgtttccactcttcaattcgcttctgtgcagttgattcccgatcctcttcactggaactagaattgtcctcttcatctaactcacgctggatactctgccacttttttaccaaagatggcattttggtcttactcttctttgccttgtctttccttcctttttttgtcttttcannnnnnnnnnnnnnnnnnnnnnnnnnnnnnnnnnnnnnnnnnnnnnnnnnnnnnnnnnnnngttctataatggtagcggtaggcacagcacctcgggcctgaactggctgcaatgagggagcagtcactccaattggacagaacattctgcataactcataattgcaggtgctgccgcatgtccaaggt

SEQ ID NO: 480195 - DNA, 700 bp, Homo Sapiens
gttcacccaaatgatcttttattatcaggtatcctggctggcccaggacccagagacagacaagctggggccaagcagggcggagcatctgagacccattttacaggtaagaaagacaaggagcagaggcctgcatgaaactgcagtaagcagcaggcgccagggggcccaaccccactggaatcgcctgccctgccctgagcctggcccacagtggctgccacatttcagacagggcagtgagtgatgggacgtgccctttgccccctctggtagggcgtggggctgggggaaggagcaggacagtaacatccgtgctgctggctgggacccagaagtggctgggacatgggggctgctttcttctgtgtagaggcctccctacaaggctcccccctcccccgaccctttacctagggcctgccagaaaacacttctcattgtgaaggggacagaactaatgggggacagtggaggacatggatctacccccattcctgagtcacacgactcacccagagtcacggcccagactgggcctggggtcatggcgccaggttgcccctctggcctgtccacagctctcggagctcgacatgacaacccaggtcccgcagggcggccttggccacgtcctcacagtcacggtgggcagatcgggcctgcatgatgagtgcctcagcccccaggtccaggccaa

SEQ ID NO: 480196 - DNA, 1155 bp, Homo Sapiens
tggttgaaagtgacatatacgaggccggggctgttgcggccctctttgcaggcgtacaggcctgcacagaaggcacggatattttcatccacttggaagcggacgacggtgcggttgtgatcaatgatatatgtctgtccatcccaggcgcatgcaactacctcctcatgcccgttgccggtgacatccagtttttccagggcaaagagctggtgatccacctgcactgaccacagcagcttgtctgcttcttccatttcttccatgagcttcagtgtcccttgtttgatgttgccaatttaggtggagtggagaccattctttgttgtggatacggccaggatgtctgggtgcagcacccacgtttcggggcagctggggtctcccttatttccccatccgtgggcccttcagaggcaggaggggacccagtgtcctttttccaggtacacagtagaattgcatacgcacaacctggctgagacaccatcagttcaggaagacccagtggccccagagtcactgagaggctgtccacctgacccttcagcatccatttcttgagggacaccagctgccctgtcagatgttcaggaccctcacctagctcctcccagcggaaagctcgcaccacacggtctgtgtagcccaccaccagctcacgacacccatctccatcgatgtcgctgatcagcatgaccttggtgttggcagggatgtgctgcttgaagactggacgctgctcctctccgattagtgtctcgtggtgcccagaagcatccaacaccttggcaggtgtcaggtcaaacaaatgaaaccagccttcagcactcactgccaccaacaggttctttcctttattacacacgtctccaaccccaacgcaagtcagcattccctggcaggaacaggtgagccatggccgactgtcatcatttttatacacagacaccttcccgctggtgtctcccaccaccagttcatttaacgtatcgttatcaacgtctccgaggcagattgcgtgcgggaagaggctcccgctgaactccagcgccacgcgctgcacgtagctaactgacctcatggcacctccaagagcagagggagcggagaggcccagtaaatatccctcctcgtccgaattcgccacccagc

SEQ ID NO: 480197 - DNA, 1475 bp, Homo Sapiens
  misc_feature (237)..(344): n is a, c, g, or t
  misc_feature (1153)..(1154): n is a, c, g, or t
  misc_feature (1156)..(1156): n is a, c, g, or t
  misc_feature (1173)..(1173): n is a, c, g, or t
  misc_feature (1182)..(1182): n is a, c, g, or t
  misc_feature (1196)..(1196): n is a, c, g, or t
  misc_feature (1202)..(1202): n is a, c, g, or t
  misc_feature (1250)..(1250): n is a, c, g, or t
  misc_feature (1252)..(1252): n is a, c, g, or t
  misc_feature (1254)..(1254): n is a, c, g, or t
  misc_feature (1256)..(1256): n is a, c, g, or t
  misc_feature (1260)..(1260): n is a, c, g, or t
  misc_feature (1264)..(1264): n is a, c, g, or t
  misc_feature (1266)..(1266): n is a, c, g, or t
  misc_feature (1272)..(1272): n is a, c, g, or t
  misc_feature (1274)..(1274): n is a, c, g, or t
  misc_feature (1291)..(1291): n is a, c, g, or t
  misc_feature (1294)..(1294): n is a, c, g, or t
  misc_feature (1299)..(1300): n is a, c, g, or t
  misc_feature (1309)..(1309): n is a, c, g, or t
  misc_feature (1330)..(1330): n is a, c, g, or t
  misc_feature (1338)..(1339): n is a, c, g, or t
  misc_feature (1341)..(1341): n is a, c, g, or t
  misc_feature (1354)..(1354): n is a, c, g, or t
  misc_feature (1365)..(1366): n is a, c, g, or t
  misc_feature (1368)..(1369): n is a, c, g, or t
  misc_feature (1391)..(1391): n is a, c, g, or t
  misc_feature (1404)..(1404): n is a, c, g, or t
  misc_feature (1419)..(1420): n is a, c, g, or t
  misc_feature (1426)..(1426): n is a, c, g, or t
  misc_feature (1436)..(1436): n is a, c, g, or t
  misc_feature (1458)..(1458): n is a, c, g, or t
  misc_feature (1464)..(1464): n is a, c, g, or t
  misc_feature (1466)..(1466): n is a, c, g, or t
  misc_feature (1474)..(1474): n is a, c, g, or t
ttggcaggtttgggttctataaatacatgaagatggacaaggaggagggggatgaggatgaagaagacgaggtgcagcgccgagccttcctcttcctcaacccggacggtgagtgtccgcagcgcccctggcccgcacccacctgcgcagggagcttctaacccgcgtttcccgcagacttcctggacgacgaggacgagggggagctgctcgacagcctggagcccaccgaggcgnnnnnnnnnnnnnnnnnnnnnnnnnnnnnnnnnnnnnnnnnnnnnnnnnnnnnnnnnnnnnnnnnnnnnnnnnnnnnnnnnnnnnnnnnnnnnnnnnnnnnnnnnnnnaggcactcccgggccctgagctgggccgccagggccgcccgccctttgccgctcttcttgggccgagctccgcccccgcgccctgcagtggagcagccgcccccaaaggtgtacgtgaccagggtgcggccgggacagcgggcatccccccgggccccagcgccgcgtgcgccctggccgcccttccctggcgtcttcctgcaccccaggcctctgcccagagtgcagctgcgggcgcccccacgcccaccccggccccacggccgcaggaccggcggcccccaggccacacagccgaggcccccagcccgggcgcaggccacccaagggggccgggagggccaggcgcgcacgctgggacctgcggcgcccacagtggactcaaacttgtcctccgaagcgcggcccgtgacctccttcctgagcttgtccaggtgtccgggccgcagctgcccggggagggcgaagaggaggaggaaggggaggacgatggggccccgggcgacgaggccgcgtctggaggacagcgaggaggccgcgggcccggcgctcggacgctggcgtgagtgacgccatctgactggcatgcgcacgttcatgcgtgggcgccgtggacttcgagctgctgcgctcggactggaacgaccttcgatgcaacgtttcggggaaccttcagctgccggaggcggaggccgtggacgtgaccgctcagtacatggagcggctgaacgcgcgccacggcgggtatgggggcggccgaacgcgcgccagggcggtttttgaggcggggacagccggggagaggaggnncntgcccttgcggacaccncagaccctncccagggcccaganggtcancggccgtggggcgtaggcaccgcgccccaccccagggaagccccagcntntntncctncttncntgcgcncntacatcccgggcacatntcnagccnnagggacccnccgtgagcccacccagggcgngcgcccanncnttcaccgttgtanccacattgtcnncnntgaccgtggccagggaggagcnaagcgtagagacngcgcagcgcaccagnntcgtgngacagcccantcggggggcaggagagaccctnggcaancnagacccgng

SEQ ID NO: 480198 - DNA, 176 bp, Homo Sapiens
tttttttaaatccatggtcttaaaataattgtcccttagtataaacaaaatatttagcaataatacagtagacggattcttcaaattcacaacaatttataatactttataccacaagggtaaactagtaagctgctttctaaaattaaggcagcagcagtgtttagagggggagt

SEQ ID NO: 480199 - DNA, 1247 bp, Homo Sapiens
ttgggcagaggaggagccagggaggcacaggacagaaggaattgagaagggggcggggctccctggctgggcttccggtgtggccggtaggaagtgggggccaggagagcagcgggcactccttcctgggcagggtggggcaggatgcagtgagccagccccagggccagaggagttggggtcatctgttaccttgacaccctctgcacacagcatagccctctctctctccagggctgttggttctttctcctgactcctgtggttttgctaatggcactttacagactccatggagatgtcaggtggaccatcttctagggcccagcaggagtagggaatgtgccaacagactgcccaggttgccgtggccttccccaccccccagatctcctgagtcatcatgctgtgctaatgaaagggatcatatcatcctctctggggatggtgggtgggggtgtcaatatcctggagctcccttaccccaactcaatgacttgggggtaaagttctcttccttttgttgcctacctcttcctccactcatttgggttcagaataaacatgccctgaagttaaagaggagttaagtcctaaaggaggcatttcttccccacctccctgacctggaactctggctacagccattgtaggaactccgtgcctggcctgtcagctccctgctaggctacagtggaatagcagagcccacaggcttctcgtggggagttggctccttaacatttcttggcaacagaaagccccaggcacagctcagggaggagggaaggcaggtaagctttggacgagaactggcatatttattttgacccaaatcagggatttcctcagtccacccagtactgggctcttaagcaaaagtctgagaaacaagacagtggtttgaattctggggcctttgtgtaggattgtgcctgacctttatttatttattaacagcagggccactcgtctagggcagtggagtctgcgtgtctcctggggctggggcagggcattggcagttacgcagtggccctgaacctggtctggtgcccccgaacctggtctgatgccccctcagctctttgacaatcactgtggctgttgggttttctcctatttctaaaaatgttctcttctttcctaagtgacagttttgaagtattggataaccaagagctcacgtcacacagaccttggtagccccatctttgcttgcagcttagctttgagatactaagcaa

SEQ ID NO: 480200 - DNA, 1056 bp, Homo Sapiens
  misc_feature (834)..(842): n is a, c, g, or t
ccccaagcaggttcccagctggtcagagatgggtcaggaaggacaaggacatattcagagcacacagagggaaggacgagggacttcgggtgcctgttgcctcactcctctcctcacggctccttcccattttgttcacgtggggatgaagactaactgctactggatggcaggacaagaaagagctgtaaacagcttgggtctgctcacccaaatgtgcaggctcctttgtcagaaagcgattattgtcttagggacaggggaccagagaaagcccttgtggtgttgggtcagtacggggtagaacacaacgacagcagccgccagacgcgtgctcgctctgggccctgcccccagacagggaaacactgaccgaggttctggaacggcaacggtggcagggagggtgtggggtatgctcccctcctcctggcacccaggccaccccggcccagggagaggcagtctgccctctgggcatagggcgaagggcctgggaagctgaccgggagccctctgttcacagggcagccaccggagagcagattcttccagctccaaaatcctgcctgcctctgacaaaaccaaaaaataaatagtgtgtacttctcacgccacctggaattcttggccccgagaccagaggcgcgagccttcctcctccaccccacacccaggtgcccatgccgagggcactttctgcccagccaggggctggcagcagcacagcgagggtctctggccacggcccccaggcagcaggccccccagggtcctggttgaggggctggttcagccctttggtccaccttgttcattaaaattaaaataagnnnnnnnnnggctccacttggtgacttgggtctgtagaggtctctgcttcgtccctgtctgtcatcctgtccatcctgcaagggctgaggctcaggtaggcaaggaggtggccggagagatcacctgcaggatattcgacgtgggtgagggtcaccggccgccatgaagcggggagcgagcactgtccgtccgctgccatcttacccggagaccgggcttccc

SEQ ID NO: 480201 - DNA, 148 bp, Homo Sapiens; identical to SEQ ID NO: 306413

SEQ ID NO: 480202 - DNA, 216 bp, Homo Sapiens
ggggatagtcagtagccacttgggggaaactgaggaccatgaaggagcagagacaggagggcctcctcctgtagtatgacaacatgctccagagacctttttctgagggtccccagcccaccccaactatgggactaaccatacttgaatctaccccaaaccaagggttaagttcacgcctaagcataaggactaaagtgatgaggctagtggctg

SEQ ID NO: 480203 - DNA, 764 bp, Homo Sapiens
  misc_feature (543)..(592): n is a, c, g, or t
gttaaggaaggaccatggccgaaggggatagggcccccccacggccaacaggccagttgctgcagggctccaaggctcagcactcagctctccccaatcagggtcagatccagctccaggtatggctgctatggggcctagtttcctcctcttgtttttggcaggacggccagggcgggcccggggaggcagagggacagctgctcgggctgtagggctgggttccaaggtaatgtcctgggcgggagctattgctgttccgggtagggttgtattttctcctacggccacgacgagactttctgactactcccgggggcaccttaaggtcctcagaatggggcccgggagggggtggatccttgggctcagcacccccttcagccagctccccattatgctgccaatggtgggttcttcttggggacctttccatttgtccattgaagccaccacgtgtcccccatttgagggccagtcggccaggctcccgccggctgccaggctttcggccccgggctggcctggcctcaccattaatgnnnnnnnnnnnnnnnnnnnnnnnnnnnnnnnnnnnnnnnnnnnnnnnnnnagtgagcagctcagggactggggggtcgggagaaccatggggtggggctaaggcactgaggggaggcctggcaggctctggttcgagggctgaggcaggctctcggggggtagacagggggcttcatggctgcatctggaggatctgctggagactcgtagcagcagcacca

SEQ ID NO: 480204 - DNA, 951 bp, Homo Sapiens
  misc_feature (23)..(23): n is a, c, g, or t
  misc_feature (60)..(60): n is a, c, g, or t
  misc_feature (88)..(88): n is a, c, g, or t
ctctccccaggctgccatgcctnagcccagtgccctgctcccttcccataccctcatggntgacagtcacaaaagtggtggcagcagnagggctcaagtagaaagcgctttcggctctgttcctgcccatttgttgtagagtatgataccaatgactatggcaaatacagaaaacacccagggagaaaaagacgatgaggaagaggcccaggccactcaggggcggcagtggagctgtcatctcaggcagcttcatattgtccactgagggcaagtacacatctcgatggagcttttcctcttctggggttctctccactgtcagttcaaacaacttcaaggaaatgacatcatgattatctgagagatccccagtgatggaggaggtgccgaagtaggtagccgcggggcaggcggactccgggcactgtcaatgcagtccctccactcatgcttgccatcaatatccatcattatcgtcaaatgcctcttgacgtagcgaatcaccaggaaggtgtcgtaatgaagattgcggacaatggctgtgcagcctcccagctctgtaggccgcccatcccgctcatgatcatagctgagggagccgttgttcaccatggctgagatgtaggggaatacccgctggctgcatccgatcctttgtgtaccagattgccaagccatccccatgcagattcttctttccttgtccatggattttgaagtgcacctgcaactcccagtctctcaggaaacatggcctggtagggcttcgacagcgagtgctcccgtttcaagtactcgaacgtttgacccgccccgacttgctgtggcccctgcccagaccccaacaaaagaagaaggagtaacatcctggacccatcccgagccgacaaacatcgccgccactgctgccacgacccaaggggtcccagagtcgccgccatctgtccc

SEQ ID NO: 480205 - DNA, 380 bp, Homo Sapiens
cttaaagaattttcaaaatcaaattccagaatgattttacggagatatcccaggaaaattaaggcttctcttaaacactaaaaaggcatgtaattgcttgttagcaaaatggatatgacacatctctgatacttttttcattattggttgggctgagcagtcagaagacctggtcgtcgtcttgactttggcaaatgagccggagccccttgggcaggtcacacaacctgtcccagcgagggacactgagtggcccttcatgtacatccatggtgtgctggcttaaaatgtaattaatcttgtaaatatactcctagtaatttaagattttgtttttaaactggaaataaaagattgtatagtgcatgttttttaaagtc

SEQ ID NO: 480206 - DNA, 483 bp, Homo Sapiens
  misc_feature (453)..(453): n is a, c, g, or t
  misc_feature (465)..(465): n is a, c, g, or t
ttgagatttgcagtagtggaggctaccagacagctaccacttgctttatttcattacaggattgactttagctattaatgtaagcataccaggtgagggtggggggtagagggacttgcccattttactaggacaggaatgctctttaagcagcatggatggaacattaactgacgtttgtgttgtgcgtaggaagatcattctgttcactttcgtgtcctctttttagcctccactgagcttcagcaagtcatcctgatctccgtgggaacattttcgttgctgtcggtgctggcaggagcctgtttcttcctggtccaaaggatgacgtctggggactctgtgtccattatctcgtttcccggaaaaggagcaagaagatgttctccaaacgcttttgaaccaaaagcatggggcctagccactggctccctggaagagatcaagccatcngaagctgctaanagttccggtccggacttt

SEQ ID NO: 480207 - DNA, 534 bp, Homo Sapiens
  misc_feature (91)..(106): n is a, c, g, or t
cttgttattaaaaatgtttattgtttacccaaacccagtggacctcttatcaaatgctgcttggtaaccaaatctatcacagtttttaatnnnnnnnnnnnnnnnngaagctaactatttgtctcattgtcattagttagactttctgcaaggtcacttaatccagacttattcagtgcattaatcagattctcaggtgttgcatgaactccctcttgatcttgccaggcaaccaggagctgcttagctctcatcttcatgtcttcactgtcacactcaatctgcctaatttctgagtctttcatttccaagtagggagccagaatcttccattgttcacccagcttgttggccaatacctctatttgttctcctgttacaggtttgtctcgccgaacatcaggactttcattttccttcagtagagcatcattatcttcctcatcttcatccgtcacctatcttggaaatgacagactcagaaattacggcagattgagtgtgacagtgaagacatgaagatgagagcttaac

SEQ ID NO: 480208 - DNA, 477 bp, Homo Sapiens
  misc_feature (16)..(16): n is a, c, g, or t
  misc_feature (23)..(23): n is a, c, g, or t
  misc_feature (64)..(64): n is a, c, g, or t
  misc_feature (86)..(86): n is a, c, g, or t
  misc_feature (383)..(383): n is a, c, g, or t
  misc_feature (438)..(438): n is a, c, g, or t
  misc_feature (442)..(442): n is a, c, g, or t
tgactttgaaaacctnttaaacnaagaacaaatttgcaaaaattttctgggcttccctgggganttgctgggaataaacttctgtnccctggcttgggggaatggctcctggctggccttcacactctcaccctcctgctcgctgggctcgggcaggggcatcccgggacccagggcctgtccctcaggccacactcagcccccagcaggtggatttctcctactcccaggcaaggaacctggagtccagcggttccgtccttgcgtctgagctagtgctgcgctgccctggctgggtggggacagcgatgtggagatgttgtggatcccacggtcactgaggactccttggcttctggccgacgacagcggtgccctccctncgtcgcgacaggccgcggcgggtccctcagcctccgcgccaagggccccagcgcntcancgcgctgttacctcaagccggggtcacagcgcgag

SEQ ID NO: 480209 - DNA, 1075 bp, Homo Sapiens
  misc_feature (21)..(21): n is a, c, g, or t
  misc_feature (184)..(184): n is a, c, g, or t
actgcgtactgaagacccagnggatttcccggactgcacgttttaaacaacaacacaagtatttactaaggttaccaaactggaagtgcaattccactgaagttgttatatttttatgcctctaagaaggacttgggatatgtctctcaagcaacattgcaagtcctgtgcactagggtgcagncaggtaagggccattttctgcactgccccttcatgagacctgtgagtctctgagaatcaatttcacctgttgatagtgccatgtctcaatagcctcaatcttggggatcatggctgaaacacatgcacgaacttctgtaaatgtcttagaatcagtgaccccaaacctgaacctgcctcagtttcagaatcaagtggcttccaaggatagtacctgtagtaattctggagcttgttggtcccatcaccaagaataccatcattaaagatattcttcaggtggcctggttttccccttacttagctttttgcactgttaggttgagcagaatggtccaagatcttgctcctaggtggtccttcacagttaagtgccatttgtacacacaatcttaatattcccttctttgtccaaagctcctgtccaatgcaagattagaggcagctcagtggaacgatatcaagtgggtccaagtttccactgataaatctcagagagggatggaggcccaatgaagctctgcatggccttgcccttgggaaaggatggtaatgctggcacttgctgaatgaagcccactgagctctgctgagacccctctgtcctggctggcagtatcttgcagaagacgcctcagtccttcttgtgactctccactgaggtcatccctgcagccaaggttgtttccaaactaagagactatgatgaccatgatgaggtgacatgtggagagttcagtctgatgatctgtttagtaccttcgatctcagaccaacttcttttccattcaggtcagagagaacctctgggaagcagaatgaggcgctcgttttcttgtgtggggatatcccatccacgcatgtgctgtacgtttgttcctccctggcccaa

SEQ ID NO: 480210 - DNA, 134 bp, Homo Sapiens
ctttagaactgggtgcagtggctcatgcctgtaatcccagccagcactttgggaggctgagatgggaagatcacttgagcccagaattagagttaagcctatggaaacatagcaagacactgtctctacagggg

SEQ ID NO: 480211 - DNA, 1092 bp, Homo Sapiens
  misc_feature (413)..(435): n is a, c, g, or t
  misc_feature (774)..(783): n is a, c, g, or t
  misc_feature (796)..(1015): n is a, c, g, or t
tagaagtaaatgtattttttattaaatcagaaaaagaaagatacagtttacatgactgtcagtcaatcatatgctactttgaattacattttaatagactcagggtcctatttactcctttgtacaggtattaaaaacaactcaggtatttgagaagtcttctgtaaatttttattaactgaggttatggggagggttttatcagagcacatcctgagaacattaggaatgacagacacacttgagataagtgtcagacggaacagatgaagcgagcccctcagccatctgagaaacattaataatgtaagatagcagagaccaaatctttgttagggatacagtattacaggataaaaatggggaccttgccgcccccttgtgttgcaaaataaccgtgcaacttcctttannnnnnnnnnnnnnnnnnnnnnnaagttgtaatctttgccgttgtcactgagcctcaaaagcaattgttttcccaaatcattttaagccctccccagtcaatcttttccctctcatcaataacttacaaggaccctatttgaaaaacaacgcttattcattcctttttctataccccacacattccgttctaggaaattggcaaccacccaacacagcccgggttctccctccttgagatgtgaatttaaacaaatggattttcgtctcccttcttcaagcttagaggatgagcacgcgtttactacaacgcttaattccttctagcagcatttctcttctataacttacttgccactgccnnnnnnnnnngatagaatcttgnnnnnnnnnnnnnnnnnnnnnnnnnnnnnnnnnnnnnnnnnnnnnnnnnnnnnnnnnnnnnnnnnnnnnnnnnnnnnnnnnnnnnnnnnnnnnnnnnnnnnnnnnnnnnnnnnnnnnnnnnnnnnnnnnnnnnnnnnnnnnnnnnnnnnnnnnnnnnnnnnnnnnnnnnnnnnnnnnnnnnnnnnnnnnnnnnnnnnnnnnnnnnnnnnnnnnnnnnnnnccactgccattttcatcacttaacccgaacacattcctctattccctccctttcctgcttggtgatcatcgacccaa

SEQ ID NO: 480212 - DNA, 261 bp, Homo Sapiens
gctcacctgagtattttgctttattcaatctaataaacattttatttatgtaaaagacaaacaatgcatagaataaaaataagtgcttgagacttttgatataaaaagagtatatagcattcacattcctattttaatacatgagtacagctgaagtgttccataaaagaataaaactttccctttatgtatagtagtgaaaaaagtcagtatttttaggaactacagaatgttattccttggtcttttttcttgaataag

SEQ ID NO: 480213 - DNA, 823 bp, Homo Sapiens
ctcaggaccatagagtacccatcgaccatcaagagccaggcatttgacgttcttctcccagtagatccgccttatgcagtctagaataagattaactccagcacccacaagatgtaacagctggaaggcggtgagccaggcctctgggatggctgcagcctgggtcagggtcaatccctctgggataggcatgaggagcccttcggggacagtgacgtactgagcctggcccccaccggggagcagagccatggctgtgtccccgatcttccagtgtccctggcagccaggccccagctctgccacatgtccagatgcctcaagtcccaaaatgttgctggctcctggaggtgggtcatactggccttgtctctgcattaagtccgcccggttcagggcgctggccgccaccttgcaggaggacttcaccctcccccgggctcggcttggccacctccttcacgtagaggttttccggtcctcccggcttgtcaaagtgcacggctaacatattgttcctggcccggctcccctcccatgcaccaggcggcgccgagtggttctggctcctgcgggtcccggtgacaaagcccgagccccagagccccaggactgcctctgcctccaccggaatggacggctggacctggggtagccggaggggtggggctaagcagaaccaccctccccctctgttcctttcctccttccccctttaaaacgcaaagttagaagcaagcaaatcagattttcttgtcccttaagcctctggaaaagagtctttccctcgtgccgaattcgccacccaggcctcgctacctta

SEQ ID NO: 480214 - DNA, 1057 bp, Homo Sapiens
  misc_feature (908)..(908): n is a, c, g, or t
  misc_feature (917)..(917): n is a, c, g, or t
  misc_feature (962)..(962): n is a, c, g, or t
gcgataaaaaagcaactttgtacaaaaaagttggcgccatgaagaccttgtagagagggtgccgcccacctctgctccgacagcctcccggagtcccagcagcaagacggcaaccacgcacccaacttctccagccacggctcatgccgccgtcgccagcggcgccgacatgacaaggcgctgcatgcccgctaggccaggtttcccctcatccccagccccggggtcgtcgcccccgcgctgccatctgagacccggtagtaccgcccatgctgcagcgggaaagagaacagagagtcctggggacaggtaccgtgcagagggcttgagaaggggccgggtcgcgggggcaagggtatgaggggagggctgcagaccgccgctcttccagttcccgccctcctccgcgagctcaggcgttggcatttcggggcctggcaaatccccgccccgcctccgcgcaggggctactgggagttggagtttgcttctctgtagttgggcagctgctcttggtctagtgaccaccagcctggacagctacggagaacccgccttaggtagaaagaaagtgatttttttcctttgcaagagtttgacccgggaccctaactgcttaatgcatatttagatcgttttctgtacgttgtcagttctactgatcctagtggtttagtaatataaaccttttctatgttgtgggtgaaattatgtaacctgtgatgagggaatcccttccacgaattactttgtagtccagcgtgcacgctagttcatacttaaaagaacttgcagatttggaatgtgacgtgttttctctttcagtaacttcacgcctctccaagaggctaatttttttgtaaagattttgtggggagctatgtaaatgagatggggagtttcatctnaatgacatncctctgaccataaaacatgttttaaattcccctacgaaacttggnaactgcctttttattttaaagttaaaatggtattaaggttttaacaatatttcatggtaactaataactggggggtaccgggcccacccaatccc

SEQ ID NO: 480215 - DNA, 927 bp, Homo Sapiens
atcgcggggggggcgccagagcgtgttcctgaaaggcgagaaaaagggcttccggggagaaaaggcttctctccgcgaaggggtgccgcgggcggcggcccggcacccaaagagccccaccggctggcggggcgtccgcgctacccagccccccgctacccccgtcgatgcgtcgcgcaggccgccgctcccgcggtaaccccgggcgccacggctacgggacgctcaggggccacaatgccttcttttgggttgactcgggggaaattcccctcaaatgcacctggaagggctaggacggaatgccctgttgcggtccaggatccccccgaaagataaatcgtggctttcaagactaggacaaaatgatgaaccccaaggggaaaagaaagccacctgtttggaaaattatctttcttgtaaatttggatcgcataattaagaatgcttccaatttaaggttgtaagcgcaaaatccagatatgtcatgttatggacttgcttcctgaagatgatatcagccgttgatagaaagaatccacactcttacagaacagcaaatcataaatggttgtctctgtgaagccagtagctttgcattcgatatttctatctgggctcattccaaatgttcaggatttggattcctgaaggcttcttcagcatttaactaattctttgttggctgaagggggctgggactgtttctccacacacaaactgatccttggtgatggagaagttatctccacatgggcagggatagaaatacgtctccgagtcctcgtcatattggaagtcctcgatttccacctcgtcatgaaacactgccatggtcagcgggggtggccgaaggggtaacgccccagcagtccgaggccagctccgagggtttaacttcgccggaaccggcctgggctcggcccc

SEQ ID NO: 480216 - DNA, 944 bp, Homo Sapiens
gtgtgtatctgggaggaagcgcggtgtaacatgctttggatcgtgtatgtgccgcgccaaaccgtgatggtcagcgtttgtcaaagggactggcgctagtcgtgcactgatgtcgtgaggagtaccaaggtccaggaattccaagttctgcttttttgttattaaagaacatccgtgagagtgactgagggtaggatggatcgcctggttgtccagatgaccgaagttaatttgctttaagatatgcaaaatgatgaaaaccaagggataagaaaggcgactcgttttgaaattatcttctctttaaatttagatgcataagttaagaatgcttccgatttaaggttctaagcacaaaatccagatatgtcatgttatggacttgcttcctgaagatgatatcagcagttgatagaaagaatccacactcttacagaacagcaaatcataaatggttgtctctgtgaagccagtagctttgcattcgatatttctatctgggctcattccaaatgttcaggatttggattcctgaaggcttcttcagcatttaactaattctttgttggctgaaggggctgggactgtttctccacacacaaactgatctttgtcataaatgacttttataatgagagagcagctaggacacgttgccacgtcttccccattctccaaatcttccttccccccaaggtgggtgagaaccccagggccttcagcgagaaatgccgacatcattttcccctagaagcgtcacttaggggaaacacctaggaaggtcaggcgagcttcggtcgccccaaaagccctgggaaacaaaaaacgagtcccctcctcgacagaaatatcccaggttgggactctaaggcagggatcgggcagagagacagaggctctccgccaccctctccctgacctaatctaaggcccagccctccgct

SEQ ID NO: 480217 - DNA, 882 bp, Homo Sapiens
agcggggaggtgttgcagccatggctacggcagccggcgcgacctactttcagcgaggcagtctgttctggttcacagtcatcaccctcagctttggctactacacatgggttgtcttctggcctcagagtatcccttatcagaaccttgggcccctgggccccttcactcagtacttggtggaccaccatcacaccctcctttgcaatgggtattggcttgcctggctgattcatgtgggagagtccttgtatgccatagtattgtgcaaatgagaaaactgattctgagagattctgagtgatttgcccaggtcacagctggcataaaggcatcacaagtggtcgggctcagctactctggttcctacagactttcttctttgggatagcgtctctcaccatcttgattgcttacaaacggaagcgccaaaaacaaacttgaagttgtctgaaagcttgctctacacttttacattcatcctcacccttttttttgtggggtagaggaggtgcagtaatttactcagtgatctttctactttctagaaactgtccttcaaagctctttaagaccccctcgttagtcagttttttctcttatatgctctggttgagcttgaatagaccagttgttacttaagaaagaaaccagagaaagattttagcttttcaatcctatttggcagaggacttcagctaccttcttacagtctttggctgtgttggtaccctcgtgttgctctgagctaaggccacatactacactgactttaaggctagtatacccttgctcccgacttctgatgaaaacaccttaacctcacaagcaccatctttcctctacctttccaaagctctatccacttgctgcactaagata

SEQ ID NO: 480218 - DNA, 1151 bp, Homo Sapiens
  misc_feature (797)..(829): n is a, c, g, or t
  misc_feature (860)..(901): n is a, c, g, or t
ttgggaacctgctcatgcatacgctcaacctcagaccacaactcctctacctgcagtttccggttctcctggggcagcaatcacccctttgccatccacacagaatggacctgtctttgcgaaagcaatccagaaaagagtaccctgtgcttatgacaagactgccttggcattagaggttggtgacatcgtgaaagtcacaaggatgaatataaatggccagtgggaaggcgaagtgaacgggcgcaaagggcttttcccctttacgcacgtcaaaatctttgaccctcaaaacccagatgaaaacgagtgattgctgttgccctgtttcctgctgctttgttgttctgcctgtcctagtctcctttgaagtgggaaagcattttctctcataggcaagtcacactgcattgccgaagtccagctttctgcagactggcagtcgcacacacatttggaatgcacacagcggctgcctcctgatgtttgtatcatagtcgtattgtcaaagagtagccgattttagagttcttttggatcataaactggaaatactgatggaagcacacaagtggagagaagttgacgtggaaagggtcttccttctcattgctgcccgtttgtacatgggactgattctgtcgtgttcaccagagaaagcttgaggccatggcgagatactgcatgtttgctgttccacaaagcagtggcttagctgccatcttgcttttctttggacaacaggaagtgaaccttaaggaagagagaattctgttctaaaactccaaaatctggcnnnnnnnnnnnnnnnnnnnnnnnnnnnnnnnnnggaaaactaattaattagacttgtgtggggnnnnnnnnnnnnnnnnnnnnnnnnnnnnnnnnnnnnnnnnnngagacggtgtctcgctgcatcactccaacctaggtaacagagagacacctctgtctctgaaaaaacactgagagtctcaaggtcccatagctacatggtacagggctgttgtctgcttgctgcacagcagaaattacaccatccacaggaaatggactatttttgcagtccaacatcagccaaccacacacagccgtgtttggaagctgaagagtaaagaaatttctaggaatggctgttgttctgtttt

SEQ ID NO: 480219 - DNA, 526 bp, Homo Sapiens
tttgggccagtcaagatttgctttcccatccttgtcttctgaatgtctaaaatctctgcatctttctgaagtttaacaactgtctccagaggtttgccaggcagcagctctcagaagtttccaaagctttgcagaatcttagatctggaattaaagaattcaagcccgaattgtgagaaccagattttactcaacagaaagctctttctaaggaatctgagctgttcactggtggacagtggtggggcttgagtgctccttgttaataggatgggccatgcaccctctctggatattcaccaaggcctcttcagaatagggtttgttctggctagaagcgtggtctagaagatggctaagctctttgccagctctcatttggagttttattattgcataaaatcttcgctcactctgcaatcttacgtaatctggcaccttcggcaccaggtggtgcaggggcacttctaagtgggctctttttgttacagcacatatccccgtgtaatcctctgagagtcgaccc

SEQ ID NO: 480220 - DNA, 728 bp, Homo Sapiens
ggggttgatgggactgagaaaccagagttaaaacctctttggagcttctgaggactcagctggaaccaacgggcacagttggcaacaccatcatgacatcacaacctgttcccaatgagaccatcatagtgctcccatcaaatgtcatcaacttctcccaagcagagaaacccgaacccaccaaccaggggcaggatagcctgaagaaacgtctacaggcagaagtcaaagttattgtggtgcatagcagcctggttggaagcattctgagtgctctgtctgccctggtgggtttcattctcctgtctgtcaacccggctgccttaaatcctgcctcactgcagtgtgagttggacgaaaatgatataccaaccagactttttgtttcttatttttatcatgattcactttataccatggactgctatagagccaaagccagtctggctggatctctgtctctgatgctggtttgtactgtgttgggagttctgcctagctgtgctcactgctgtgctgcggtggaaacagactgtctgacttccctggttactcatgtcctcaaagacgactcatgatgctggatatgaagaactattgacttcttgggaaaaaacggagaaatattaatcggaaagtcgattttaatgataatatggaaaacctaaccattataacaaagcaaacttgagttacctacgatgtaagcatttaaagtaacacacaca

SEQ ID NO: 480221 - DNA, 869 bp, Homo Sapiens
ggaattgattagttggtagaatcatttcgtcctattctgtgacacattagaaacttaactttaggctttttcatctccacagcatagagttctgatcgcttctgtctataaacgggggatttgctggcgtatttcagccaagcttctttcaggtctatgtctgaatacacgattgcttcttctgtgccagctttgtttagaacctccccccaagggttcaccacggtgctgtgtccccaggcaacataggaggctttgtcatcccgggcaggagagtctgtggccacatacacctgattatcaacagcccggcttcgctgaagtaactcccaatgggctggtccagtggtcagattaaaagctcctggatataccaacagctggcagcctctctgtgcgtagatttgtgcaagctctgcaaaccgcatgtcgtagcagatgcccagacccactctgcagtaagctttctatactttgctagtaaagttccatcaggcccaaacacagcacaggtgttatataatttcccagcatcctcttcagggatagagcctccaatgagatatatgctgcattcctttgctacttcagaaagcttctgtgtggattcaccaggaattttctctgcatattcaggaaaatatttcgctccatatggagaattaaagcattccggcaaagaaactattttggctccttgcgttgctgcctcccggatgaagctacaagcgcgagtgacgttatctgatttgatggaagaaatctgaagctggatgagggccaagcggaaagaggtcatgactctgcagacaagcaccacctgcgccgcccgctctcgacgaattcgagctcggccgatttggcctgat

SEQ ID NO: 480222 - DNA, 511 bp, Homo Sapiens
  misc_feature (116)..(116): n is a, c, g, or t
  misc_feature (158)..(214): n is a, c, g, or t
cacacagtcaggagcagtcaggatgctaccagatgtctttattggggtctcgagcacagcatgacagttggaggcatgcagacagggcacagggcccagcctgggcatgccccagnacacacacgaggggacagctttagaaaaggactgaccaacannnnnnnnnnnnnnnnnnnnnnnnnnnnnnnnnnnnnnnnnnnnnnnnnnnnnnnnntcacctggtcctctgctattgcacggcatcctctggtccactgaccagggaagtacagtattgcaactggtctcctcttgcccaaggcttcccttctcggaccccctgggccagatgggcagacagatcctttccctgcctgtctgcccagcagcatttttgacaacaaacagacaaaggagagagaacaaattcaaatctaaagaagagaaattgcccccctaagtcaaggacatagatggggtggaggaagtagtggaggaggctgcagaggagcccctggaagtccccccacaa

SEQ ID NO: 480223 - DNA, 711 bp, Homo Sapiens
  misc_feature (37)..(37): n is a, c, g, or t
  misc_feature (60)..(60): n is a, c, g, or t
  misc_feature (110)..(110): n is a, c, g, or t
agtttccagggttccttagttttatttatttattttncatatcgatgtccataatcacanggtcaatatcacaacccacatgccactcacttgaagaaatattacaagangcactatcaaacgagggtctcggggaattagatacactgcccctgggcagcattcaatcgccactctacacaaaaacattgcagatagagcttacgtcaccacatctgaggtctcgtcataaacactgtttaaaaagtaaattgaaacccactttcaaatgaaagttgacacgctgttaacgtgcatactggatacacaaaaatcattaaatacagcacaaagtaagaccaacttctcctaaatgttagcccaaacttcttttttcaactatgttatgattagaagaaaacctgttaaagtttgcgcaaaggaaatagcttcccaacatcacagtgtttgttgtaaacccagagactattcttaatatgtgaaaaagggatatttttggtaacccccaaacatcagagaatattacacgaaatgggaaaggttgttatgttagagagaatttaatttttaagggactaaattatacgacctcataaaggtaagatcagtaatattttaaccaatgaaagttgggcagaaaatgatccctccaaacaagagctgtgacaaaattggcacatacatagaaatagctagctatacatgggttgg

SEQ ID NO: 480224 - DNA, 1310 bp, Homo Sapiens
  misc_feature (205)..(248): n is a, c, g, or t
  misc_feature (404)..(437): n is a, c, g, or t
  misc_feature (533)..(553): n is a, c, g, or t
  misc_feature (600)..(608): n is a, c, g, or t
ggatttgttatggatagttgtacaacctggggactgtcagtgactcattggtatcagcatatgctaaagaagctcttgaatccaatcttgaaacctgatctcccttcgtcaacattccccaataccaaactggcccgtttacccatacaaatgcacagtaaagggaagaacagcggtatttttcctagccaactgactctatcannnnnnnnnnnnnnnnnnnnnnnnnnnnnnnnnnnnnnnnnnnnagagcaggggtgggagtgggctgtaacttcacaatcctaatacagtaaatgttttgcatcttccatgttttatgcaaaaacagacatttaaatcaataaataattgtgccctagactgaaggttaatgtttaggagaggaaaaaaattgttggaannnnnnnnnnnnnnnnnnnnnnnnnnnnnnnnnnggaaaggaaggatacatatttttgttgtgtaatattttctatttttgaatgcattttattggtacaagactgtttttttggtgaagacattatttnnnnnnnnnnnnnnnnnnnnnctaatcgaaaagtttgcccttaaggatatgctgcagttttgaggttnnnnnnnnnttactgattcaagatgcgtgttaaaagttgggattatattgttgttttttgtaattgttacaagaagaagtttgtacccactgctgtttattttgtttcagatgagtaagtaaagggattgttcttgttttattctttttttagagaaaaaaagctatttatgaaatgtcaaaaacactggactgtgagtttaagtgtggaagcattttaccaccctgtgtcttcaaccaattatgggaaaccccttttctcttccccctaccccctgccttagccttgccaaatgagaaaaatataacagctgtcagattatcaaagccaccgaagccctgctttaatttttatggtttgaaaaagttggaaaaccaaagttaaatttgtttctgaaatcctgctgtgcgttgcccttttttgtatgacacagccgggctctgcctctctatctcaaatcattgccttcttagggactgggggccaacctgatgcaaagagaggcataaaggtggtgagcctgagagttgaggtctcacgaagtaaaatgtgagtgggacttcaccctctcagtgggcaaccacactttcccatcctgagatgaggctgccaagagagcacactgctaacactgcctgaggagagcacgcctcctgtctccttcaccctctgcttctgagaccctcctgttactgttatcatcgttcccta

SEQ ID NO: 480225 - DNA, 960 bp, Homo Sapiens
gaagcaacacattttattttgtttcaagtccacacagcaaggaaagtggggctaccgaggtggcgcagattggaacaaagagaaaactgtggtctctgattaagacatggagtctgcacacaggggccaaacaccttgctctctctgtaacacgagatcaatctatgctggctggagggatgttaaagtgcttggtggagactggtccctttcagtgtgctaaacatggccctgatagcttctccacacaggtaattcaccagtaaaacccatccctcacagaggagagccttggcccaagtctggaccaatgaccaggtcttcttaagtgcccatctctgggctgtaatcctagacccaggacatggctaaacctctctctccttgccagggaaatgtgaggctggggcctcccatagagaccagtggtttgtccaggctccagtacagatggctgtaaaacagagtcccagcttcccactcactcaacataaaaccagtgctgggtttccagtgaaaagaagtcccaaagggcagttccttctatcttttgtgacaggatagctcacttaacttgcaaggaagttacaaggtcccaggccaagcccctctcctcacgggagggttggaggtggggaacacgaggcctgggcctctgggaggctggcttctcactccccaagtttgcctcctttctttctgctctggtgggactgcccagttccttccaggagtcagaaatctgtgactttcaaggcactgaacagttctgtcccactcccagacggggagagggcagcccccaggctcatgacgtggcttctgcttcaataagagaagttcatgcaaaatgaacttgttctataactgagttcagtagattcattatttgtcaagtttgcttacaaagagggtttgtcagtcactggcaggaccactgcctcacactagagtcgccaa

SEQ ID NO: 480226 - DNA, 1004 bp, Homo Sapiens
aaaaaatatatacctttagtatggctttttagatttaactataagcaggaaaaacttattttttaaagaagaaaggaatactttttcactcttaattataagagctggttgtagcagcactactaaaggttagttggtatgcgggaaagaaatctaaaaggaattctatgaatcaaaagaaactctccagagattttctctaaaaatcaaacgaattctgccccttttgcgtaaatccaactcaggagccccctctttgcacagtcctttagctgagtcccacggtgcatgggatggcacagggtgatgctgtgtaaaggcctttctttgctcagacatgcaggagacagctgtggctaatggctgcaagctcagttctggagctgggcagactcaggttcaagccctcctcgcccctcaagagttgtgtggctctgggcagtttccttggctgtagggggactaatattgccgatctcacagggctacggagaagatgaaacaggacaacccatgagcaattcccagcacagtgtgtggcatgcaggaagcgggagtatcactaaatggttcatagaaatatgaggccacgcattgctattaattaaaaaaagttaaaagattaaaaatcacatctcaggaagggcctgatgaacaaaaaagggaaccttggggattctggcccatcactgctttatccttccttcaacacctgccacttctcagagcatccggtcagctcccttatctataaatgggggctgttatccccctccctgtgggatggctgttggggccccttgagacaacgctcataaaggccttagcccgggagtcataacaaataagggacagtcagtgtcatgttcaacacagggatctgagatgaggggctcccagaggcttgggcaagtccagcggggggcatcgggaagaccctctctggtgctggtgttctgggacgggagccctgcagggggcacttctctgcaaactctctctct

SEQ ID NO: 480227 - DNA, 918 bp, Homo Sapiens
cacttttggtgggcggccctagaatactgttgtacaatggtttatctaccgttttattacaaatataatttacttaaacttcccattaacaaaacaattctggtactacagaccagtggtgtcagaataggcttagtgcctcgtgtttgtgtttgttttgttttaattgcatgagcactctagatggtaaagttttcagagttcattttatgcagggccattctcagtcctcaatgtactcccacagatctttttcatagccttcatgcacatgctgtaacaaaacccttcgtcgactctcacagtatctgtacttgtcttgtactttctgctttatatcctgcagagaatcttgggaaatatctcgttcaaggtagcccgagagcacctctgtggcattctctagatctgctttgttattctcaaagataatggactggttattctttttgaggtagaaagcgaagacataagtttacatgagtgtggcatgacactggcagaggacatcaactgctttcttcagtaactgcatctcagtccagtacatgttgtgctgctgcatctcctccattttctgtttcacctgagcatatagtttgtgctcaaagcgcaggctctgcatgtggttcatatagcgattacagtagaacaggtacctctgcagggctgccctagatcgctcctgtgcatctcttgctgcctttgcatcatcctcattatagcggttacagttgtaccaggcagatccatgtggttcccatgggccaagacacacccagcaaaactctgctttacaattctggttacgacagaccatgtgattacaaccaccatccttctcaattgtgacatggcatttgggacattcctttgtgttggctgcaatccaattggaggtttcactgtcatcaccaa

SEQ ID NO: 480228 - DNA, 930 bp, Homo Sapiens
  misc_feature (122)..(148): n is a, c, g, or t
  misc_feature (305)..(339): n is a, c, g, or t
  misc_feature (455)..(475): n is a, c, g, or t
atcaggccaaatcggccgagctcgaattcgtcgagagcggactttataagccagtgttgcctaagtattaaaacattggattatcctgaggtgtaccaggaaaggattttataatgcttagnnnnnnnnnnnnnnnnnnnnnnnnnnntaccttgtgatgcattgaatgttctttcatagctgtcgttgttgaatataatatacatagatagcgatgtgcagggatttttacccagccagctaactttactaccttccttgaaggtggatctttttaagatgaccattcgctcatttgaagaagnnnnnnnnnnnnnnnnnnnnnnnnnnnnnnnnnnncaatttttacaaagtaatgggattcaaagaaaggaaaaaaagatttttcttttttgtcaaaatatcgatccaatcagattggtaaaaacccccacacaaattaaagaggaataatnnnnnnnnnnnnnnnnnnnnngaacttttgcaaatttttctatatttccttctttcttttatatcatgtgaactaaaacagtcttctgttaggggatgggggcaagggggatacctgatgacttgaacaatttaataacattaacatgtgttgccaaagaggttggtctcttgtgctgaaaatgggtttcaagaaaaatctatttttataacaatattaagaatttttacaagagaatcgtggatttgagaaaaaatatttcgactgggctaaattagggggaaactggccacttggtcgcgtcatactgcactggtaaacttcttagagatccacgatgtctgttttacacctggagttcgtaaacgggtttgaaggaggggtatatacgaatgatcttcatatcttccatagcgtgtatatattacaacattttaatgtagggaaagagtttcgtcacccggtaccagttccaa

SEQ ID NO: 480229 - DNA, 136 bp, Homo Sapiens
ttctgccagataatctttattttacacatttgcaacacggcaagagaattcaccccgtacatcaccatgatcggatcccccacccattatacgttgtatgtttacataaatactcttcaatgatcattagtgtttt

SEQ ID NO: 480230 - DNA, 727 bp, Homo Sapiens
ccattagaagtattttattttaaagtacacttgaaattttaaatgtgtacaaattcagaggtttaaaaaacttcgaaagtcacagacacagaatttaggaagctgaaggctgagagtctcccttctcacttaatccatgctttattttgcattcctcacaggtaaggaggcagtgctggttatgctgtggaccaaaaccagccccacggagctgatcttcaaaaaaatggaatttactctggcatactcctatgtatgatacctttccaaggccaaatccccaagagacccagcaagtgcaactttgggcaatgatcctaatctgggattagctgccaaataaccttggtagactagtccctgggtgacaagcatgctcactttgagaaattttccgattcttgaattgctggcggataatcttggagatctcttctctgtggttgtgcagttttgcttattggagaaaacggcagatctgcttgcttggtggtggaaaatgggcatctttatcttggtttccacgagcagacgctgaagccatgatgactttgtgcttgctctccttccagttgtttatcctctgcttactccttgacccagtgtctgtgtggtctgggtcgcctccgaggccgagtccctctgttgccaagcccagcaggcctcgctcccccgtgactgcaccgccggcccgctccagcttcccgagtaccccacctgtctcccc

SEQ ID NO: 480231 - DNA, 345 bp, Homo Sapiens
  misc_feature (255)..(282): n is a, c, g, or t
  misc_feature (303)..(303): n is a, c, g, or t
gaaaaagtcataatgcatacagctttgttgcttttagcatttttatcatgaatattttccctacatttatgcaaagtatttgtaaatatcattttcaatggtgtataatatttcatcataggatgacatcatggtttagttaaccattttcttttgttggatatttgagggtctttccaaatttggccattgtaatttcacaatgtctttttcattacctaactgaaaatatttgctttggtgaaaccagaggannnnnnnnnnnnnnnnnnnnnnnnnnnnaagaagtccttttaatagctnacatttcattgactaagtggaacttcaagagacaggtagaag

SEQ ID NO: 480232 - DNA, 114 bp, Homo Sapiens
  misc_feature (114)..(114): n is a, c, g, or t
cagcaaaccgctgcttacagtgcattgtgtatttctgtagtactgttttgcattttccatagagacagaaaactttgcaagtcaatcactgttgttcccatggtactgtaagan

SEQ ID NO: 480233 - DNA, 939 bp, Homo Sapiens
cacgtttggtttcccatatctgccggcactctgtgtttataccgtgtccggtccctatgtggcaactccgtccagcgccctacagtattctggcccaccagctcttgggtcccccgtgggcacccacttgtccagatggtttgccccttcgaggcctcacctggccagtttcgtggtgccacttggatcggtctattcccagggcacaggaggctgaaattcgtgactcccagagaggtgacctccatgaagggcacggcacgacaagaaacgtcacccagtagcctctgcttggtgatctcgttgaagatgacaatagggaggcagaataaagaggaccagaaaatcccagagggccaggctggcaaggatggagttccaggcgctcttcaggtagtatctgtgccacacgatgcacatgaccgacaggttgcccacaatgcccaaccggcaacaccaccagcgccagaagcatgatggcataggcactgtaggagctctcggtcaccggatacagggggttctggatctgtagcctctgccctggtgcccctgtcagattgcccctcagttcctgcccactgtctggggtgcccccatccttgtcggggttagggctggtggccaccaagggcttggttggctgcaggccagcagggtgaatgggccgggggtactccgcccactcctcaggcacatactgctgcacgcccttggcctcctcatcctcggtgcccctcttggatcggctctgctgctcctgggtctcggctctgtgcctgcccaggtgcaggggggcacccccagagaccctgcttagccccacagccaaaatcacagcaagagagacagccaggggccacagccaccgcatggctggatgagcacgaacgcgttggtcgacgatatcccgaaattccggaccgtaccacctgcttt

SEQ ID NO: 480234 - DNA, 1062 bp, Homo Sapiens
  misc_feature (241)..(250): n is a, c, g, or t
  misc_feature (362)..(362): n is a, c, g, or t
gattaacggattaagattttggggcccccccggagagggaatattgttgggaggttcccccgccccgaaagggtgttcggggcaaatcttgggctgtggaagggaagagttttttatttcgcgggcccggtatcgttggggcgacatagggaaacagggcgccatgccgggttgttcgatccacgggaccctagaaggccaagatggccctgggcctggggggtttgcttttggtctgttnnnnnnnnnnaattatttcaacgtcgcaacagaggtggggaccatgtctttagggggtggcggacggttcccgaaagccccgctttcccggtagcccaggggagccctgggagaaaatcagngcccgatgttgttcaggcagcgggcagcctgttgggaaagcaacctccagggcctcggggaccatctctctcaggacgcggatgcgggcggggaccatctctctctggatgcagatgcgggtgtagtcccagctgggaggagtggtgcggaggggccggatgcggacccagtgcttcctgtggaagtaggtgaccttgcagttctcctggacctgggagctgaggaagggcctggactgcagaacccagtgcttttgggcggggcgcagctttctggcaagcggcttgggccttccagtagacactgggctgccagaagtttccgaaatctttaaaaatactcctatcacagccaaaccattttcttccagtgctgcatcctcaaagttttcaaatttgactgcgttccaatgcactaagtgcagctgatttatctgtagaatcttcaaattccacgaggaaagagtacccattattccagacgtggaggcaggtggctgggtcataagagatggtcagtggttttaagccgggatcataaacactgtccctccaccgaatgttgatgggtgactgtcgatcgcccccaggaaccaggtccacgctctcccagagtggatgcactgagccagaacctcctcgttcgctcccggtacccgaggatcccacacgcggccatcttggccatcccgggaattcc

SEQ ID NO: 480235 - DNA, 785 bp, Homo Sapiens
tgggtggcccaggggagtcccatccgacttgcggatgtgctctcgggacagattgtcagcctggcgcactggtctctgggatccggaacctgcagcagcagcaagtcaggcgcacatcggcctccaggctcatcctgtggcccacgtagatgtagaggggcctggtctgcggtcgtggctcctcaggccattcccaggacagtcccagagtctcccagcagagggaatgagtctcctcgagtctgcaggagtcggatcttctccttgtgcagggcgttgttctccagcccatccacctgcagaagtttcttggccaccccaacacacggcaggtctgtaaggacgccaaggtggcaggccaccccaaagcctcggtggtggagtaccccgtttccatccacaagaaggacctggggcatgaggcccggctccttctcccgcagctgctgcaccagctccagcaagaagggcacctctcggaaggccaggaagcccgacacgtagggggctgtgaggctgaccatgcggctctcctcatacaccacctcgagctcagggaagctgagcaccaccagggaagcacaagcgcggacactgtcccctttcacgaaggacacgtcaacgcccccgaccctctgcagacccgagaaggcggggtctcgctgccacgcctcggtgtcccggtctacgacgtgggccttcagccgagcttgctcccgtttccacagtgacagcgtttcctccgcggccctcccgccgcctccagggccatggcttcgtcccgg

SEQ ID NO: 480236 - DNA, 926 bp, Homo Sapiens
caggttcctctcagtttccgggcaggtgtgccccctatccagacgtggaccatgccaagcttgtcctggctggggggttctgcctcgcccacaagcctgtccacggtgcttccttcaggccaactctggctattccggttcttgcagctccgtccaaccccgcccgcggtctccctgctagcccatgccgggtcggtgatgaggcacaagggcagagagcaaggcgaaggcaggacatcgacaagcaagcctgtgcagggaccttgagaaggccaggatactgtcaatccagtccccgaagccacgggcaccactgcagccggtgtagcaccacggcactgagcagaagatgagcttgccctcgccatggctatagacctgtacgccaggcggaggatgaacgagctgccaggaaggccgactcacagcaacatggtcctaggtcagccggtcgacaagcgtcagcaaagccagggatcttctccgcccactttgcggatgacgctccagagaacacggagatgcagtttcgatagaactgcctgtacatccccagcatcttccttcccaaagtggggcagtgggggcacgcgggggcgtgcctcggggctggccaggtccatggtaggagcttgatagaatctacaggaggtcagggcggtcgcttagccaggtggtcacggggtcccggactcggtgctggtgtcccatattgggcttggatacagggcatctcagcttcctcctcacgatctgctttgacctggaaaaaggtcccagacaaccgcacgaagggagaatcccaagattggttgggggctcttcctggtggtctcagggagccctgtaggggagagacgtgctgcccagccagcctatcctcacagccgaggctgggcagcagctgagcgagctctggatgtggt

SEQ ID NO: 480237 - DNA, 687 bp, Homo Sapiens
ttggctcacccatggcacttttctgagcccagcagaaatcagcggagcttgggcttcgcttagcaggtttgcaattgacttcaacatgcaggcttttcacatgtgcaataatgctggaaacagaagcaccaaactgattgtgcaattactccttttgtagaagaggccaaaatcctcctcctccttcctttctcctatattcactcctccaggatcataaagcctccctcttgtttatctgtgtctgtctgtctgattggttagatttggctccccttccaagctaatggtgtcaggtggagaacagagcaaccttccctcggaaggagacaattcgaggtgctggtacatttcccttgttttctatgttcttctttctagtgggtctcatgtagagatagagatatttttttgttttagagattccaaagtatatatttttagtgtaagaaatgtaccctctccacactccatgatgtaaatagaaccaggaataaatgtgtcattgtgataatcccatagcaatttatggtaagaacaagacccctttccctcaccaccgagtctcgtggtctgtgtctgtgaaccagggcaggtaattgtgacactgcatctcatagaactctgcctgcccagatttttgtgtgctcacctcaatgggtgaaaaataaagtctgtgtaaactgt

SEQ ID NO: 480238 - DNA, 172 bp, Homo Sapiens
gtattgtgatgctttatttgtacatttttttcctttctggatgtaattttaatctcttgccattcattagtgttatttcattgtaaacgttattgtgccaaatgtactgtattcaaaaggatgtgaatgtgtattgtttcagaacctaataaatacaatgatgttaagtctt

SEQ ID NO: 480239 - DNA, 157 bp, Homo Sapiens
gagaatggtggttcttgcgaaacacctgaagttttactcatggtacaaaagtatttaataagtgacacatcagtacagaaacacagagcttgtagcttgtcctttaaaaccagaatggccaagtgaaaagtcagtacagattcttatttttactatt

SEQ ID NO: 480240 - DNA, 917 bp, Homo Sapiens
  misc_feature (576)..(592): n is a, c, g, or t
  misc_feature (850)..(866): n is a, c, g, or t
ggggctccagtttttcagaagaagtgaagtcaagatgaagaaccatttgcttttctggggagtcctggcggtttttattaaggctgttcatgtgaaagcccaagaagatgaaaggattgttcttgttgacaacaaatgtaagtgtgcccggattacttccaggatcatccgttcttccgaagatcctaatgaggacattgtggagagaaacatccgaattattgttcctctgaacaacagggagaatatctctgatcccacctcaccattgagaaccagatttgtgtaccatttgtctgacctctgtaaaaaatgtgatcctacagaagtggagctggataaagacagtgctacagagacctgctacacttatgacagaaacaagtgctacacagctgtggtcccactcgtatatggtggtgagaccaaaatggtggaaacagccttaaccccagatgcctgctatcctgactaatttaggtcattgctgactgcatagctctttttcttgagaggctctccattttgattcagaaagttagcatatttattaccaatgaatttgaaaccagggcnnnnnnnnnnnnnnnnngggtgatgtaaaaccaactccctgccaccaaaataattaaaatagtcacattgttatctttattaggtaatcacttcttaattatatgttcatactctaagtatcaaaatctttcaattatcatgcctcacctgaaagaggtatgctctcttaggaatacagtttctagcattaaacaaataaacaaggggagaaaataaaactcaaggagtgaaaatcaggaggtgtaataaaatgttcctcgcattcccccccgcnnnnnnnnnnnnnnnnngactttgccttggagagccagagcttccgcattttctttactattcttttt

SEQ ID NO: 480241 - DNA, 1176 bp, Homo Sapiens
  misc_feature (793)..(793): n is a, c, g, or t
  misc_feature (1100)..(1126): n is a, c, g, or t
tggcaagaacggcaccctctttcctgtcgtccagggcagttttaaagaaactgtagggaattttagtgtctcgttctgcctcttgagccattcattcacggagtgcaggaagttctggactaagggccggccagggaaatactgtggccagcactgccacaaactttttcagggccaccaggcgctgcccttccaggaccgggaacctgcccacttctatccgcaaggatgtagtgcagtgcagattccaggtcagccatgtagatcttggagcgatctgccaatttccaaacagtgggagctatcttgttagcagtggttggtgcaactgtggtctgggcagcctccctggtgagcccagagagtctctgcaggtaagcggtattagaaggaccctggattccatgagcccggggactcgggagacagagcccattccggaacagcaggtagcaagaggggaaagtcggtgacaccaaactttctcaccacattggcttctgtgttcagcaccctgggcaccgccacgcttttgtgctgggacaggtccagagcccacctctctacccaggtaggagcctcccttttcaaagatcagagccaggtactcttcgttatttctcgcaaagaatccatcaatctcctccagcttggcaggctccagtgggggacaggctgggggccacgtgtcatgatggactccagggcgtcaatgagcctctcccgcagcgtctgcacgtcagcaccagccactggaaatactgctcccgagccgttcttggtaaagccctgnaagaacctcacagtcgggaagccagggatgttgaagtctctgcagactgcactgttggtctcctcagcacagtccagggcggcgagatacagggccggcctccaggctttgacgtcttcggccagcgccttccacgtcggggcgaaggcgatgcagtggccgcaccaggaggcgaagaactccacggcccaggcgctgcgggagcccagcaccgcgccgcgcaccgtgtccgcctgcagcagcgtcagcgggtcggaaggcgaatagagcgccgaccgcggggccgcgttagcgccgggaaccgcgnnnnnnnnnnnnnnnnnnnnnnnnnnngacggcggcggcccggagccgctgttgcacctcctcatcctcggcgctgc

SEQ ID NO: 480242 - DNA, 929 bp, Homo Sapiens; identical to SEQ ID NO: 162596
  misc_feature (329)..(329): n is a, c, g, or t

SEQ ID NO: 480243 - DNA, 1156 bp, Homo Sapiens
  misc_feature (1014)..(1022): n is a, c, g, or t
atgggactgggaaagggggaaaggcctcccccaggtttttttgtgcccccggggttttggggggggccctggacctgatttcaggtaagggaagaggccgaagggctgttccttcagaggcctttcagacccaggatgcacgttgtcaacatctgttgacagttgagccaggccagggcaggcagctgctgtgtgtgttgagttccttctcgtacctgggctgagtataggaccagatttgtacttcactccctagggcagcctcgaagcagtcatataccacagagcccacagactgaccaaactgcacaagggcagcaggcacttgcacctccagcaggacgcagcgggcagtagggtaggcctggaaggagagcacgacttgggcctggagagaggcattcctaggctcctccacccctgagtcagctgctcctccaaacttttcctcatcttcaggctcttcccagtgcccatgcacggccaagtggacagccacacgctagacagaggtcacagtcggtctcccttctggcacctcagcaccagctctgtctgcaggtgcgtaggcgccagcacggggcccggagcaggcacgatgtccccaggcaggcagagtatgtcactgtcccagaggcggcaggagaggccctttttctggggctccgtattcccagaccctcccagagaaagacagacccagctcttgccccttccccgttcttgctcttctaccatcagcaccagacagaccagacagggcagttctggcagtggcagcagtgacaggagccaggctaaggctttgctgagccaaaaactgaaccctgagcctttcctcgtctccccagggttccagactcaccggagagcagtgggtagcgtcctgaggccccacaagcctctccagagaaaggaccactgggcttcggcccagtgccaaggacagcaagaaccagggcacaggcatcttctaggtgccaggtggcacccaggcctgaggccctgtgctgnnnnnnnnnaaggggggcagacaccaccagtcagcccagtgtctgtgggtggcaggggctggaatccactcttcagcactccagagggggcggaggggactgtgctgggtagtttgtgcactctcatgtcactgggagtcctg

SEQ ID NO: 480244 - DNA, 826 bp, Homo Sapiens
ctcactggcacagcgaggttttgctcagcccttgtctcgggaccgcaggtacgtgcctggcgacttcttcgggtggtccccgtccgccctcctcgtccctacccagtttcttgcttccctgccccatctccgccgctccccgcagcctccgccgagcgccatggctcctaggaagggcagtagtcgggtggccaagaccaactccttacggaggcggaagctcgcctcctttctgaaagacttcgaccgtgaagtggaaatacgaatcaagcaaattgagtcagacaggcagaacctcctcaaggaggtggataacctctacaacatcgagatcctgcggctccccaaggctctgcgcgagatgaactggcttgactacttcgcccttggaggaaacaaacaggccctggaagaggcggcaacagctgacctggatatcaccgaaataaacaaactaacagcagaagctattcagacacccctgaaatctgccaaaacacgaaaggtaatacgggtagatgaaattgataggggacagagggaagaagaagaaggaaaatgaacgcaaggaatctttcaaaactggaaagagtccaaaaaggtggtccctcccatcccaaagaaagagaactcccggtcccctaccaaggataaaaggaaaaaaggggaaaaaggtccaagcccggtgcctaaacactggttttccccccacgcccgggggggcacgatttggggaggtgggtccccatgggcccacaagcccaaacttcccaaggcccctgggaacacccccaaggttttggagctccacaagggggttctttcc

SEQ ID NO: 480245 - DNA, 380 bp, Homo Sapiens
cgagtctatagaggacccccgctgtgcgagcaagctagagagcctcaaaaaagctgtggttctcaaaggggcaaatgacttagatatcaaagcagagggaaatattagattccggtatatcgttcttcaagacacttgctctaagcggaatggaaatgtgggcaagactgtctttgaatatagaacacagaatgtggcacgcttgcccatcatagatcttgctcctgtggatgttggcggcacagaccaggaattcggcgttgaaattgggccagtttgttttgtgtaaagtaagccaagacacatcgacaatgagcaccaccatcaatgaccaccgccattcacaagaactttgactgtttgaagttgatcgcccagcg

SEQ ID NO: 480246 - DNA, 737 bp, Homo Sapiens
cagcaggttctggttttcccgtgaacccccagatgaatataaattggagcctctgagaacagttccttccccagagcggggagtgtgcacatgtgtgtgtaacttcctgattccatgggacctggccagctcttctggagccacacagcacctccttgccttacaccctggctccagcttcactggtccgggggacgcctcagcctggggcagctgtgatgtaaaccagtcactccacctccatcttcctcttctgcaaagaatcgaggaagtcttgccactcttatagtcctccccgtggttctctaccatgtagcgtacatagtcaatgaggtcccgagacagagtatttcctttcttttctggaaggctggcttctgcctccaggtcattcagcacatagggcttccgtacaagctctttaggcctctcctctatgtccacctccatggccttcacctttctcttacggaggggcaccgccctgttggggtccacagccaaccccatctcggccaggttctgccgtaccgatttagcgtggtcccaggcatgtcggatgtgggagcattcgatccgcggcgctgccttccgtcgagcattccggttcagacgctttcggttgacactgtaaccaaacttctgcctccgggttttgcccttggccttgggcatcgcgctgaccaccgcaccagcagctcaaacacgctgcctctgtctctcagacctcgtgtccc

SEQ ID NO: 480247 - DNA, 838 bp, Homo Sapiens
  misc_feature (565)..(565): n is a, c, g, or t
  misc_feature (567)..(567): n is a, c, g, or t
aaagaggggtttaccccttttttcccaaaaaaccaagggttgtgtgtccccccttttccaaaaaaccctggtggccccccaagtaaattttccccgggccgggttttttaacccccaaccccttgggggacccaaccccgccccctttcttaggccctgcacttttaatttcccctttttggactgggccaaaggttttcaaccccggcccattctttcagggggcaggggggaaacgggccagggtttggacccaagtttcccctccgtttccgggcatggccggctggccatatttgctgctccaccaggccccaaggaaggcccgttggtccttttccagccgggggcagcacgcgtagcgagcctggccagggcccagcccagggctgcggcggtaggcggtcctatagatgttcgggtaggtgctgcaggcccggtgcccgttcgcagttggtgaggaagggctggtacacacgctgcacgaacgactcggagacagggttccccgtgagcccggacagcacacaccctacggctggcggaggagaatcagtcatccccncncggacaggggcccaggagctgctcctccgggtggtgggggccacctgtgcctccccggtcctgggggctgctgatgctgctggagcccaggcgtggccatggtggccgctgctgtgtcctgggactggagatggaccctagcccttgctggggcctcaggcccactggccgcctggaggcacctcctgaggcccacctgcctggcctgtccacaggagcctcccttgcagccgtgcagggccagctggatcccgggaatccggaccggtcc

SEQ ID NO: 480248 - DNA, 750 bp, Homo Sapiens
agggttgaaatgatgtgcttttatgggaaacaaaaatatccaacaacaataacaaaagcccttcaatctcgccaagttcttaaccagtgacaataaggcaacttccatgattgcgtctggctggggatgattctaaagggtcaggaaagtgaaaagacattggccaaaaagagaagttgcagggagggctgacatcctacatgagaacacagcagacttccctctggcccctcaccctatcaccccttcaatttagaatctccccccaatctacaaagatccttcctgaatttcctcagatgcaatctcttccagaaagctttcctgggtctgctctagctgcatatgacttttcattaacatcacgcacactttctcattccttctccgatcactttctgccttacattcgttatgtttgggtacatgccttacgatacccgctattggtaggcatatccctgagaccgagtcccaggttgactcaccccgtgctcccctccccctcccccattcagtgctcagtattcagcaggtgctcaacatcagaggtgctcagtgagggtttgctcaatttaagatcagttctacattggccatcgtacatagtcagtctctggcgagtcattattggcattttcacttcttcatccttcctccatgatctcaaaatggtgcgactcaaggcttctccaagaaggaacagcccccaccaaacattacccattcaaggtgaaaggtttggagagg

SEQ ID NO: 480249 - DNA, 115 bp, Homo Sapiens; identical to SEQ ID NO: 361728

SEQ ID NO: 480250 - DNA, 533 bp, Homo Sapiens
gcggccgcccgcctacaacctggaggccggccagggcgactacgcgtgcggcccgcacggctacggcgccatccccgccgcgcccccgccgccgccctacccctacctcgtcacagggatacccacccaccatcccagggtctacaacatccacagccggaccgtcacccgctatcctgccaactctatcgtggtcgtaggaggctgtcctgtctgcagggttggggtgctggaggactgcttcaccttcctgggcatcttcctggccatcatcctcttcccctttgggttcatttgctgttttgccttgaggaagcgacgatgccccaactgtggagccaccttcgcttaaagggaacaccaggcccggctttcctacacccagctctctttttctaatgtaaatgttgtgtacaatagttttatttgattaagcttcaggactgttttgtaaagcgaggtgggaccgatgtggcacacgccagctgcggtttcccggagcgtggagaggcagtgctgctgctcccgcccga

SEQ ID NO: 480251 - DNA, 1255 bp, Homo Sapiens
  misc_feature (989)..(989): n is a, c, g, or t
  misc_feature (991)..(991): n is a, c, g, or t
  misc_feature (1005)..(1005): n is a, c, g, or t
  misc_feature (1062)..(1071): n is a, c, g, or t
ccagggcttcagggggaacgggccaccaaaacacccaggccccccggggcaggtgagggggtaggaattagcttcctgggttccccggaaagcccaggggtgaaggtgggggagaatacaattacttggggaaaagatttctggaatgaaacttacatctcaaaagggaggtgagggcagggcagggcgggggagcaaagagggaaagcacctagacgggggtaagaggagcctaggtccccctgctctggcagggcctggggtgggggggtggcgatcacttgtccgagttcaggcccatcatgttcttgagggcgtttttgaggctggttctgctgggggacttgacagcaggccggagctccgggctctgctcatcctttcgtagctccatctcgatgaccatcacctttgggcctttggcggactccacccctaacccccgatcccccgcccggcccgctaaccgctatttcttatccttgcgagactcccccagccccttggccttcttctcactgacagctttggtgcttctgctgtggtccagcattgcatacagcactggcgtctgccgcccgcgcttcgacgcgtcctttccctggcttgtgcaatttccccttctccatagccctgaagcctcctctgcagggccgcctgcctgcgttagccagcagtaccgaaccccgttgaaaagcagcagcagcaacagcaccaccctgaggacacccctgatcacagctcccagaacgaccccgtacctagttggcactttttcaaagacatacagcaggacctgagaggtctttcgcactatgttcacagggtttcggaagtcccaagccatcgtgccatcgtcgtatagctccagtctttgctaaaacaacaaaactttcccgcccgtgatggttccttcctgtagtcccagctctctctggagggtgagccagtagaatcgcttgaaatttggaggtagaggttgcgataancnaagatcatgtcttncactccagcctggatgacaagaatgaaactctgactcaaacaacaacatcaacaacnnnnnnnnnncagttctgaagcttaattatataaaactactatacacgaaatttacattagaaaaagagaactgggtgtaggaaagccgggtgtggtgtcctctttaagcgaaggtctctccgcagttggggcatcttcgcttcctcaaggcaaaacggcagatgaacccaaaggggaacaggatgatgaccaa

SEQ ID NO: 480252 - DNA, 330 bp, Homo Sapiens
ctgcacctggagagaaaacatacccctttcccaggaacttacaaggcaaagtgcattccttcacgggagcatcacaggggggcatggcagttttgaaacgcaagaagtctgtcgcctgctatctcaggctgaagctcacctcatgtgaatgattgagccatggagtggaattaaagtcatacttgcttagcaaatgcattcctgattgccacaaactcagtaaaaactggctgcaaatgaacaaaacatgtagatgaaggaacaagtgaaatcaaagaatgcagttgcatggagccagggcttagcctgtaaggaaggagaacagaccaa

SEQ ID NO: 480253 - DNA, 958 bp, Homo Sapiens
ggttttattaagaaaagggggcatatcattataattcacaatccaagtcagagtcttaatttaggtatgaaatattacctgccaatttgcttctcaagctactttaaaaatatatatatattctttaaagccattttatggccatgggaatctaattaatttcataatgatgttggttgaacatgataccaaaaaatgcaggtattttcaagaacaataaaatagataacagcattaaagcataatcctttaagaattcatgagaaaaaaaaggatgataaaacttaagcttctttttcagatgtttaaaaatttctataaaattctttgtcccaagattaatcatataaccatggtacataaaatatgctaactacattgcctggtgtcaaggtgggaaaatcctcttttataacataaaatcctcttctaatccatgttgacccaagtcctggctgtctgagggcagattcctgtcaagagacctaaggttgtcatggaaagcatcactttcgtctactagttggtaatcctgttccatttccgttaggaagccactcccagatcctgatccagagccggagccggagccgaagcctgatccagagtagtcctcagaaagtgggaagatacgattcaagtcctggattctcgtctttggaaaaaggtcagtcctcagacgggggatcttgttggattcacctggaagtagttcgaacattggtcctttttcttcaaggcagtttgcagaattactgtctggattgcagcgcacccattggtacctggctctccgcgtaggataaccttgaactgaggattccagaaccaggatgagggcaagagccaggacaagccgactgcatttgagtagcttctgcatcatgaccaacttagtctagctctcctcaggttcacgccaaccaacttttttgtacaaaggtggcctttaaggaag

SEQ ID NO: 480254 - DNA, 113 bp, Homo Sapiens
gattttgcactggacggtgacgtcagccatgtacaggatccacaggggtggtgtcaaatgctattgaaattgtgttgaattgtatgctttttcacttttgataaataaacatg

SEQ ID NO: 480255 - DNA, 1006 bp, Homo Sapiens
  misc_feature (364)..(411): n is a, c, g, or t
tccctcctgattttcgaaaaaggagttgcataattcccaaaaataatattcttattttaatcacacagaaagaaccgtgaagcaccagaaaggaaaatgcctggctggtcagggaagaggtgagctgtcggagaaacacagttaaactaaaaaataaaatccattttgtgtataaactgacttaaacgcatgcaaagaagtggaaaacatatgccatttgttcaagaaaaaatactgctttatagcttttactttacaattaaaggagaaagcagaggccagatataagcccagataataacatttaagtttctcataaaaactcccaaatgtacaaagtccttgccagacaaccaaggcaagnnnnnnnnnnnnnnnnnnnnnnnnnnnnnnnnnnnnnnnnnnnnnnnngcagggattaccccccacaggccttatccctgtaagtctattaaatgtgaataatacatactttacaacgtctcttagtcggcccttggcagattaaatctttgcaaaattccatatgtgctattgaaaaatgaaataaaacctcagatgtctgaattcttatttcaaatacagttatataattattttaaattacaatatacaatttgtgttaaatacaactgttaagggattctgagaacaattataagattattataatatatacaaactaacttctgaaatgacatggttgtttccttcccaccctcctaccctctcaaagagtttttgcatttgctgttcctggttgcaaaaggcaaaagaaaatctaaaaatagtctgtgtgtgtccacgacatgctcgctcctttgagaatctcaaacagccagaaccatcccgtcccacggactgccaggcgccaggacggcttcccggtgcctctttctcgaccattttcacttaaaagcactgtgagtagaattagctgtgccgttgctgccacaagggaggcagcaaaggtcaagaggcgccaacttttttgtacaaagttggc

SEQ ID NO: 480256 - DNA, 299 bp, Homo Sapiens
agcttaaacaacaggcatttatttctcacagctctggaggctgggaagtccaagatggtggctccagcagattcagtgtctggtgaggggggcttcctggttcacagatggtagcttctagctgtgtcctcacatggctggaggggcaaaagagctccctcgggcatcttttataagagcactaattctatgcaagagggcagagtcctcaggacctaatcgcttccctaaactgttgaccttagggatgagagttcaatatacgaatttttgggggacacaaacattcaggccacagc

SEQ ID NO: 480257 - DNA, 767 bp, Homo Sapiens
  misc_feature (51)..(86): n is a, c, g, or t
  misc_feature (111)..(111): n is a, c, g, or t
  misc_feature (240)..(251): n is a, c, g, or t
gtgtggtttttaaaaaccctaaagggaaaggacatcactttcctttacccnnnnnnnnnnnnnnnnnnnnnnnnnnnnnnnnnnnnagtggggtaataggtgggtagatcntaatggctttattcacgatttaataacaggcaaaaggaagcagggttggtttcctttctttttgttcttcatctaagccttctggttttatgggtcagagttccgactgccatcttggacttgtcagcnnnnnnnnnnnntaataataataataaggcctgctgtgtaagctgacagtatttgtagctgatagggggttgggaggaaagtgtctactaggagggtggggtgagattctgtgttgatgtaggaggccgagaaggcccttaactcaaagtagcttatttatccaaaatgttctggatgcatcatctccaaccaaggaccccttatttatcatgcctttgttctcttttccctcagatgtatatttctttaaaaataattttcctaataacaaaacttatttctaaaacagcttaaaaattcaaagaaaaaccccaaacactgacattacctacacttccactacccaaagacaaaatgtgcccactgtgtgcttttgagtgtattttcttttagtttgttttttgttgggtgcatatttatgataataacaatgatggacttcaattgtactcactgttctattgttggttttaattagcagcaagttgtgatcactttcccaggtgaataaatcatttcaaagcatt

SEQ ID NO: 480258 - DNA, 828 bp, Homo Sapiens
aatgtggagcctgctggggccacactgatccggatccctcttcgtcaagtccaccctggacgcaggaccctgaacctactgaggggatggggaaaaccagcagagctccccaagttgggggccccatcccctggggacaagcctgcctcggtacctctctccaaattcctggatgcccagtattttggggaaattgggctgggaacgcctccacaaaacttcactgttgcctttgacactggctcctccaatctctgggtcccgtcccggagatgccacttcttcagtgtgccctgctggttccaccaccgcttcaatcccaatgcctccagctccttcaagcccagtgggaccaagtttgccattcagtatggaactgggcgggtagatggaatcctgagtgaggacaagctgactattggtggaatcaagggtgcatccgtgattttcggggaagctctgtgggaatccagcctggtcttcactgtttcccgccccgatgggatattgggcctcggttttcccattctgtctgtggaaggagttcggcccccgctggatgtactgggtggagcaggggctattggataagcctgtcttctccttttacttccacagggaccctgaagtggtgatggaggagagctggtcctggggggctcagaccccggacacttaatcccaaccctcaacttcgtgccagtcacagtccccgctactggcaaatccaatggagcgtgtcgaaggtgggctcaggtgactctcttggcccaggctgtgcctgcatcccggaatacggcccacctgtcatcgtaggaccatgaggac

SEQ ID NO: 480259 - DNA, 801 bp, Homo Sapiens
agcggggagggtggagggccctgcgcctgcgcggagctggagtccggctgggccgcagccgctgggagaccggcggttgccgtggggaccggtcgggcccctccctcctccggtcccccgccccaggtccttccccaccgagacgcgccggcggaccgcgggcgagtgcagccggtgacccggcgagaggcggcgccgctcccaagatgtcgcagacggccatgtccgaaacctacgattttttgtttaagttcttggttattggaaatgcaggaactggcaaatcttgcttacttcatcagtttattgaaaaaaaattcaaagatgactcaaatcatacaataggagtggaatttggttcaaagataataaatgttggtggtaaatatgtaaagttacaaatatgggatacagcaggacaagaacgattcaggtccgtgacgagaagttattaccgaggcgcggccggggctctcctcgtctatgatatcaccagatgcccgaatgctagcgagccagaacattgtgatcatcctttgtggaaacaagaaggacctggatgcagatcgtgaagttaccttcttagaagcctccagatttgctcaagaaaatgagctgatgcttttggaaacaagtgcgctcacaggggagaatgtagaagaggcttttgtacagtgtgcaagaaacaatacttaacaaaatcgaatcaggtgagctggacccagaaagattgggctcaggtattcagtacggagatgctgccttgagacagctgaggtcaccgctgcgcgcacaggcccg

SEQ ID NO: 480260 - DNA, 1152 bp, Homo Sapiens
agcttttgagctcacaggggatcgcgtggtgtgatgttgaacgtgtgcagggaatgggccggttattcggaaacatcggtacgcacatagtgcgagacactcgcgtctcggtgtggtcggttctcgcgtaggatgaacgttgcggtcacagtggtggtgtgcgtgttagaacgtgtggctgcgggttatgcgtgagggtcagctggggcatggtgatgtgtgagcttatgtcgcggcgatgtgtgagaatctagttgggtcattgtgttgatgaggcgctatcaaagcgggtgaggtgtgacgtctgtagtagccaagtgagaggggccgtttcagtagggcgtttacatggccgagcctgaggctatcccggcttagacgacggtaccccttggtgggggggtgggtccaggttcccccggagtttattttgcgagcatccacgaagcgacgccgtgttgcggcagtgtgcagcggaagttgtttttccagccgggcgcgctcggcagtctcagcctcggggggcgggccacctcccctgctgctaggcggccacctgccgcgggccacagcccaggcctgaagagggggacagaacacgtgtgccgggcccgcggggtcctaggcgggctctcccacccggggcggggcggggctggggtccccaccttgaagatgcgcgcgtcggcctcgctcaggtccattgcgcagcgaagtgcttccagggcacgcggaaacaggtgcgggcctcgtccagccactgcagcccctcatagcagccgctgctgatctctccaaggagccactctccgaacagcacgcgtggggctgccctctcaggagccaaggccattgctccttctgcaggggcagttaggtggcggtcaggtgttataacaggggaggtaagggctcctgtcgcagcagacgccaggccgcggccacaggtcgtgtggccaggtgtcacaggtgtccacaggtgtggactgagggcttgtagccaccgacgctgcctcggtatggatctcttggcagagggggctacaggtgtgactgcaggtgtggccggcgcgcacacatgaagtcacaggtgttgaaccagtgtccaggcctggcgggaaggcgcaggccggaccctgggtgccagagccg

SEQ ID NO: 480261 - DNA, 648 bp, Homo Sapiens
  misc_feature (35)..(35): n is a, c, g, or t
  misc_feature (38)..(38): n is a, c, g, or t
  misc_feature (54)..(54): n is a, c, g, or t
  misc_feature (107)..(107): n is a, c, g, or t
  misc_feature (110)..(110): n is a, c, g, or t
  misc_feature (112)..(113): n is a, c, g, or t
  misc_feature (373)..(373): n is a, c, g, or t
  misc_feature (377)..(377): n is a, c, g, or t
acctgtcaccctccccaagcgcctgcaccgcggtnaangagcccagcccagggngcttggacgtgaccatcatgtacaagggccgcacggtgctgcagaaggtggtnggnannccgagctgcacgttcctatacggccccccagacccagctgtccgggccacggacccccaggctccgcagcccctccaccccagcctgcctgctgcctcggaactgtgacacccccatcttcgacttcagagtcttcttccaaaggtccagtgaggcccttgcctggggggctgtctccagggggtccttgggagcacctggcttgccaggtacttcagcaagagtccccttcttcagagctggtggaattccgggtgcangcangcgccgtggctccccacgctataccatctacctgggcttcgggcaggacctgtcagctgggaggcccaaggagaagagcctggtcctggtgaagctggaaccctggctgtgccgagtgcacctagagggcacgcagcgtgagggtgtgtcttccctggatagcagcagcctcagcctctgcctgtccagcgccaacagcctctatgacgacatcgagtgcttccttatggagctggagcagcccgcctagaacccagtctaatgagaactc

SEQ ID NO: 480262 - DNA, 131 bp, Homo Sapiens
cattctgcttttctttattgtctggctaacttacaaagatgcagatgtctagggtagtctctaccctaccacttacactatcctgatgacacagatagcaaaatgtgtctgtttacatagtgcatgatatg

SEQ ID NO: 480263 - DNA, 1192 bp, Homo Sapiens
  misc_feature (1083)..(1083): n is a, c, g, or t
ctggaagagtcgctggagctgtcggaagctatccctgtggactcctgaaggtcaaccgagtctgcgaggactgccaactcggggtgctcttgcttcaaaatccccgaaagctggtccctccaggtcagggttgggacacagtggcacggggtggctgtgggtggcttgcactgccgctgcccgtgctgtatctataccattttcttgataactttggtctccctcttacccgtcttgtgccataccccaggggagttggtggtgctggcaaaattttgggtgatggcgatagtagtgtcgagattgaggacaacatgccacccagcctcctggtacaaagacagtctctcctggtttttgtaagatttccaggggtttgaattcaggtggccaggttgaaagctgtgtccggggataaataccattaaaccaggtaatagcttcgtcttgctggttccctccttcgtctcgggtcactttgatgagttccctgggagtgctggtaggaaacaggcaccagcgcttgtggccctgaactaaggcattccaggcactggttcccagagggtcgatgtgaatcccagttccggagcgtggtggccccatcacaaaccacctgtaagggggcctgcgcttctccccagcatactggaaaaggtcatcagtgaaaaactttggcaccttgtagtcttccaaaagtttccttcttttagggtgttcaccatagctgctgtcaaagatgtaaaggggactatcatctcgagtgctctccatgtactcgatgtagtatttcatcttcatcttcactgagtagccatcgttatcctcaccacacttgaacttctggttccgatatttcctttttaggcgctccagagtccatttctcctgcgcagaccagccctcttgcgcattcaaacaaaaccacgggcttgtaaggtctttcataccgctcccacaaattcttcccacagacagctgtaaagcatctgccctttccacgttatcccgccacggcgccgggctcagcgagaagctctcgtagtagttgtgccgggtccaatccagcgagtccttgagctnccggccgcgcactccgcttggcctccggatgcgcttcttgctcttgtggttcattctgcggggtcgccagctggttccgctacgacctggcgcagcccgcttcctgaca

SEQ ID NO: 480264 - DNA, 193 bp, Homo Sapiens
aaatttttttaaaccaagaatgatttctcctgcttccttctcctcaccatcttcccagacggagttcaaaggccacttctcaagcagcttttggcaccttcagcctcagagtggaatcttttaaagacaggacccctatgtccaggaaaggggaaaaggaactttgccaatgatagtgaccacagcaaaagca

SEQ ID NO: 480265 - DNA, 489 bp, Homo Sapiens
tttaaagatccccaggttattttattgctgtactcagaggtcagttaatgcccccggccgcctcaccctcccctcggcggtggctgagtcctctgctagggttcgcgaacggcagcgggtccgagggtcacctctgcatctcgccgccggaggcgcccccgcctcccctccccgccgctccgggtctggagggaggggaggctctccggaaaggggtggcgagagacccccgccacgactcccaagcttcttcgcgcgcgctggaggggacacggtgggcgcctaattctcggcgtagcagtaggtcccataggctgcctgttggggcctggggaagccgaaactgcgcactccgggatccgggagccccccgcagcgcggcctcggcgtggtgattgggaagcgcacactgccgtcagccagccagccgccgtcgcactggtctagccccgaaaacttccagggcgcgttaaggtgcccaaccttggc

SEQ ID NO: 480266 - DNA, 769 bp, Homo Sapiens
ccccgttttcctggaaagcccaggacttcccggagatttgttctttagtgaatgggacaggatactccttctaaaccttaaaggcaatgaggggctgtcaaaaacaagggctctgaattagtgctttccctggtcaattcaatgtcatccacaatgaagggagagaacaggtttttcgttttcctgaagagtgggtcagtaggagtgcagtggtttggcatagatcggctccagaacataatggattaaaaccaagaagtaggcctccaaggaagatggcactaaggaaagccagcaggacatagcggccaatgaaaaagtcatccacaatcttaacttccacttctggggctgggaattcaccagctcgcgggaaaagcaacagaactcgccgccccggaggctctggacagcagcacacacagcagcagcactgccacccagagcagggctaagatgaacacgcccgcaccgactccgagcacagtgccagccatcccgcggggaggcagcggcggccccccgccctgcgcgccgcacgatcgagtgtcctctgtgctccagtgcgacacactcccgtgaaagcattcagacaaatacagaaagccaggcaatggatcacaagacagaaagttcccactctgttgtcgagttcttattcaagaggacgaaaactcccagtcctctgcccccttcacctggatccactctcccccaggctctactcacacctcagattccggcgcgttccagcccacggggctctccc

SEQ ID NO: 480267 - DNA, 823 bp, Homo Sapiens
tagggctggtgcttctgcatgtggttgtagaacacttgggtgtagtcagatagcacgcgctccgacgggtctcgcaggatgaccagcagccggatggacgggttcatgctggtagactcgctcaggcactttgggcgacgtgaaatacgcgggggtcttctccactgtgagctggtgtggccaggagaagggcatctggctgaggtaccagcccaagccgtggctgtaatgctcctcccagtcgaagaagtggacctcgttctccgcggccgccacgtcggggtgcaggctgagcatctccagcagtgcgcgcgtgccgcccttgcgcacgccgatgatgattgtctgcggcaactgctgggcagagccgtttggggccacgccatcgcggacgtcatcctggagggtccccgctttccgcagaagctcctgctggcctagctcggcggtgcgggaaggcactagctggggctgggccaccagcagcaccgcgcccaggagcagcgcggccatgctggacaccacggtggcttcactgggccgcgcgccgctgggtcatgaagtgccgcagcagggaagcctcctagtcagtggcacatgggcgttttaggccttcaattactgagccgcgcctctgtccagcccgtccggcgccctaaataggctcctgggctgggccatgggcagcactgccgagcacccgcggcgggtagagcaagtttctggatggccctgggcaggcgggcggggagaaggcgcaggcacccactgagacccggtggtcgtggcggcgactcctggctgccagggcgcagaggccgct

SEQ ID NO: 480268 - DNA, 479 bp, Homo Sapiens
ggctctcggtggacgtcagcacctgcccgctgggcttcagcagggacacggtgaccaggccgctgaccgtcaccgcgatccagccctccatgggcttgccgccgaacagcgtgagcgacggtgagaacttgactcgggagaacttctccccgaagctggaggcgcccgacttctccacgtgcagggccagtttcacaccattgtgcagccaggacagggccacaatggggtccccctccactaggctgcccactgagctctcccagctattagccaggtggtccgccatgctccagcacttgatctgcccgtcggcatctgctgacaggagccgggagcctgactggtcccactccaggcaggtgatggcctcgtggtgctctgaggggatcgagtgcaggtcccaggggtgctccgtgtccaggatgtggatcatgcgggtcaggtcctggtcatcgctgcgcaggtccatggtgaag

SEQ ID NO: 480269 - DNA, 1446 bp, Homo Sapiens
  misc_feature (789)..(789): n is a, c, g, or t
  misc_feature (803)..(803): n is a, c, g, or t
  misc_feature (842)..(842): n is a, c, g, or t
cgaaactagctgcttccggtggagttcgagctgacatggtttgagtttatgtggtggttaaaactggtcttggagctgggcgaactctgggaattgttctgatgctgccgcttgaagagtctctggagcagccctttcttgggcggttccggagggtggtttctgttcagatctggcgggagggtaccattaggtccaaacacgttcagctccttaaagcattctgtttctatcatctcgttttgccatgggatggacacagagcccgtggagaacttggagtagaagtcgtcgtctgtgtggtccagattgacgcccttcacagtggagaactgctcgatgtccagcacgtccttacagtacacagcgcgggggtctggaacgaagggagggtccaacatcccggcttctaagcgcttgaagttcatgttcctgaagaaggggtgtctcttgacctctgcagccccctcctcctggcagcccagcctctgcttcgcatctttcgtgagcagcatcttgcagatggacttggcctcctcggagaacttgtgggagtacacctccttccgttttcaggacccggcggtccacctccttcccggttcaccttttctttgcggccgcggaacggcgactggcccttgatcatttcatagatgaggcagccaaggccccagtagtcggggctcaggccgtacctctgttgttcaggacttctggagccatgtagccaacagtgcccacccggccgcggatcaggtctcctcgggggatcttcacagccaagcncaggtctgagatcntaatgtggccataatcatctaacaggatgttttcaggtntcagatctcggtagacggtgttctcacggtggaggtcttctaagccgcagaggatctctgccgcataaaacaaggcccgctcctcctcgaagccagggttgcccatgttgtagatgtggaacttcaggtcacccccattcatgatggtcaggaccaagcacagtgcatccttggtctcgtaggcataggccaggttgaccacaaactgactgttgaccttctcgaggatctgcttctcattgagggccatggactcccctttcctctttttgatcctcttcttctccaagcgcttgcaggcatacattttacccgtggcccgaacctggcaggcacagacctccccgaagcccccttttcctagcactcgatactgcctgaaagtgtttttggtcaccggttgcctttccaaccacttccactggagaaagcggtcaaaaaacatgctgtccagatattcgtggaatggttctcccctcaggtactcgtggacagactgtgcacaggcagaaaagagttctttgcacggcttctgtaggagcttctcctccgtctgggagaccaggtcttggccaaccctcgtgccgaattcgccacccaggcc

SEQ ID NO: 480270 - DNA, 129 bp, Homo Sapiens
gctttaacattttgaaatttattttggtttctgttcaacaaaaccaaaccacattgggatggcatttacagaagctcagaaaaacattatgcactgaaaaatacttctcattagaccacaacaagcttt

SEQ ID NO: 480271 - DNA, 898 bp, Homo Sapiens
ttttgctagcatcgtctgaagagatgctttctcaggcgacttcagaccagcagaaagagggtagttgctgagacctccacgtgggaggcagggagagatgtgactgtctcaatacatctaataaaaggaaaatggagccacgagatgcacagggattaaagctgatttggacagcttcagccacgcctgaaggcagaagtatccctaaaatagttccatgaattaatccacgaactatgcctcaattagttacatgaatcaattaattcccgctgcccctcatctacatttttagagttggatttctgtcatttgcaacaacaataacaaaaggaatcttagccaacataataaattaaagacccattttccacataagacagacagaacctaatgtcctccttgaacccaagttatctcaaacagatgtgttacctgcaaggagccctggatgtctttccccccgacaatcacgagttctgccatatcttccgcatggggggtccgtgcatggacgaacagagttttgcccactgcagttatgtttctcagagcaactaagccgccatcgctgttcaccttgaagtatgggctcgagacctcatagcgtagcttgtcgtttcccttacagtcactgaaggtcaagtttagaattgactggtcctcaatgaattcagctggctgattgatatggaacactttctgctgaaatccaggagtgcagtccaaatcttctgcagatgttagcagcagcacctgggacaggagaacgcacagtacgagcggagttctcggctgcattttgtccgactagaagcgcccggcggcgttttcattcatgcacgccggacgcgtgggtcgacgatatcccggtaattccggaccggtaccagcgctt

SEQ ID NO: 480272 - DNA, 302 bp, Homo Sapiens
ggtttgtaactccgctttttattttctacaggatttaaaagacaaatgcataaaatgtaattataaatctgttaggtggtgtacaatgaataaagatacaatttgttacatcaataacctaaaaagagtagacctatatagcagtagaattttggtatgtgattgaagttaagttgaaataaattcaaatcagaatgttataactccaggatgttatatgtaattttcatagtaaccaaaaacgaaatctacatagaatatacacaaaaggaaatgagaatagaaacaaaacttgtcactac

SEQ ID NO: 480273 - DNA, 340 bp, Homo Sapiens
cagaggacgcggtcaccgcctctggcatttgtcgttctgcgcttctccgcaaggaccctctgttaggcaggcgcccaccgtaagcctcccgggccttgtgaacctgcaaacccaagtctgagagacgatccgccttcagcgctttccagcttggcagagaggctttcccggcggggatctttggttggcgctggcgatgcgcggggaagaaaggcgaggagcggcgtccaggctgggtgatgtcccagcacgagtaggcgggatgcgctcgcttggtcctccgggcgcccggtccctgcccgcgtcgcgcgcccacccctggggacgagaaggcggccgc

SEQ ID NO: 480274 - DNA, 886 bp, Homo Sapiens
ggggactgcacctggctaggcacccccaccctgggcaacttgcccacggaccccagggcagtgagtagtgacaggaggtagcccggggtgagactctcacagcaagaaagatggtgtggttgctggggcctccctgaagagtgtcgtccctgcggcccctgggaagtgctccctcacgacggaaggtttcctgtcagtgcggtcccggggcctgatagtggcggtgggcgggtggggtcacgtgtcctcaaggtcctgaatgcccagctctgccccattcctctgattcccagtggctgctagctggacccagctggtgtcctgggcatgaaggcagggccaccgtccccagcaggtgctgccctcctggccagctgagcatcctggccaccatcagcgtccaggtgcccctactcgcccttcctcttcttcagaagcctttgcggacctgacctgggccagcttcccgcgattccccttccgcttcctatcaacgtccaggacccaagctgcccgccccaggccagcccttgccacttggggcccggtcttcacacgtgggagtctgaccggggctcctccctgaacagtcctgggtctgacgctctcaattatcacccacggacccacacgacgcccggctctgggcggggatggggccggggctgctgcggggtcccgccaggcgaggccccagccctggagggcaggcgccaggcggggaagccctgcggccgcagggagagggccggggtcgcgcggagtccgcgtggggaaaggccgggcctgcacccgtctgccgggttgggcgcctccgctccgggttcgggacacaggggccctcaggtaggcgccggccctctcggctgggcggggacgccgccaa

SEQ ID NO: 480275 - DNA, 429 bp, Homo Sapiens
cccccaaaggaatgctttattgacaaattacccattattataataactttaaggaaaagatacatcggtcaacacccgcacaacctgccttttcaccacaccccacaggccgattttaaccctggacgaagggcaccgagcgctgggcttccctggcccctgcatttttgtcgtgtgtggagtgccatccccaagggtgtctgaactgtccggggacacggttgtcaaaggacacttgctctaccgaacaggacaccttgagctgagcagcccttcccctcccgggagtggcaaagccgggcacaccacaggcaggccctcagtgtcctgccaagagccactaaggcacagagctcctgagaaaaagactgtaacggcaatcctggctgatgcccacgccccaccctccacctgacctgtggggtcgtt

SEQ ID NO: 480276 - DNA, 348 bp, Homo Sapiens
cacattagtaccaccaattttatttatataagaaatgcctggtccactggacttttcaatttaactcagtaataattactgctgtttcttgacagaccagtgatatttcccccatagttttaaagtacaaaaaacagaatagttaggggaaaaaaatctcaagtataaataatgcaacctttaacctaccaagggtcactaaattgttaacactgattattataaatgattcaatttatttaaactaaaaagcattaattaaacatttcctcttccatttgggccaagggacatgcttaacaaaacacaaaaaagcaatagaagcacaaagttgtatgattttttcag

SEQ ID NO: 480277 - DNA, 168 bp, Homo Sapiens
aatcaaccctttcaatgtaattacaaaatgaaattcatggttgaaaaacaaaagagggcagatataactgagaggttttgtgctaaggcttatattgttacacatgtaaataatgaaaatattgttatatatcaccagatctttttaatgaatttggtcattgtgttc

SEQ ID NO: 480278 - DNA, 1012 bp, Homo Sapiens
ttggatcctggagggcttcaatctcaccagcctggtatcccgagaacaggctcttcactgggtggcagagaccctgaagattgcattagccctggccagcagactgggagatcccgtctatgattctaccatcactgagagcatggatgacatgctcagcaaggtggaggccgcctacctccggggccatatcaatgactcccaggcagcccctgccccactcctgcctgtctatgaactagacggagctcccacggctgcccaggtgctgatcatgggacctgatgacttcattgtggccatggttagctccctgaaccagccctttggcagcggccttatcaccccctcggggatcctgctcaacagccagatgctggacttctcctggcccaaccggacagctaaccactctgcacccagcctggtaggatttgcttccctgctttcctggggaccctgaggcctataggtaggaggtgcaatggcatggctgcccctttctccctactttctccagaatcttctagtataaggaagcctaaagaagaggttcacctcatccctagccctgctaagtctgggacatggagcctggtgggtctgaagaacccttgtcccattctgtcactgtcttactgtgtgaccttgtgaagatcttgccctctctgggcaatttcttcacctgtacaatgagggttttggctcctatttgatgttttgggcattttccagcactagcggtctgtgactatgtgagcttgagctgatggggctcagccctatggttgggcaccaaagagggacccaaggaggaaggatttaataatttttatctagttaaaaatcagcactcttacaccccgccatctggggccccagcagggcaaagacacatagagatgatcagggtggggttatcctgttcttccccattgccatctttcttggcttggtcctttctcctgtgacccgtagcagcctcatagctcagtggatgtacttatcactc

SEQ ID NO: 480279 - DNA, 613 bp, Homo Sapiens
ccgggggcgggatttatttacaaggaacgaaggggccactgactcagagcggcaagtacagcgagtagtccgagagcgcccaccggcgggcggggcggctggtacggccgatcatgggcagtttctgcacgtagcgcgaggcctggctaggcccgtacggcgcggggaaggcagtctggaaaaggcgcccgcggcagcgcctcccagcctgccgcccggctatgatgaaacgaaagtgcggggcgccgcgcggggcgaaacggctcttctggaaaacgtcgcgggtgccggtcccggggccctgctgccggggtgccccgcgcgcccgatgcacgcgcggcaagggcctgctctcagaggcggcgggcccagaggccgacgcggggccgcctccgccgctgccccgggggctctcgtcgccgtgcgggctgactatggcgcttgccgtcagctgcggcatcttccgcaccgagtccggggctgccgccggctccttcttgtccccgggcggccgcggagccgtgggtgcaggctggccggtgccaaagcgtgtggccaagctgtcaccgaagaaggcgtagagctcccggtagatgtcggccaggccccgctt

SEQ ID NO: 480280 - DNA, 102 bp, Homo Sapiens
gaatgatcattatctttattcatacacacttgcttccaaactacaattaatgtttctaacaaagcgtatcatgcaaacggagattagaggttatacaaactg

SEQ ID NO: 480281 - DNA, 885 bp, Homo Sapiens
gtaaaattcaagttccccaaaggggggaggagaagttattcccatgagaaagttaaggccgggatgtgtttcagaagggccacatgacaggctttagtggaaaccagggaaaaacccaaaaagccagcactgctggggacgacccgcgtggttactaatcctgccaacagaaaaagcaaaatgtcctttccgctggagaacgcggatgcaccaagatgtcctgtgagaaggcaatttggtttgacatccacgatgaagtgatcagggaacaagtgggggagcgtttttttctattccgtgtggcctgcttgtttcccgcagaaactggctgaccgcttccgttgtcctcccgcctccagtgggagggaggtggtgtcaaatccctggctttctcacatgcccatccttatgctctgaatgatctgaaagatagctgagccacagacaacaaaaacaaacagtgccaacagccatggtcccacaggatatttctcctcttgcggcctcagggttttggctacgttccccctctgggtgatgtttttgctgtgcttctcgttagccatccggatccgctgtttggccaccattgcttgtgcgttctgaaatgctcccatctgcaaggattccccctgcgttagctcgtgcgacagggctgagcgcgtcccgccgaggcccccgcggcccacccgggcgctgcaggtggcaaggcgtggccccgagccctgcgcaccccgctccccgagccccgggtagccgactccagagagaggccgcagcccggacggaagtaatctctcatctcaggaaaccctttccgacttcctcgccatccttccggtccccgcagccacctaccccgcgcatcccaggaattccggaccg

SEQ ID NO: 480282 - DNA, 385 bp, Homo Sapiens
tgcatagggactggtggcagtggctctgtctcttttactcttcatttcttggactaccttatttttctctgtctgaatttctgctcgaatttcctctcttgactttcttaatttgttcttttgcttcttccaaggccttctcatgatcagctcgaattttatttctcagacgttcttcctcttccctcctctcctgataggtaatatgctgcaagtaggcctccaataaatcgaatgttgacttcaaacacagacacctctgaattcacactgaaatcaaggttgtcttcaatccatctttgcccatctaggaatacatcatgaagtcccatgatataaagggtatccaaagcatctactatggtagaaccgactggggatcctc

SEQ ID NO: 480283 - DNA, 165 bp, Homo Sapiens
gccgtgttaggaaattatttattaatttacaagacaggttttaactcagccgaggtgggaaatggtgtccctgtccctcccaaagcacagagcacagaaatgaggccgtttacatggcgagtctccgtgctggtgtttaagtcattaaaaagatactcaaagaga

SEQ ID NO: 480284 - DNA, 798 bp, Homo Sapiens
gtggaccggtccggaatttcgagaagcggcttcgccgcccgagggtgctaaaatacgggaccatcctccgcgccatggacaccagcgacctgttcgccatctgcaggaagggggatgtgggccgagtgcggtacctgctggagcagcgagacgtggaggtactatgcctgcttgtgtgggcacgaggagctggtactctaccttctggccaatggagcccgctgcgaggccaacaccttcgatggtgagcgctgcctctatggggcactgagtgaccccatccgccgggctctacgcgattactttttttgtcacggcttcctgcaggaggccggattactatgacgacttcttgcagcggcttctagagcagggcatccacagtgacgtggtctttgtagtacacgggaagccattccgggtgcatcgctgcgtcctgggtgcacgtagtgcctactttgccaacatgctggacaccaaatggaagggcaagagtgtcgtggttctcaggcacccactgatcaaccccgtggcctttggggccctgctgcagtacctgtacacaggccgcctggacattggcgcagtgactacttccgagccctgctggatgaccacttccgagagagcgaggagccagcgacctcagggggccccccagccgtcaccctgcatggcatctcacccgacgtcttcactcacgtgctctactacatgtacagcgaccacactgagctgtcccccgaggcagcctatgatgtgctgagcgtcgccgacatgtacctgctgccaggcctg

SEQ ID NO: 480285 - DNA, 1561 bp, Homo Sapiens
cccccttcgcaccccccatgaagccctcattgtgccggggagcaggaaagaagagctgcacacaaaacgcatacacatgcttgtctccaagagagttcctggcccctggggcttcccagctaggggctcaacagtccagaccgatggacacgagcaggtccttgagtgcccgcagacgctgctgcgcctcctttatggcgctgtaggtctgcaccgtgctggccacgtggaagcggatgtcgtccaccagcgggatagagtccgtctcctgccgggctgccacagccgctgcctcctccttcaccgcctccacgaagtcctcccgctccaccagcttctcaatgaccttggccatgtactcagtgcactggtcctcaagccgcgccaggcggaagagcttggccacgcgccacacacccaccgcagtgtcctcgtctagcatctgagccaggctgcggccgcacagcctcttcaggcctggcagcaggtacatgtcggcgacgctcagcacatcataggctgcctcgggggacagctcagtgtggtcgctgtacatgtagtagagcacgtgagtgaagacgtcgggtgagatgccatgcagggtgacggctggggggccccctgaggtcgctggctcctcgctctctcggaagtggtcatccagcagggctcggaagtagtcactgcggccacagaaaaaggccttgtggcagaggaagctgcagccagccactcggaagcagatgtcagggcagctgttgaagccgtcaggacaagggaagggcagctcccaaagatcacctcggagctcggggggcagggcacaatcggccagcagcgccatgtcctcccggaggcgggggtctgcaggtgggggctcgatggtcagcaccttcacacacgtgcctggcttagacgccacaaactcagacaccttctcgcacttggcctccaggtcgctgagcaggtcccacagctggcattgcttggccaggcgctcacagtcactcacatgctctacgccaatgtccaggcggcctgtgtacaggtactgcagcagggccccaaaggccacggggttgatcagtgggtgcctgagaaccacgacactcttgcccttccatttggtgtccagcatgttggcaaagtaggcactacgtgcacccaggacgcagcgatgcacccggaatggcttcccgtgtacgctgcaagaagtcgtcatagtaatcccgcctcctgcaggaaagccttgacctgcttgtaatcgcgttagagcccggcggatggggtcactcagtgccccatagaggcagcgctcaccatcgaaggtgttggcctcgcagcgggctccattggccagaaggtagagtaccagctcctcgtgcccacacaagcaggcatagtacctccacgtctcgctgctccagcaggtacctgggcaggaaggaggtcagagcctgggtcaggacgggttcatggtcgcactcggcccacatcccccttcctgcagctggcgaacaggtcgctggtgtccatggcgcggaggatggtacccgagccg

SEQ ID NO: 480286 - DNA, 774 bp, Homo Sapiens
gcctccacgaagtccttccgctccaccagtttctcaatgacctgggccatgtactcagtgcactggtcctcaagccgcgccaggcggaagagcttggccacgcgccacacacccaccacagtgtcctggtctagcatctgagccaggctgcggccgcacagcctcttcaggcctggcagcaggtacatgtcggcgacgctcagcacatcataggctgcctcgggggacagctgcagtgaagacagggatgaaggtgccccccgaggtcaccaagggctcccagggcacaacagccaaggctagggcctgtggtggttggggggcactggcgggaaggcttccagtgggagtaggagctccctgcgcatgtatggggttgggggtcggggggctggcccagattcccacagggatctgcaggaccgctagggggcagaagactggggggttctcccattgccctgagcaggctggcagggcaggcgggaggcagggccctcgcaggaagccaggggtctgagctccgagttatacagacctgggtctgacacttctagctgtggggccctgggcaagtcactgcacctccctgtgcctctagttcccagtccatgaggtatagataaccatgcctacctgcgggggctgtcagaatggtgggacagaggcagctagtcaagacctatgcagggactctgccaggggtgggagactatctaccagctccctccctctcaagaggctgtggggacacagagcccacctacagataca

SEQ ID NO: 480287 - DNA, 568 bp, Homo Sapiens
aagggagaacagttttattagcatcacagggtccatttttcccgtttccatccaagcatccagagtctggtgtcctttaatcagttggcaggttgaacctggaggccactggagctgccggcccccaagtacatgaatgtgcagatgatacacagattgtgcacccagcttcccatcgttgatcacaagtcggtatccatcgtcccaggccctcagcctttgctgtctgcttggccacaaggagtaggtgtcctagaagctgctggtcttcttcttcagcctggctaatccgaggaatgggcttcttaggaatgaccaggaagtgcacaggagcctgctggtcctcatagagaatgtcagctgggaggctcttgtccaggatccgggagaagatggttggggctgctcccccaggagttgcctgctgggccttggccacttcattcccatcagtcacacctgcagctcctcggacctgccccccgcgcacccccgtggccgccacggctctgcgcgccgcgcgcaacccagcagccagcaccacggctgccgccatcttcctgagccg

SEQ ID NO: 480288 - DNA, 1352 bp, Homo Sapiens
  misc_feature (1261)..(1297): n is a, c, g, or t
ggggtgaggatataatactttattcactaacacgggccgagggaatgtagtgatgtggggtgggcactgtttccagggaccccggcaggggattctccctgtctcccagttccagggcagccgggcctgccgtcccctcaatttcccagacccggaggccggggcgaggaggagcctgggttagtgcagccaggtcgaagccccagcgcgcccctccgcagccctgcgggactcagctgccctcacactccgggcaacgctcggtggcagtggcggccgtggcgccagggggcagcttgaagtccctgccgcagccggcgcaaatatacaggcggcgccgcatgtgcgcgcgtcggtggcgaatgaagtgcgagcttaggcggaagcggcggccgcactcggcgcaggggtagggccgctcgcctgtgtgcgtgcgcgcgtgctccgccaggttggagcggtggccgaagcgacggccacacacagcgcagcggtgcggcttctcgcccgtgtgcacgcgccggtgcttggccagcgccgagctctgagcgaagcgcgtgccgcagtcggcgcaagcgtagggccgctcgcccgtgtgcgtgcgtcggtggcgcgccaggcacgagctgccgccaaaggcgcgtccgcagtccgggcacgcgtacggcttctcgcccgtgtgcacgcgcaggtgctgtgcgtagttggagctctgcgcgaagcggcggccgcagtgcgcgcatgcgtacggcttctcgcccgtgtgccgccgccggtgctgccgcaggttcgaggcggccgagaagcgtttgtcgcactcggggcactcgtagggccgctcgcccgtgtgcgtgcggccgtgtttggtcagcgccgacttctgtgagaagcgccgcccgcactcggtgcacccgaagggccgttcgcccgtgtgcgtgcgcgcgtgcttcgccagcgtggagcggcgcgcgaaggcgcggccgcagtcggggcacgcgtggggacgcgccgggtcggcggacggcgcgggcgcctcgcccgggacctccttgttgtccatggggatcttgagtttcaccacctcatacttctcctcaccctcatcctcctcacccttcaccagcagcaccatctcctcctgcatctcttcctcctcctcttcctctgcctgctgttcgccaggcatcttggtgtccagccgaaggttcggcactcacggtccgctctcgacgaattcgagctcggccgatttggcctgatnnnnnnnnnnnnnnnnnnnnnnnnnnnnnnnnnnnnncggccgccaccgcggagtaactccgattcgccctatagtgagtcgtatacatcca

SEQ ID NO: 480289 - DNA, 1038 bp, Homo Sapiens
gcttttttataatggccaactttgtacaaaaaagttggcggcggcggcggtggcggcgctggagtcggcgcagcctggacacccacgtcaccaagagcctgcacagcatcatccggcaccgagagagcacccccaaggttgtgtccaagtacatcgaaagtcccgtgttgttccttcgagaagacgtgggaaaggtcaagttcgacatccgctacatcgtgctgctgcggtcagtgaggcccctacggttgttcgtgtatgatgtgttctggctgcggttctccaaccgggcctttgcactcaacgacctggatgactacgagaagcacttcacggtcatgaactatgacccggatgtggtgctgaagcaggtgcactgtgaagagttcatccccgagtttgagaagcaatacccagaatttccctggacggacgtccaggctgagatcttccgggccttcacggagctgttccaggtggcctgtgccaagccaccacccctgggcctctgcgactacccctcatcccgggccatgtatgccgtcgacctcatgctgaagtgggacaacggcccagatggaaggcgggtgatgcagccgcagatcctggaggtgaacttcaaccccgactgtgagcgagcctgcaggtaccaccccaccttcttcaacgacgtcttcagcaccttgtttctggaccagcccggtggctgccacgttacctgccttgtctaggcactcgctgtccccaaaacctgtgcttggggcaggattccaacctcagttctctgagctgcttctgcaaaggcccccatgtccctccccacaccgggcctgggcatagcctcagccccaggcctctgtcctgccgagccatcctcccggcgccacactccgggagcacagcatcctcctctcacctgtgggtcagagcaggacagttgatggtgtccccagggctgagcaccacccccagcccctgccctcacccctcaccaccatctgtgcaactgatgaggtctccaggtttagcccaggggct

SEQ ID NO: 480290 - DNA, 1021 bp, Homo Sapiens
ggggcggcggcggggcaggcccctcggctggcccggccccggcctagcccgagtaggatgccaggaggtggcggcggcggcggctgctgggttggccccggcggccacggcggccaggacgcctgaagctgcggccgagttgagtcccaggcccagggagttggtgttgtagccgtaactggccagcgtgtaagcgccgtgctgatggccagcaggtcggtgccggagaaggcgggcagcgcggcgggaaaggcccccacgccagccagcccggcggggcccagcaggccggaggcggcggcggccgacgctgcggccgcggctggaagcacatccgcggggctggcgtacggagagccggtggggttggagttggccacggggcctgccacgttggcgtagctgatgttgaggcagctgctgctctgggggtcttcttgtaccttctgcacgatggcgctcacggccttgtgcacctgctcgggctcgccgctgaccgtcaccacgcgctcctgcaggttgatgccctccggcttctgggacagctgcacccatgctcctgactgttccatcacggctttcaccgtggcgcctcccttgccgatgatcaggcccgccgtgctgttggggacgatcagcttggcctgcttggctctgtcggggttcatcgtggtttggggttgaaggatgttgaccacctcaggcttggtcatcgcttgtgggatttctcggaccttctcggcaataaagctgtgcacagcattcaaggcctctgccgtgccctgtactaggcatacccgctctgtggttccggggtagaagtctttggacttggagagcttgatggtggctccggtctcgttctgcaggtgcgcgatggtctgcccgcccttgccaattatggaggccggcgggtagctggggatccgcaccttcaggaaagtattcgccttcctctcccgtgttgctgcgcttggtgcggaccacctcggggggcgtttcgaggggcctcttgcgccaa

SEQ ID NO: 480291 - DNA, 360 bp, Homo Sapiens
gaaaaccaaaacatacacacagagtacaaagtaaaggtgattgtgttggctacagcctctgtccagcctcccgtgggcgaagaccagacaagccacggctcacaggggagcctggcttccaaaagctggacccgcccccgccggggccaccctggactgggactcctggcgcgccctgcacccagcccaggagccctccctttgcctgcctggggctgtgcctggggaaaggggtcggccccctcttagctgggcctgggccggtggagtctgctccctccacacccctgaactcagaccccacgggccagtggggaccctcccttcctctccaggggtgcttgggctccaatcgcccaa

SEQ ID NO: 480292 - DNA, 278 bp, Homo Sapiens; identical to SEQ ID NO: 162196

SEQ ID NO: 480293 - DNA, 501 bp, Homo Sapiens
gttaagatattttttttaccataaaagaaaaatgtacagagtgcataaaacaaaaaagagaagggaaaacactggaatagtacagaagatactaaagatgaaaaaatacaggtatcacttttgtagacgtgaatacttcatttctactatcctactgttaatggcctcttaattttcctctagaaattttctgtgcataggcaagcatgcatagcctacacatacacatgcaaagacagacctttaggaaacctgtaagtggggtcatgctggacatgtgttccctgcaccttccttttttctgttaatagtatgtctcagacttttttttgtaacagctcacatagagagctgcctctcgtttggtggctgcatgatgtgtcatcgaatgggtatgctttggcttatctgcccagtctcctgttggtgagcattcagagtctttccattttggataatgcagtcagtgctgttaggagaatccttgtgcatgtaaccctg

SEQ ID NO: 480294 - DNA, 152 bp, Homo Sapiens; identical to SEQ ID NO: 448441

SEQ ID NO: 480295 - DNA, 987 bp, Homo Sapiens
  misc_feature (173)..(301): n is a, c, g, or t
caccccagcatttgtttaaaatagtgaaatactgcaagcaatctatctgtcaatcaacagagcagtagtaaataaattacggtccatttattctatgggatcctaaaagcttctccacaatgatgttatagctctgacatgatatgcaaagatgtccacaaaatattattatnnnnnnnnnnnnnnnnnnnnnnnnnnnnnnnnnnnnnnnnnnnnnnnnnnnnnnnnnnnnnnnnnnnnnnnnnnnnnnnnnnnnnnnnnnnnnnnnnnnnnnnnnnnnnnnnnnnnnnnnnnnnnnnnnttcggcagacggggccattctcatcgtcctcgaagcctgctttgcacatgcagcgcccgatggcaccagccactcgccgtccccgttacagtagagcttgatgggtacatccacctcttccgcattggcgatgcagctgccccgggcagccaccagcgatgtgctctcagcccccgacagggtttcctggaagatggcgccattctggatgatgcgggggcacttgcggtagaagacacgcacggcgatgagggacatgcagccgccatagtcctggaaggccaggtagaagccgctgcgggacacaggtccgaagctccgcacctcggtgttgattttcatgacgcggccacccaggtccacctgggagaagctctcgtcggctgcaatggtatccaccttcacccatggattctccatccagttggggaaggtcttggtggccgagtctaagtcagcctcatagtaatagaggttgaaggtctccttgcaggagccaggcacgctggggatgctgctgcagtcacgcaccgaaaacttcatctccacgtggatgcggtgggcgccacggcgccggataaacttggtccgtagccagttgttctggcttgactcatacacgttgcacacctggtaccggacgcgtgggtcgacgatatcccgaaacttccggaccggtaccagcg

SEQ ID NO: 480296 - DNA, 937 bp, Homo Sapiens
  misc_feature (46)..(78): n is a, c, g, or t
gatgtatagatatatggggactggactatcgcggtggcggcgcatnnnnnnnnnnnnnnnnnnnnnnnnnnnnnnnnnatcaggccaaatcggccgaagctcgaattcgtcgagagcgggagggccggggggaggggccggggcggtggcggctgttgccggtactggacccggcgggatgagcgaggtggatggcggcagcggtgggctacagcggtccccgcggcgacggtgcccgcgacggcggcagtggtggtagcggtggtggtaccggtgcccgcaggggagccgtcagaaagtgcggctggtggcgtgtgctgtgctgtggtgtgctggagcctgcctctgggccccgctgctgggaccccctcggcgcctgggctcccgtcacccctggcaatcctggcgactggcggtctcgtggaaccccctggcccccctggcccgggagtcagggcggacaagccggtgctggcaatccaagtcctgggcactgtcaaatggttcaacgtccggaatggttacggattcatcaacaggaatgacaccaaggaagatgtctttgttcaccagacagctattaaaagaaacaaccccaggaagtttctgcgcagcgttggagatggggagactgtggaatttgatgtcgtggaaggagagaagggctgcagaagccactaatgtaactgggcctgggggagtacccgtgaagggcagccggttatgcccccaaccgactgtaagttccgccgattcatcccccgtgctccctcagttgcccgagcaaccattgtggcagagatcccctcggcgtggacaggacctggcagtaaaggggagcagggctgaagactctgggcaacgtgcccgacgatggtgcccccagccttcttctaccgacggcggtttgtgcgagggccccgggctcccaaccaga

SEQ ID NO: 480297 - DNA, 1174 bp, Homo Sapiens
  misc_feature (306)..(368): n is a, c, g, or t
ctgaagaggtgttatgtagggttcaggcggaaaaaatgagggggcggtggaacgcgagggctggggaatactatgagtcgggagagatacggcaagctgaaacagggagtatgtacataggcggagatggttcataaacggagcttcgccgtgcagaaggggaccgcgggagccccggggaggacgacatcgcgcgtgggcggggcgcctgcgagggtgaatcgtgggcgaagatacggtaaatggtgggaggaacgcggcatgaagcaagaagcggacagacaatgagagggggactgatcaccnnnnnnnnnnnnnnnnnnnnnnnnnnnnnnnnnnnnnnnnnnnnnnnnnnnnnnnnnnnnnnngcgtgagtgtgaaggtctaccggaagggctaggattgtcgaatgagcttccgtgtccgccccaacaaacctcaggaggaaagtgacacgcattccatgtcccattgtaggaggtaaagctttcaagggacccagtcaaccattcctaacgggataagtagaccacaattggactttgggatttttgtgcatcaaaaaatatattgtagccaaaatgtcttcaaaatcttctggttcaaagaacacatcagatgcaaggataatatcttgtgttggtagagccagaagatcccaagatatatgaccccatgttagtcctaccacctgcagatgtggcaggttattcatttggcagctttgccgacagacttccagacagtgaggcagttctgagctgtctgaccagtattacttctgcaccacatttggcagccaaaattcctggaaggctcactccagctccaatctcaggcgcctcctggcgggtgctgctgcacgcacctgcgggacgtggacctccaggacagccccgtcggcccccggacccggctcctccgagaatcgaaagcgctgggcccggaccccctgtcctcggaaatcgtgctcgcccagtagggcgtcgttgggccccgggcgggcgggggaccgcggaaggctccgggctgccagactgcgcgagcgggaagccgcgggccacgtggccgtagcacgtgacggcaagaaggggaaagcccagatctggtgataaccctgccgcgctgcgagtgaggaaagcccggagcaaggcgaaagagactcacacgcgca

SEQ ID NO: 480298 - DNA, 984 bp, Homo Sapiens
  misc_feature (168)..(168): n is a, c, g, or t
  misc_feature (280)..(280): n is a, c, g, or t
  misc_feature (298)..(298): n is a, c, g, or t
ggtacgggtgatccctttagggtttcaatcgcgttgtccccagtgcggaccataacctttgggcacccctgatatggagctttaggacatccagaagcgaattctacctggaagttacccatcttgctttgtaatgttataattaccatggaccactttcctaaggtnaaaatccccagcagcagaagacaggaaatgatgattctggtataaagatacttggctttcagcaaaccatcttcggtagatacagtaacaggacgttccctgcagtttatcntatggtcacagcttttantctgatgcatggatatctatatttccataaactgttcccagacagatcactttgcctccttttgtttgaacatgcaatttttgacccttaacagactgcaagatactagtcccatgctctgtttcaattttgcaattatcaccctcaatactttgaacttttacacagccagaccctgatgacttgatatctaaacctgcagtgtccactccttcagagttcggcgcgccgggccaggcggagggacctcagtctccgatccgggccagcgctcgctcccacctgagctgtacggcctggcttggcaagcccagcaagcccagcgcccagcgccagcccacagtcggacctgacggagacagagacggaagcagccaagctcccaacctgagcagggggcaagcatggcgcgcctctctcgccagtcctcagaacacttcagccacagggagggtcacttgccacggccaatcgacttggccactgtgccgcctcaagtcaaataggagacgtaagtcagggtttgctgaaacaagagcgagccggttggcttgactaggcgttctaaacatcagccgcgcaatccccaggggcaagttgggatttgaaagctctaaactctgacctggaccccttgcctaagtccccgctctcgacgaattcgagctcggccgatttggcctgat

SEQ ID NO: 480299 - DNA, 221 bp, Homo Sapiens
  misc_feature (16)..(16): n is a, c, g, or t
  misc_feature (63)..(63): n is a, c, g, or t
  misc_feature (74)..(75): n is a, c, g, or t
  misc_feature (86)..(86): n is a, c, g, or t
gtttaattaacctttnggttgtttgtgcaatattatatatttttaattataaaactaacagcngttagaatctnnttttctttttntccttttttcttttcccagctacaaaaatactctggggagatgcattataatttaaaatatataatattgcacaaacaaccaaaaggttaattaaactaaagaaataattacaaagagaaaaaccccatcccgtc

SEQ ID NO: 480300 - DNA, 108 bp, Homo Sapiens
ggtgtgttgtacagcagtataatttttcacttatttattccatcagtagatatggtttgtacaatgtacaattgtttcatttcagaaaataaaaatttcaaatcatga

SEQ ID NO: 480301 - DNA, 769 bp, Homo Sapiens
taggacccctgaatcactgcggtgttcacttgggcttgcatgcctgcagagctccctccgccatcccccttgccgggggactgctggcctgtggcttctggagccctgtcttggacggtgcattctcgggaggagcccgggtaagatacacacgtcttctgctctccaatacttccgcacctggacctgcagatccttggtcgttgatgaggtacacggacctaggacactgctactcgtttttctgcgagagggcagtcctgcgaaatcccgggcttgaataggagcgaactctgccagcccgcacccggcctgagactgaaccccaccagcatgaggtcttctctgtctgcctcccggaggcccagccgcaggacgctcgactccacctccagagagccattggtgtcgaacccgaagctgttcagctggatgtccgctcgcttcctccccctcggcgtgcctgaccttcaccttcccgaagaacttttacatatcccagttgagctcccagcaacatttcccacagaagccccccaaatcccattaagtgcccagaggaccccactctatagcccacccaggagccccgctgtgcggctccaggctctctagcgccccataagtgattccaagaatttaaaggactaagactccagtatggtggcgaagtgggggtgtagtcacccaagagatggagcctcgcccccgaagggaggggccgaccccagcgagcggacccggcaactccatccggaggaccgaaggg

SEQ ID NO: 480302 - DNA, 512 bp, Homo Sapiens; identical to SEQ ID NO: 449714
  misc_feature (101)..(113): n is a, c, g, or t

SEQ ID NO: 480303 - DNA, 224 bp, Homo Sapiens
atttgaatttttggaaactttagctgtgctgtcaactttggaaaaagtatcccggtttactgtgttgagttggcattgtacagaaattaacagccatattggtctagaaacgttaaacttaatttttttccatttgtacaggggtaacgcactgtattaaatatgtaaggtcttatctacatgggtttgattacagaaactaataaagtattctctaaataatg

SEQ ID NO: 480304 - DNA, 1053 bp, Homo Sapiens
  misc_feature (651)..(659): n is a, c, g, or t
  misc_feature (961)..(969): n is a, c, g, or t
atcaggccaaatcggccgagctcgaattcgtcgagagcggggagtgtctaatcctgcagtcatggcgcaggaagaggaagatgttagagattacaatttgactgaagaacagaaggcgatcaaggccaagtatccgccagtcaataggaagtacgagtgtgaatttggatcatacagcagatgtccatggattgtattacacagagcatgaatatacttctttaggttacacgcatggggagatactctggaggaagcattcgagcaatgtgcaatggccatgtttggttacatgacagatactgggacagtggagcgcctccaaacagtagaagtacaaacccccggagatgacttaccgtctcttctgtctcactttttgcatgaatggctctataagctccgtgctgatgaaattcttcataccccggggaagtgaagtacttcaggactggctcccacacatttcccatttacgatccgactggcgcgcggggaccaagcacttttcccttggtcccaacccaccccctccaggtggaaccccgaaattttttaaaagcccacttcacacctgctctctggtcacaatggcccgaggctccctcacttcctcggcaaatccaactacacccccccgtgataaaaggnnnnnnnnnctaatgaggtaaataggaatttcgggcccactttcgtgaaaaccaccccccccgactgagtcagtggtaccccttggactcttccccgtgaccgtgaacaggcaaaccgctcgcaccacaaaaccagcgcgcgcccctgtcttggtgccctcgaggtagccccccttcagacacgcccggagcaggagtggccgaaaacaccggtgccacgaatataagacacctttgcctgccaaaccccacccccctgactacaccaccccacacgctccgcgatagcgcgtacagtaaccgcgggcagnnnnnnnnngccctctatggtcccctcaacccagcgcgcctcccttaccctggcttgtgcgcgtaacgccctccataataaccgcgcggtgcc

SEQ ID NO: 480305 - DNA, 916 bp, Homo Sapiens
gcaaggacccaaggggcccaccctttttcgttggggggcccggctatccggggccaggggacccttgggggctgggaagcctgggcggaagcttggttgcaagcgccttgtttcccgggtgggcgtcacaaaaagacaccggggactctcttggaggtaaatctgcagaaatggcattttgtttgtgatttctcggattgagcgcgaggagctgtgcgggcggagcgtggagtgcagcatccacctggaggtgatcgtggacaggccgctgcaggttttccatgtggacgtggaagtgaaggacattaacgacaacccgcccaggttctccgtaacagaacaaaagctctcaatacctgaatccagactgcttgactctcgatttccactagaaggcgcatctgatgcggatgttggagagaacgcattgcttacttacaaactcaggtccaaatgagtattttgttcttgatattataaacaaaaaagacaacgaccaattcccaggtgcttgttctgcggaaagttgctggatcgtggaagaaaatcctcaggtaaagttgttgttgacagcaactgatggaggcaaacctgaatttaccggatctgtttctctgctgatcctggtgttagatgccaatgataacgcccctatctttgacagaccggtttatgaagttaagatgtatgaaaatcaagtgaaccaaacattagtaatacggctcaacgcttctgattcggatgaaggaataaacaaggaaatgatgtattcatttagctctttggtcccacccacgataagaaggaaattttggataaacgaaaggacgggagaaataaaagtaaatgatgctattgactttgaggacagtaacacttatgaaattcatgtagatgttacagataaggtatccga

SEQ ID NO: 480306 - DNA, 734 bp, Homo Sapiens
catcagatgttagcaccaaagaatggtaagacccacaggctacttcaatgacttgtttgtttgacagattagtagagatatgacagggcactaaaccatgattagttgtcccaattgcccaggctggctataagcattatgaccccaggtaaagacttctccttctgttgttgcaaggaccatatgtggaccacttcccatagctgaggcaggctatttttttgccatttaaagaatccagtctccgaggttcaatggtgctctggacgtcaccctaaccccatacagccacagcagtttgtgccaagcacaaaaatctcatcatttactgtagtgtataaaacttcattgccagcactgccgaagacacaagcctgacgaattaactgtagttcttcttcagaacaaagggaaaaaattggccactttcccacatctaacatcttcaaagatgacagagtagcctgtactggctgattgttttcaatttctggaacccagtacttcagtcatctttaatcctgttccttttagatccttgtaaagttgtcttctagagcaaagttaatgtgactcctcgcaggccggagccttgtccgctccgcctcctgggtagcggttactgcacggtcaggggcccgccgccgcgacgagttggcgcctccgcctgaaacggcccggcctcggcgggatgcgctccgatgccttaacaccgcggaccgtaccagcctggt

SEQ ID NO: 480307 - DNA, 1518 bp, Homo Sapiens
ttggctgggcctgcaggctcccacacccctccccagtcttctccaagacctggcatgatgggaggagggaggggaaagtgaagagggaagcatagggctcctagggcaccaagggagaggggcccaagggtagggaatctggggatctcgctttctttggagcagtacagaagatcacaggaaagattaggacagacagctgagatggcagacaggagagatgggccccaggatccctggggagccaagctttcccccacagcctagcctccccaccccacctggagcttcaccaagggcttttcagcagtgaagtggcacaaacctcccagtttggtgggcaagtggggctgatggtggtgtcatggctcctggagacacgacataaccaggagggtgaagggataaacctggggtgggctggggctgagacccatggcatgaccccaattctctctcctcaagctcgacccccccgccatccccaggatcacacaggagaatctcatcctcacggcttggattggtcctgggggcccccggttgtgctgctaactggtgtacaatgctcaagagcagcccagaggggagccaggaagggaccctcgccctcacctgctatccccatttccgcatctcttgcactggtaccctgagggccacattctcagttcctgggattgaaaactgcagcagtctggccagctccagtgacagagtgatccaaccacctaccacgtaccctcctcagcaggccactggacccaggtcctgaatgaagctgtccgcctgcctcaccccagaagaggctggacagtggctgcctcgtgccccctgcagtctcccacagccagggcccgatggggtgcctccttgtcccaagtctcctgagaacccctgaccttgctggcctctctcatccgccccaaccctgtccacccttgaccacctctgggggcctgtcagcctgctggtccccccaacagatctctgggggcagcctctgtgggacaagagtgatacagagctggaggagaagaggagtgaggggcctccttgtgtctgatgcacagatgtggccctttcaaaccctggtgtcaccctctgggtgactggatccctagctccagcctcttcctgggccagccaggaagggtggaggaaagttctttgctgattgcattgtgtgatacagtggggggtgccttgagccctccccatgcaaggggctcatcctgggactctggaagctgcttccctactgggagaaatgtgtgtcggagctgcagggtccctaccctcagagacccccgactgcagggaacccaccccataagagggtcacggatgtccatgtcctgtccaccaccccgtggctttctgctgtggctatattgggcctaaggggctggctggggaggagcaggcctaagccctcaagcatttgctcctgtcctgctttttcaccgcttgctgctgaagttggtagccccgcctgcgcttctctactcccttccg

SEQ ID NO: 480308 - DNA, 1334 bp, Homo Sapiens
  misc_feature (951)..(1096): n is a, c, g, or t
  misc_feature (1241)..(1277): n is a, c, g, or t
actcgcccgtgcgttttactacatcgcgtgctcttagtgttggtagttctgtcgcgctccactatctcctactgtgttgttgtgtgtctcccccctgtcattgtgctatcgcctcgctccgctagctctgtgtttggtgtttttaacaaccataaggccgtcggctgtacttttcatctattcctggggtgcacacacagtcaatcctctcctctccctccctcctgattttcttgtccatctacagagtggggctgccccctctcccctcttgtggggacccgttgcccccatagctctctcccgtgtcacatggtccggtgttccctggggccaccctggttctcctggtaggaaagagtctcccccctcaggaaggacacacttgaggattctgaagagatttaattaggatttgtctgggctgaaaggaaaaagcaggacaatttgggggagcaccgagcacgtgcaaaggcccagtggtatgagaaggggaaaagcactggaaattgttggaaatgctctagggtggagccggcaggggaaatatgataatgtgggcttattacaaggctaacagggatctcagtgggaccccacaggacaggagctggagtcagaacatgtcccacagagagtagtactggatctgagttagtcccaagggctcagtgtcagcaggagattactgattcccatgggctctgcctgttgcctgtttgtccctcttcttgtggcaatgtgacattttgtcttggcctcatagcttcagcatgctcatgacttctgcttcttctgatggcttgccatgacctctcactggctatccttcaacagcagtcagctttgcagtgacacaatattcaaactgggtgtcaagcaccttcattgtctccccagtgacccagcacgcaggctccctaaaggtagagttctcaggcagtacctggnnnnnnnnnnnnnnnnnnnnnnnnnnnnnnnnnnnnnnnnnnnnnnnnnnnnnnnnnnnnnnnnnnnnnnnnnnnnnnnnnnnnnnnnnnnnnnnnnnnnnnnnnnnnnnnnnnnnnnnnnnnnnnnnnnnnnnnnnnnnnnnnnnggttgggcagcctgtcaccatcttgtagcccagccattgaaagaacgtaggctctgagactgtcacaacagggaagacagagatggaggagtctccatgcaagtccgctctcgacgaattcgagctcggccgatttggcctgatnnnnnnnnnnnnnnnnnnnnnnnnnnnnnnnnnnnnncggccgcctccgcgataacagcctccgattcgccctatagtgagtcttatacagtcc

SEQ ID NO: 480309 - DNA, 1079 bp, Homo Sapiens
cccaagttggcaaatggggccccccatttttccctccagggttgggtggcccccgggaaaggaagccctctttaaattcctcaccaaggatccatttttgaaaaatgggctgccagcttctccttttctcccatattggccggaaaactggaattccccaaacccaattggccatttcttttttaggtttggactttcaaactttaggggcccatcctgtccaccgagaccacagctcgaagggctttccagggcaagggctgttacccaaggaaaacagcccgtgcgttccatctcccatgctgtcattagcagaagggacactgctgtgtactcctggggactcttctctctaagcccagtcttgcaacctgcccaggacccttcaggcactgcacagcctgcttgtgggtgaggccgcacagaatcactccatccacctgcaggagtcggtcaccctgtaggatctgcccttccttggcagctggtcctccaggaacaatggatttcacatagataccaccatatggcacactggtgttaatgccaccctttacgcttgtgtccctgagtccccatctgtgctatctctctctctgccgtccagcttgacctctgattcaggagacatcagccaactctgcccacactgcctcctcatgagtttggagtcccctagtgcatgccctgctcatcctgaggttccccagtacctctgtttgtctctgaactcatcccccagtgcaggcccccactggcttttttatttaccccttacatttgtgcaaactaagcacactgtcagaggttgccatctgggtggaatggccaccaggttctagacggacatcttgttaactgcttttcaagctctcctaaaaactcttacagttacactgaatccaagtgtcccatcttctttaaccagttccacaaagtagatttcaccagcactgatttctggaggtgatggaggacaagaagaaccagcacccagaggaaggcctggggtgaaggtttctgctctggaggccaatccgaatcccagctctgtcccctgctccctgatcccgggaatt

SEQ ID NO: 480310 - DNA, 950 bp, Homo Sapiens
atatttttatttttggtgtgttaaaaattaaaatgggttttaataaaagttttgggggtcattttaaatgagtaagtaatccgatccctcttttccggccagtatacagaattttcctttgttcaatttgacggggcaaaattatacaggccccccaaactggtctgttattgaaattctttttctggtctcacccattcctttaacatatcagaggaattaacataacagcttagagaacagaaataagagataataggtgcttcagtaccaccccaaattatctactaagaccacagtgtgggcaacagaatgcagattcatggtagtagtaccttgaatgaaagagttcagacagaatcttccacaaacacaaatttttgcggtatccaaatcttggcagagatggaatggaatgatatgagagccatatggaatccttacttagacagatatccacaggaggctcctttaaccgaacagtggctttcccctcatctacaaatttggtgaagaattgctcaatgttctcccttagctcatagcgggtcccgcgcttgtccttcagggtggagatgagcaggaaggctcggaccggcggctgactcctggaagtctgctgacagaggctcaacacggctcggacgcccttgccccggttcctaagccccaaggcgggcaagtgccggctgatcacctccacctcacagtgtagcttcatctcgcccaacggccacaaccacgtcaagctggctcttgaaacgttcctaccatgtccacgccacccgggcgcacgcgcatcggggtcctcgcgcacgcggcctgcccactgatatgcctgcctgatggactggtccacgactcgggcatgtacttagcacacgtgtctgtatgaaaccacgcgggaaacaggcttcccttctccctatagcagggccgggttctcgccg

SEQ ID NO: 480311 - DNA, 1300 bp, Homo Sapiens
gagtttcttctccactgacgcagttcttgaatctcaggatcacaagcgactcacacaggctctccagaaggactgaatgtagaggctgctttcctcttcgtgtcagcaggagcgagagtggggattgcggccgtgggtgttgctttagccgctcctccacaaatggaatggagaaaaattctgtgaatggctcccctgcccctctttggattttggttgtataaccactcagtcagaaaatcacaggcaatgaatttggttcttttccttgtgttccaagactctctgcgagcagtttacattcatgacagttggcatggagtagagagatgccagggggaacaatcaatctcaaaacatttgttctttcttcgcttggtgaagcaggctagccattccgggaagcagaacaggaaagatgaaagtttccaaatattctttgggagaacatgtttttgggttgattgtttccgatttatcttgaggacagggtgtacgtgagatcatggtgaaatgggaaaccggaaaatagtgctctgcactgaagccatgaaaaagcatttcctctactggcgcaaccgtaatcacaggctcctgtttgactttatatccttctggaaagggaggctgctcagcttcatactccttgcagatctgctcccacagattcttgcttgacggctcggtgacctgccacgacgagacaggcagctcgcgggacgcgagagacacggtgggcaccggcgtccgggtgaacgacgagtctgtagagcagctgggcttgaggcgcactatgtggctggggatttgccgcggtgccgccagtagaggaaatgctttttcatggcttcagtgcagagcactatttgtccggtttcccatttcaccatgatctcacgtagcacccgtgtcctcaagataagagtcggaaacaatcaagccaaaaacatgttctcccaaagaatattttggaaactttcatctttcctgttctgcttcccggaatggctagcctgcttcaccgaaagtccgaagcaacgagaacatgttgttgagaggaaaagaaccaaattcattgcctgtgattttctgactgagtggttatacaaccaaaatccaaagagggcaggggagccattcacagaatttttctcgcattccatttgtggaggagcggctaaagcaacacccacggtcgcaatcccactctcgctcctgctgacagaagaggaagcagcctctacattcaatccttctggagagcctgtgtggttcgctgtgatcctgagattcaagaact

SEQ ID NO: 480312 - DNA, 851 bp, Homo Sapiens
gggacagcgtctcagctcccccacctcccagtcccctagcacctttctagctcatccggctgtgtggcttgggcaagggcaggaacctctctgagcttcagtttcctcatctacgcaatggggctgtgcgagaacacaagccgttcatggagatgccactcctcaggtggaggctgccagctctgggctttgggtgccagctgtcatttatgggaagagcaggccgccctgccctggccttatcagccccagcagcccctctgggcttcctcatggggccgtgtgaccgcaggggcttcctgacacacatgggtgcgagtgtcccaggaccagcctctacttgctactgtgctttcttctcgagtgggaactccactgcaaacatggggaggaagggaaggagctcgctgtgggagtctgggcgcggtggacgttaacaatggggggcgaagtgtcctcccacggtgggtgcactgtctgtgggaaggctgaccacgctgttagcttttcagggatcttggttggcctcctgagtctctactcaatggacagggtccagactgcactttacattttgccaacaagaaatgggagactgtccttgagccctctcctgaagacttgagggaaccaaaccagactgtccctcctctatcagcctgcagcctttcttccatttcattaaagtgttttaggacagggaggaccttgaccaacctagcccatctcttatttagaggtgaggaagatgacaccagaggcctcaaggcttccagagcacctggctgcaccctcagcctctgctgggggcttcccaccatacaagctacttgcacagttttcttttccaa

SEQ ID NO: 480313 - DNA, 893 bp, Homo Sapiens
gcagttagctgagcacgccctctgagccgctcggtggacaccaggcactctagtaggcctggcctacccagaaacagcaggagagagaagaaacaggccagctgtgagaagccaaggacaccgagtcagtcatggcacctaaggcggcaaagggggccaagccagagccagcaccagctccacctccacccggggccaaacccgaggaagacaagaaggacggtaaggagccatcggacaaacctcaaaaggcggtgcaggaccataaggagccatcggacaaacctcaaaaggcggtgcagcccaagcacgaagtgggcacgaggagggggtgtcgccgctaccggtgggaattaaaagacagcaataaagagttctggctcttggggcacgctgagatcaagattcggagtttgggctgcctaatagctgcaatgatactgttgtcctcactcaccgtgcaccccatcttgaggcttatcatcaccatggagacatccttcttcagcttcttcatcttactgtacagcttttgccattcatagatacatacccttcatcctgtggcccatttctgacctcttcaacgacctgattgcttgtgcgttccttgtgggagccgtggtctttgctgtgagaagtcggcgatccatgaatctccactacttactttgctgtgatccttattggtgcggctggagtttgcttttatcgatgtgtgtcttcaaagaaaccacttcagaggcaagaagggcaaaaagcatatgctggttcctcctccaggacagggaaaaaggacccagcaggcaaggaccagaacccgccagcaccagaactggcaagcaacagggcagcaagggaagaaatgattggaggagctctggtgtctgaac

SEQ ID NO: 480314 - DNA, 773 bp, Homo Sapiens
  misc_feature (137)..(137): n is a, c, g, or t
ccgggcttcttgtccccggggttttcccatccagccagccagtttctaggagaccgcccagaggggctgggggcccagagggttggggaccggcggaagggggtgcgccagggacgtgagcgggggtggggctgggnctgggccttcttcctggccgccagttcatcccgctgctctgggctgcctcggccaggtggacgggttaccggagatttattgcactgttttggaagtggcatggggctaaggaccagcgggacggcaggagaggcgggtgggaggcgggcaggcgtcatcgcttggtcttggcgtcttctcgaaccttccagatcaccaggtgcatgcaggcgccggcgtcctcggtggagctgtgcccatccacattgtcctggatgatctgtctgaggtagtcggccatgaggttccgcagggaccgcttgtaggggaggcccaggcggtgggggaagagcacagacgtgtccaccacggtgctgtggatgaccttcagggccaggaggtcgctctccaggctgtgtccgatgaggatggtgtcagcgctgaacatgctcagcagaacggcctggacgtcacgcagcgtgacacttgtgtcggcaaggtcagcctccgtcacccccgaaaacctggtgttgtagtccacgatctcgttgtcaggcttcacgaaggtgtcataaaccacgtgcacgtccagtgtcgaccaccgtgacgcgcgtcagctccagcctcgtgccgaattcgccacccaggcctcgcta

SEQ ID NO: 480315 - DNA, 907 bp, Homo Sapiens
gccacccaagagagaagggttaccccccgaggacgggctcacttctctcactgctcaggaccccgcgggaacttggggatttcctgcaaggaagtgctcaggcagggcggggagcagctgtgggcgggggccccggggccctcgctctgcactgagcccctggagggactggtcccattccgggcttccaggtcctcctggctgcctcgaaaacgcctcctcctccagcccttgtcgtccagggacagggctcgctccagtcgaggcctggcggggggccgcggggcgatgggtgctgctcgggctggcgggtcctcgccgctgggcgtggccggagtgctgcaggcaagcgcggggctctcggagcccggagcatcgggtggggaccccgcgcgctgggccggcggagcgccgggaagctgtccttggagcgtcctcccttccggcggctgcggggccggctcggagggccgcagattctccgccttggacggcatggacaggtctctcccggggcaggcctcggcgcgagagccgcaggcagcgggaggggtcacgggtgccgggtccggggtcgccggcgcagcgaggagcagaaacgccagcatgcggcatcccgcttgggccggggatggtcgcggaggggcgggggcggctgccgcatggcccgggccccgagtcccgccagcccctcggggctcccagacgccgttcccagggcggtccgcaggcaaggccctgggggaacaggcggctgggcgcctgtcgcgggggaggttcgaccccgacggggacgccgctcggggagaggggtgggaagcgggcacccctggctgggctcgcagactccgaagtcgacccggtactcgcggaggcccggccgcccagaagcggagtcagcccggcc

SEQ ID NO: 480316 - DNA, 453 bp, Homo Sapiens
  misc_feature (328)..(374): n is a, c, g, or t
ggagcgctagatggcccagccacaagtgttccgatcttcctgcccaaacatattctgtgacggaaagcctatgttgacctcgtccggcactcaaggcgtgggcagcggcctaacgtctgttgcgggaacacagtcgcgttgaatgctattctcaagacagacaaaacagtgggaagacactacgccaagctgctaactccctggccattgccggactctttcacccccctgttcttctcgatgccgtttccgacgttcgtgctctctttctttttctttcactctagcatgcttccccccttctgctgaatggctacgatgcctacgnnnnnnnnnnnnnnnnnnnnnnnnnnnnnnnnnnnnnnnnnnnnnnngagacatttgctggggtggtttgatggccaaagaatcatcttcttctcctctgtcttccatagagtcttctcttctata

SEQ ID NO: 480317 - DNA, 794 bp, Homo Sapiens
  misc_feature (164)..(208): n is a, c, g, or t
  misc_feature (324)..(336): n is a, c, g, or t
taaactaactgtgctgactttgggcaataaaggacgtagaattctaagtactgaattaaaaatacagaacctactaacactactgtattaacaagctgactcctgtaatcttttggagatgacagatgatactggtttttaaaatacccaatcacatatatgcnnnnnnnnnnnnnnnnnnnnnnnnnnnnnnnnnnnnnnnnnnnnnctcccatttcctcagtgctctttagcaatgagtttttatgttaaacacttccaactgtcagtattaccatgaaatcaacattagaaaataaggtagaaaactgagtgttttgcttnnnnnnnnnnnnnggattaaatagctgttgtatccaaacatcacgttctgcttccatctctacattccactttccccattcttggagattaaaaaaacagggttagaaactttaatatctgacagactacaaagggcaaagacgtggcacatggccagtgccacacctacctggttgccacagcattctgaaacagaccacactttcaggaaaatgactaagtacttgaaagggtcagtatgttctgtgttttcagatgaggaagtctgatgaccgccaaacgctcttcagacgcgccgaccttggtggcttttggagagatgcatccgagctcgctgctggcaaactctcaagtccaagtgtgcggctccctccggaaagaggcctcacggatgggtggttccattttctctgcgctgtgtagctcctacttacagctgacgattctcgacttcggacggcctcccccaa

SEQ ID NO: 480318 - DNA, 1129 bp, Homo Sapiens
  misc_feature (122)..(170): n is a, c, g, or t
gaatttttatacaagtctttatttacaacttgtttaacaactgtacactttttgcagccttgaaaacatttttgtacttgaatgggaaaatatagtttgaccaaatcttaactttattcttnnnnnnnnnnnnnnnnnnnnnnnnnnnnnnnnnnnnnnnnnnnnnnnnnattaataccgtaacaagttggcagtcgtaaaattaaaatgagtaaatgatatcaaaaggaaatacaagatttcaaaaacactaaaaatccatcttctggtggtttcctggactttatgtttttgtgattttagttgaaatttcttactgaggctctgtaacaagtcattcacctcagaaaaacagccagaaaacccaccaatctcaacacatagtaaatggttggaaaactcagtaaacaggtggaaaaatgcttggacatcattatgtacaacactgctaaatctgtatttcatttttgaagtgagaagttccaagtctgatgtggacattgtttttggattataatgacaaagaatgaaattctgaaaaatgtaaattcaatactcaatcagaaataagaatatacctagcaatatcctttttgcaaagactaaaatgcaaggtggattactacaatgtcaaatatgaaactaacaacaattcacagaacaatcaatggtacttaagacatgaatataaggcttcagagttggggctgtactcaatacaactccagctccaatgtactaaggtttcatccagctcatctaaaaagttttaaaaatactacagggggaaaaaaaagcctctttctatccccaagttttttgatataatttattaatcaaactaaggcaaattattattagatatgtttgaattttactattcatttcataatcaaaaattgagtattgtaaatggtgggcaattgtcaaaacatgaaaactgcaaaacaagataagcctagaaattattttctaagtacaaagcattctgaattacacagaacctgtaaacagcaaagttcatgacagcgatgatattttagtgcatttgaattataaataactaaggctgttaaaaaataaaagatttgggccgggcgcagtggctcatgccggtaatcccagccaa

SEQ ID NO: 480319 - DNA, 874 bp, Homo Sapiens
agagggtgaacaattatctccccctttttcgacaaggccagggggagggaattaccaggtggttttttccagaggttgtgagatcccaggccattttcacagaacctttgtggaatgatttgggcctgtgttttgtcccaaccagaggaaaagtgaggatgctggttggggtcaacgggcgcattctcccaggacgggcaacaggctggtgtgtctggggaatcagtttcaattgtgactgcggtcaggaggtccaaggaggctttcaggttgataatctggccaatgatgggcccggccacagtgacattcgcggtgacagggaagctcaggttaaggcctttgccatcatcgatcggttcagctttgacatccaggatgagggagttgctgattttcaacccaaaaatgtccgtgttagttggaagcagcttagaaatgacattgttcagcaatttctcagcttcctgggccttctgcttggccagttgccaagcactggatttctgaagcactcctaggtcgaccttcagtttctcaaggatgcctttaagagtattgtcaactgtctcaagtccctcgtgaagaacaggttccagcttatccacgacattgcttaggtcattgccaagattgtcaagaagagactctgaggtcccagtgagcacgccgcacaggagaacaagtttccaaagctgaagcatcttttgtcttgacacgcgtttagaggaggatgctcatgaaatccttgccccactggcgcattctcccaggacggcaacaggctggtgtgtctggggatcagtttcaattgtgactgcggtcaggaggtccaaggaggctttcaggttgataatctggccaatgatgggcc

SEQ ID NO: 480320 - DNA, 830 bp, Homo Sapiens
  misc_feature (42)..(96): n is a, c, g, or t
ttggatttttattagagaccatgttggctagactggtcttgnnnnnnnnnnnnnnnnnnnnnnnnnnnnnnnnnnnnnnnnnnnnnnnnnnnnnnngtgtgagccactgcgtccggtcctgtctctgtttttatctgaaattatgttagcctttgcctagttatggtgaattaaccttagcatatgatagttctcttaatgtttcccaccacccttttcagagtaagcaatttgacgtctacagcttcttttcctttatctctttgggtaaatagcaaccaatttttcctgctactttagatagtaggcaataacaaaatgtattcatagctctcagtaatatttgttctaattgttttgtttttgaggttgaaaaggggggacccttccctcagaccatgagggaataatatttacgtggctcacaaagaccagcaatggatcacttggagtcctttattgctgaatgtgatcggagaactgagctcgccaagaagcggctggcagaaacacaggaggaaatcagtgcggaagtttctgcaaaggcagaaaaagtacatgagttaaatgaagaaataggaaaactccttgctaaagccgaacagctaggggctgaaggtaatgtggatgaatcccagaagattcttatggaagtggaaaaagttcgtgcgaagaaaaaagaagctgaggaagaatacagaaattccatgcctgcatccagttttcagcagcaaaagctgcgtgtctgcgaggtctgttcagcctaccttggtctccatgacaatgaccgtcgcctggcagaccacttcggtggcaagttacacttgggg

SEQ ID NO: 480321 - DNA, 1119 bp, Homo Sapiens
ttggggaggccacggctcatggcctgagccattctcaggccacgatgaaagtggccgtcaagatgcttaaatccacagcccgcagcagtgagaagcaagcccttatgtcggagctgaagatcatgagtcaccttgggccccacctgaacgtggtcaacctgttgggggcctgcaccaaaggaggacccatctatatcatcactgagtactgccgctacggagacctggtggactacctgcaccgcaacaaacacaccttcctgcagcaccactccgacaagcgccgcccgcccagcgcggagctctacagcaatgctctgcccgttgggctccccctgcccagccatgtgtccttgaccggggagagcgacggtggctacatggacatgagcaaggacgagtcggtggactatgtgcccatgctggacatgaaaggagacgtcaaatatgcagacatcgagtcctccaactacatggccccttacgataactacgttccctctgcccctgagaggacctgccgagcaactttgatcaacgagtctccagtgctaagctacatggacctcgtgggcttcagctaccaggtggccaatggcatggagtttctggcctccaagaactgcgtccacagagacctggcggctaggaacgtgctcatctgtgaaggcaagctggtcaagatctgtgactttggcctggctcgagacatcatgcgggactcgaattacatctccaaaggcagcacctttttgcctttgaagtggatggctccggagagcatcttcaacagcctctacaccaccctgagcgacgtgtggtccttcgggatcctgctctgggagatcttcaccttgggtggcaccccttacccagagctgcccatgaacgagcagttctacaatgccatcaaacggggttaccgcatggcccagcctgcccatgcctccgacgagatctatgagatcatgcagaagtgctgggaagagaagtttgagattcggccccccttctcccagctggtgctgcttctcgagagactgttgggcgaaggttacaaaaagaagtaccagcaggtggatgaggagttctgaggagtgaccacccagccatctttct

SEQ ID NO: 480322 - DNA, 350 bp, Homo Sapiens
gtttgaatgctttaaaaatcttttaagtctgtggatctgctgatgtacagtgcctttgctgctatggatcaaaatcaaaagaaccgtgtagatatactttattgtataagtagaatattacttaatttcatactagaaatggatggatgctgcaagttgaaatggactgtccattgacgttcctaatgtggtagcagaaaagaatggtgtcttaagtgcttagtgtttgatgtcattaacagtttcgtaaaactctacagtgtagaaagattttgatactaaactgtgcgttgtacatagttctaatgcattgtattgaccaccagtacttctataatgtagacagctgg

SEQ ID NO: 480323 - DNA, 952 bp, Homo Sapiens
cgtgtggcccaaggccgcgagtccaccttgtcggacccgttgtgggcaattcgtgaattaccccacttgaagttcgtgcacgtgggttcgtatgtaagtatttttggaggcctttgaaggattgatggcttctccatttgtgtttgaacccattgcttccacaacatggtaaaccggtcaaggttcccacacattgattttgtttcttctttcctgcctcttttggtatctgcaacacaaatgtggtgcatgacagttaactgatgatgtagacacatgggccccctttgggaagctgaatattgtttgttcaaccctggctctgcctgttggctagtagacacacgagtcgaaatcgtttctacctaagggcatagttgggttcttggaataagtgacacataggagaagtcggatctgagctcttttgtcacacaagtgctaacgaacagaaaatgagccacgacagtttaaacagctgaatggatcgcaatgtgcttttcccttggtttcccataaaaacgaaaatgaaacaccttatgcaaaaaaataggatacgcttttactggttggtttaatgagagagaaccacttttggccattatcaccttacgttactacaaatcctgaaaggaaagcagctttgagtcttgggctcggctgaaccccctgcatggaccggggctaacagtaccctctatgactcccagtctgccaggttaggatgtggtgggggctgcttgggggggtggctccaatttcacttgacggtgtcgagcttctctggctttgaggtaaggcagctgacgtggccttgcacatctggggcatcctggtgaccctgctgtgcgccacgaaggtgctctgggaggaggtgctgtactgcgagccgctgtccgaggaggtggagctggtgtgcgacaggcggctgtgctccttgtgcgaggcggtc

SEQ ID NO: 480324 - DNA, 879 bp, Homo Sapiens
ttccagataatgattcagttctttaacctttgaggcctccagctctttaattttgtcttcagcctctgtcagtttatctttcaaaggtgcaatttctttttccattggcatcacaacggacccgaagtttctcagcatcctcttgggcgtttttcatttcattttctaaattttcctcctcttgaccttcagacagccttcttcttaaatcagctatttccctctctgcggattctctatactgtgcccactgtgttcgctcctgctccagcctaaggtggaactggtgctcatagtcacgaactgtttctttcataacagcctgaagtgaagcaacttcttctctccactgtcttttcacttcatctatagcttcttgcttggtgttctcagagactgtggcaatcgccttaatattctccatctctgcttgagcttcccacagctgggttcgaaggtgtcccaaatcatcttgtgcagcttgtaatactgcattttgcctcttcagatcctcctctttagccaaatataactccttaaattttgctctcttttgattaaattcttgttcaagctgctgttgtgcacgtaaaaattctgcattaattttttccaattctgctacccgttgctgaagagaaacgtcaggctgggaagccgggcccggctgcgccatgaccaggcggccggcctcggggagcggggatgggcggggaagcggcgtcctgggctcccgcgggctcagctggcggaggaggcgtcaaccgagccgccgccgccgccgcccagagagaaaccgctaaggctggatccgccggcgccgccacagccgcgggcagagacggacccgaccgccgacctccgcctcctcatccccaa

SEQ ID NO: 480325 - DNA, 299 bp, Homo Sapiens
tatctctaacattaacaataaaaattaaaatgacaagccttgggttctttctattcagaaatttaactttaatatctgttagtcattaatttttgcttttcaatgggaaataatttaaagtaccatattgtgtgctatcctcttgactgcagccatgattatttgagatctaatgtaacattagaatactgcactatatattcttatgtactataacaaatgctagatgaagctgaactctataatttcgtgggtgatgttcacatgcagatgaatgactgacataatgttagagatac

SEQ ID NO: 480326 - DNA, 168 bp, Homo Sapiens; identical to SEQ ID NO: 454880

SEQ ID NO: 480327 - DNA, 183 bp, Homo Sapiens
tatatgaataaaattttattgaattttagataattagaaagaataaagaaatgcaagataaatgctttctaaacagcatctgatagcatcatcttttcagtgtcatggtattttcacttttctttataaaaagtatagacattcatttatttaaatttttacaaagtaagaaccatcaaatgg

SEQ ID NO: 480328 - DNA, 646 bp, Homo Sapiens
tcgcgaacgtgttatcccgcgtattcctacgtcaccactgacttcggatttttcaggcaaccccgacaggtgaatcgcctactcttcatggggtattccacgaagccacacctggctcttgttaccccagttgtgtgagggctccagcttgtatcaccatctccatatcattgagaccaaatttgagatgatcaaaccttatagctcttgcacgacagacctgcacagggcatggacttacttacacgccaagtcaactcatccacagagacctcaagagtcactcactactatttcttcatgaagaccctcaccagtaagacataggtgattttggtctggctaccgtgaaatctcgactggagtgggtcccatcacgtttgaacagttgtctggatccattttcgtgggctggcaccacgcagtcatcccgaatgctcagtactcaaaatccatacagctttccgtcagatgtatatgcatttggaattgttctgtatgtattgatgactggacagttaccttattcagacatcaacaacagggacccggtgctttgctcctccatgggagctataataaatgatgtgacagggctactctccatgagaggaatctgtgccacagaagacacacgtcgcgcgcg

SEQ ID NO: 480329 - DNA, 506 bp, Homo Sapiens
tctaaggatccctatttccacaggctgtggggacattacaaggtaaagataattgacggcttcgggcagcaggattccctaaatctgaacacaattaccaccttagttgattggaaagcagtgacatcattacgtcctcccttttggctaagaaaacaagtctgttgataaaagaaatggttggctcttattaaagattaaaattcagctgagttgtggtggctcacgccgtgtattcccaacactttgggattctgtctcccacgcactacttgtaccaagttattcatcaacatttcatggtaacagcccctccatcagattcttcctttcctggaaacatcattggtcacacaaacgttcccacaaagaagaaaggcccatcaccttaggctgcagaaggtatgagtccttgtggcaaatcaaatcccattttgccagtaattcgatttaggaagacaacacaaaatggcggacgaattggacgcagcttatacaaattcaat

SEQ ID NO: 480330 - DNA, 496 bp, Homo Sapiens
cctagggtcagttttgcaggtggtaaagccatttaccaagatagttgtaggtaaagaagggcagatttattagagaaattgtgaaaatatgttgcagtgggcagctcagcagagaaggggctacctgcaaagaggcaagggctggaggaaagttttatagggtcctgctgaagggtgctacgtgtggaatgaggtcattgtgcccgcaggttgtttgtgattagctgtctctaacaattgttcatacaataattgttcattattgttctcaacttggggctctccccaacctggggacccttccttattgttgcttacttatcaggtctccacataaaggtgtggaaacttcattcattcatatcttcaacacaaattgtaggtagcctgttttttaaaacatttattcaacaaatatttagtccaagccactattacttactaccttctctactattgtatggactttaactatctctgacactattcactattc

SEQ ID NO: 480331 - DNA, 315 bp, Homo Sapiens
caatagggttccatttcttcacgctgcatggcatacactgcattcaaacacgctgcatggaatccactgcattcaatcgggatccatttaaccctgctgcatggaatgcactgcgttcaattgggatgcattttaccatgctgcatggaatccactgcattcaatgacactgcatggaatccactgcatcaatcgtggtgcattttaccatgctgcatggaatccactgcattcactcgggatccatttagccatgctgcatgtaatgcactgcgtttaatcgggatgcatttttccatgctgcatggaatccac

SEQ ID NO: 480332 - DNA, 331 bp, Homo Sapiens; identical to SEQ ID NO: 456022

SEQ ID NO: 480333 - DNA, 302 bp, Homo Sapiens; identical to SEQ ID NO: 456277

SEQ ID NO: 480334 - DNA, 127 bp, Homo Sapiens
attgttcaaattgtttctacttcttgggcatccattgtgctagtgtgtgtcagttttgttgttagtataagtgttatatatcatttcacttatactaacaacaaaactgacacgggtacgagccgaa

SEQ ID NO: 480335 - DNA, 271 bp, Homo Sapiens
taatcagctcggcccgcttaccgaggggtggcaggtaaggattcaaggtgcttctggaagactctccactgcccacaagctggggacctctccccactagatctagatgaagtccaagaagtggtccacatttgccagccctttcttgggttcttacaggcatgtggtgtgccttccaacagacttcatctttctaagtaagatgagaatccccacttactggaaccctactgagcgagctttggagtgttagttaaatttagtatttgga

SEQ ID NO: 480336 - DNA, 447 bp, Homo Sapiens
cacccgacggggtggcagatatgggtgcttttgctctgggggtaagataataaatatgatagttaagattaactgagctacataagtcagattttaaaaaaataagacagctgtgaattttttgaaatgttaaatgatactcaacataacatgagaataggggaatctctgttcatcaaattctcaagaaggtacccctgagaattttcctacctatatggacacaaaaaaatacctttatggagtgaaatggtgattaaattgagaaacgccaaaagtgaggcgttccttctctttttctgatccagtaacaaaagctgtccaagcccaactttcagctcctctccctttccactttggctctgcccatcaccccatcactcgcccttctcctactcacagggcatggcagccccactcccaccccgtcgggtggagcggggatcc

SEQ ID NO: 480337 - DNA, 281 bp, Homo Sapiens
ctattttgaggtattcattagtgcacactatctcctgtaacaaatagaccccaaaatgcagaatgattaaaacaccacagagatgtgtttctcacataacaagccagagtgagagctcattagtggcacgtggcttttctcctgaaaagctgaatgcagtgattcggaaacccgtgttctttacagttagtagattcacccttcccaaggcctagtaaccaatggtattcagcggtggaacgggaaagagagagcctggagagagcccatatccatactcc

SEQ ID NO: 480338 - DNA, 207 bp, Homo Sapiens
ttttaaaagactagtcatctttaattgggtaggctggggggaggagtagagtgaagggtacatactctctcgtcataaagttaatctaagggagccaataaacatgtttcccaagagggcactatacaggcaaaataagtgatggctcatattactgctgggtgacaaggagcatccttcttacatccacatatgcacagtcttgca

SEQ ID NO: 480339 - DNA, 202 bp, Homo Sapiens
atccaacaaatgagaataagtagataagtactgtcttttaaaaaagtgtacttaaccatttccccactctccttatcccctggtgtggtgacggctgtaacccactaactgctggtaactgcccttcagagaaatgcatcccaggtgctgaatctgtagagagtgtgcattattctctggccccttctccactacattctac

SEQ ID NO: 480340 - DNA, 339 bp, Homo Sapiens
  misc_feature (40)..(40): n is a, c, g, or t
  misc_feature (72)..(169): n is a, c, g, or t
  misc_feature (314)..(314): n is a, c, g, or t
ggcaaccccacatggctgagatgacctggtcctaggacanccttggacagaagactggcctacctagcagannnnnnnnnnnnnnnnnnnnnnnnnnnnnnnnnnnnnnnnnnnnnnnnnnnnnnnnnnnnnnnnnnnnnnnnnnnnnnnnnnnnnnnnnnnnnnnnnntctggtgaacaagaaatgtaataaacacgtggcttgccattcaagagatgagtctgaccattcactttctgtgtgccagagaagagagatcatgggtatagaccagcccctggaaaggctgctttggtcaaggcttgagagcagnctttgctccaaggaaattaattcac

SEQ ID NO: 480341 - DNA, 217 bp, Homo Sapiens
  misc_feature (184)..(184): n is a, c, g, or t
  misc_feature (194)..(194): n is a, c, g, or t
  misc_feature (204)..(204): n is a, c, g, or t
gttcaccagacccactttattaaaaagcgaaatgacaatcagaaaggttaagtgacttagccaaggtcacacaacttggaagcagcagatcaagaagaaaaatccaggtctgctaggtaggccagtcttctgtccaagggtttcctaggaccaggtcatctcagccatgtggggttgccagatntttctgcatntggataaagntagataggccaag

SEQ ID NO: 480342 - DNA, 555 bp, Homo Sapiens
  misc_feature (429)..(452): n is a, c, g, or t
ctgcacaaaggatgctccgtacacagactatatataccgcatctgttaaggactcctgaaaaaggcaacgggaaccctcatttttgagcatgggctctgtacctggcactttcttcacagtgaccttctctctaaggtagatgttaaatgtggccttgggatacatctctgtgcttccgattcctcatgtaccagtgaaaattatactagaacctattttatagggtttttgagaaagggaaatgcacggacatgtgcctagtgaatgttagctattaacatcatcatcctcctccttagattttagctgagaagacaaatgttcagaaagatgttacttaaccgaattctcacagtagtaaatgtctgacctaggattttaatgaagatttatgtaagttttttgcactgtaccactggttaatggtnnnnnnnnnnnnnnnnnnnnnnnngtgcttatgtaataaaattgaatagaaaactgaaccagggacaggggattggggaatgaggaactatttactgggcacagagtttttgttttggacacttgca

SEQ ID NO: 480343 - DNA, 521 bp, Homo Sapiens; identical to SEQ ID NO: 457918

SEQ ID NO: 480344 - DNA, 394 bp, Homo Sapiens
ccgggagccttaaccctacagtgacaccttttcttacgtcacatgaattccttatctgttctagatacaagatgctcttaaaaatgtgcagtgataccactatggagtacagattctctaaatgttactgttccaaagaatgtattgaatcctaaagcactctctctttactaccattccctctatacttcttccaaaaacaacatatctaacagtaaaattaagaagaaaagtggtattggtggcatggaacgagaaagaataaaagcagatctgagatttattgaaatagtataagaagaaacttatgttgaggaagtatcatttatatttacatttagatggtgtatttcaccttaaagggttaagggcccccgggagcgatcctctagca

SEQ ID NO: 480345 - DNA, 276 bp, Homo Sapiens; identical to SEQ ID NO: 458082

SEQ ID NO: 480346 - DNA, 129 bp, Homo Sapiens; identical to SEQ ID NO: 458966

SEQ ID NO: 480347 - DNA, 150 bp, Homo Sapiens; identical to SEQ ID NO: 459149

SEQ ID NO: 480348 - DNA, 133 bp, Homo Sapiens; identical to SEQ ID NO: 459745

SEQ ID NO: 480349 - DNA, 312 bp, Homo Sapiens
caaatgcttgggattacaggggggtagccactgtgcctagttaaggtttttctacgaagtgctagagagtaaatattttagactttggaggccatgccttctcagtcccagctacttactcactgtgacaggaaagcagccatggataatacgggtgtagctgtgtttcaggaagactctaaaaataggaggcagcctgaatttggcaaacagtcctagtttgccaaccctttgccaaagaattaaaagagtcagcttagttcgtagaagcacatctgacattctaatgatgacacaagttattttgatttg

SEQ ID NO: 480350 - DNA, 245 bp, Homo Sapiens; identical to SEQ ID NO: 460765

SEQ ID NO: 480351 - DNA, 398 bp, Homo Sapiens
ctgtttgttccatattaattgtacacaaaggatctcatgatcctcttagggccatcatgggccaagggctcagattttgtccatggaagtctctgctatgggaggaaggtgacctttgttttagttctaactctatcattagctccctgtgtgtaccttggagaagtcactgccctctctgggcctccttgagaggaggagaatagacagataggacctggctcactgtcactcttccctcagttacttttgttgtaattcttgggggttttctacatgcactgttagctcgcacatgcctgatgtgtagcatgtgtgcttaatgcatttgctgtgtgaatgagcgacgtctcacatgcgtgctccttctggccgtgttgttgtctgctcttatctac

SEQ ID NO: 480352 - DNA, 585 bp, Homo Sapiens
  misc_feature (62)..(116): n is a, c, g, or t
tgatggtggcaacctgcggtcccagctacttgggagactgaggtgggaagatcacttgagcnnnnnnnnnnnnnnnnnnnnnnnnnnnnnnnnnnnnnnnnnnnnnnnnnnnnnnntgacagagagaaagaaaccccagtctcaaagacgggaccatacgaaacctaacagccatattggttcagggaagcagaactccaagaatacagagaatctgacacgattctcatagctgcagtagttgcagaagaatagaaatgaccatacattaagctgttgcaactaaatgtctttccatatatggggaaaaatagcactagatgtccgtatcgttagtactatatataaaattaattccagagtatacccgagactcacttctgggatactttcgaactttacagctattaagaagactccggagaatatcttgtattgaagcctcaatgcagggatagataaaagggagaagaacatcatagacagaggaagttgaatgacagctagacaacagcctcatctgtaatatggtaactaataatcccacctacttcacagcattatgagatttaaatatggtacttc

SEQ ID NO: 480353 - DNA, 812 bp, Homo Sapiens
gggagtgccccgcggcgtgtcctggcccgagtcctggatcctgggaacacatcgcccacgttctgtgacacgatgcgcgtgcactcgtcgatgactgttttgatctgcaggatgctggcggccgtgaggatctgcagagcttccgactgcgagacccgtagcacgccgctgtacatgaagtcaatgagcttttgcactgactgcactgacaccaccgacgggatctcgatgtcgctgtagccaagcagcagtttgtcctggaagaaggggctgccggctgccagcacgcagcggtgtgcgcgcagcatgctcccgtggatgcgcaccgttacgtcacagaagtggccacggttgcgctgctcgttgagggtctcgagcacggaattgctgaagttgtgaaggttgatgctgtgaatgcgctcggtcatccccttgcaactgatgtcacaatcagatgacccggtgtgagcgtgagagtttgtcagtgaatgtgttgagtggatgagggctgggtctggagacaaaacagcttcaaagttcaggcagggaaggcccggcttggcgctggatccacccggctgagtaatctcattctcctcagatgccttctggttttcagctgtcttgggtttcttcagtagtttcaaaatcaatggtgtcactcttcaggtaaattactccaaggcttgggcctagtgcagatgttcattggggcagggagcagagagcggctgcattcctcctgccttgcaccattgctggggaagcctgcagccacccaggatcagctcttctggcctctccccggccaa

SEQ ID NO: 480354 - DNA, 247 bp, Homo Sapiens; identical to SEQ ID NO: 461111

SEQ ID NO: 480355 - DNA, 186 bp, Homo Sapiens; identical to SEQ ID NO: 461255

SEQ ID NO: 480356 - DNA, 318 bp, Homo Sapiens
tcaaagagaaaaaggggaaaaatttaaacagatgtgattttaacggtttaagtaagacaagttactggtgctgatctgaaaactttgctcttgtcagtatcttccacatttcaacaaaatttgctgacatttgttgagcatagctagcatgtgccaccttctcttagttccactgtctccattctatcctctgtgacagtgagacaaatttgtcctcattttactcaagagacaggaaacacaatcttaggaaggttaaacgagctgtcaaagttacaactgctagtaactccctccagagctgcgatcttaactact

SEQ ID NO: 480357 - DNA, 182 bp, Homo Sapiens
cccagggagggtgaaccggcccaggttgcgaatagagcagatgaaacatctctcctatgctgatcagtagtgggattgcacctgtaaaaagccactgcactccaacctggacaacacagtgaaacccgtctcttgaaaataaaaaattaaaagaattttttaggctgggcacagtggcttat

SEQ ID NO: 480358 - DNA, 421 bp, Homo Sapiens
gcgtgtcctctgtcatggctctgagcacaccattcatgtatcgagttccctggagactgtgacaccggcacgccagggtcagtggcttttctagacagagtttggaggcggtaggtgctcagagagtgtttactgagagtcagtgaatgcccagaggtagcaaaaaccaccacccaattgtgcttgtttatggtgcacctgctgtgtgcccggctccgcgcaccacacgattccatttgacctcagcaatcctgtgaggcaggtcagtgattatccccattcctcagatgaggagccgaggcccagagaggttagtggctggctcaagggtgcagagctcggctggggcctggggccatctgaccccagcacccgagctcttatcttcatgatctcaccagcatagaatgaggctagtggg

SEQ ID NO: 480359 - DNA, 222 bp, Homo Sapiens; identical to SEQ ID NO: 461933

SEQ ID NO: 480360 - DNA, 833 bp, Homo Sapiens
  misc_feature (693)..(744): n is a, c, g, or t
  misc_feature (765)..(765): n is a, c, g, or t
gccaactttgtacaaaaaagttggcggaccctcgctcattcccgaccccgagcctggagaggcttgagaaagatttttcctgcccccttccctggagcgcggaggccccgccccctcccaccgcccagatgtctccggtcacggctcggaggacctccctgaggcccggggccgaagggtccagagagagaagcccgccctagggagccttgggggccccccaactccgtcttggggcttggcccccgacgctgcttggagggaaggccggtgcccccaccctcgggggctgccctcttccaatccagctccctccccagagctgcccatatccggagccccttccacatctggaagaccctggccaccatccctctgcaggtgtcagttgcatccagagacctctgcctttgcaactgcctaggagttgtgaggggatccctgctgccttcccccatcccaagggcatctcttacccttagtccctgcagagtcatccccctgcctctgtgttcaagctcaggcatagatcagctctgcacacccacaggcacttcaagacctgtgaggccactcctgggacccaaggtccttccccctcctctcctgtgtcctcaccttgaccccctctgctagactctgtctccctctgggtgtcccactctccacccagaggcagaggaggctgggtgnnnnnnnnnnnnnnnnnnnnnnnnnnnnnnnnnnnnnnnnnnnnnnnnnnnnccgttaaaatgtggagctctncccagccgaggggggcttccgtggaagcagacgcagcgtgttgcccagttggggggagtattgggcag

SEQ ID NO: 480361 - DNA, 478 bp, Homo Sapiens
ccggggaggcccgttctgggctgcaggccggacgaggagaggaggggctcagccctctcgagtctggaggaggcggcccgaggcggcgggaggcgctgccagctgggaagtcagggacggccgtgggggagggcagggccagccccggggtgtggggtcaaggggcagacggggtgtgggtgggcggtgccgcaagaagaggggagggtggagctcaggctgcagaggagcgcaggcgcccgaggaggggcgacccagccagctggggccatgggccccactgtggctcaggctggtgctgcgggaaggatggggctgccgtctctgctccaagcccctccgcctggggccagttagcccccgctccccactgctcagagaccccagggccctgcctctgccggagcgccctgcggccctgcccagcttttttttaagctctgccccgccaacttttttgtacaaagggggcctgatg

SEQ ID NO: 480362 - DNA, 794 bp, Homo Sapiens
tcagcatacacaacattggcatcttcagtctatgaaggcttgataagcagcaatttagaaattcaaagaagacaagaagcagggggcgagagagcaggtggaagaaggggagcaccccctttcctctggagaaaggcaggtgtggggagctctaaaccaggattcgagactgtcctctcaggcagccatatgcacgtcacagacagcaagagtgttccagaagcactcgccaaagacactcgtgtgaggacagagtcagggtctccactcttccacttgaaggcaacctggcgccttccacaatggagggctccagcagctgctgttcttgcccccgcaggtctgcagaatgagaaggggttctggaaagatttccctaagctgtgcaaacagctaagttcccgttgaggctggagtcctcaacttgccaggtagggtgtaggagacccacagtgaaggcaggtcttgggaatcagaagccaggctgcccggccactgtgtttcagagacacgctcagtaccaggcggcaggacttcctctccacttagaagctgctgtagagacaagaggaatgttctctctgggtcgcacatggtcagtccagagctgtggcaaataacacacactgtcagagagccagaaccgagactgcaagggctcaagacaggaccttagagagagcagggtggaggattatcaaagttttatttgcataggtgttttagaacagcagaggtcaactctgctagactacttcacaagaagaagctggtgctggtggagttacaggagg

SEQ ID NO: 480363 - DNA, 686 bp, Homo Sapiens
aaattcacaaggcagcagagcagaggctgcagaggtgctctgtctaccgggagaactaatgatccctgtgagcaatgcagggtgcaatgagtcacatggggaaatgtggacagaggcagaaggacatcaaggcccccactacacaccaaattagagtcaatcctcctgttctccccacccactttgcaaactaatgacgtccgcgttatcccagaggagagtggctagggacactcagtccttcccaatatgtggacgtctccaaatcttggtcaaatctgtcagatttctaacagtttcaatacctcaatatcacctaaactgagaaagattattagcccgtgatggtgggacccttattgacgaaggcctgccccctcctcacagttgggtagattcctgggttcctgatggttcaggagcctgggctgtcatttgtctacctggggtttgcagcagccctagtacaagaagattcattcgtgctgtttactttggcagcctcttcacacaactttcctctctaacacgtgttaattatcagagtattcacctcacctccttacttcccagcttctccaaaatcaaagcaatagtaataaacaatttggaaaatgttgcttagtattttaagccatggttagcattataaccttaattaaagagaccccaggctggggtggctc

SEQ ID NO: 480364 - DNA, 717 bp, Homo Sapiens
  misc_feature (359)..(368): n is a, c, g, or t
  misc_feature (596)..(648): n is a, c, g, or t
ctggattttctttaaatcaggaggcttgcttcggggacctgggttgggcgccgcggcagcgccggcgtctgaagttggcccgccagcagagttagcacccgtggtctccccaggccggaggtccgcgcccggcaggtgggaagcggcatcttccagcccagctccatcctcctcgccctgttgttgctgcagctcgtccgatctgcacctcttcatggtgtatgtgggtcggcaaggggaatctgtccttccagcgcgccgtcttggggaagaccgcaccccctcttatattcatatgaggcctggggtctaaattattaacaaggaggggagatggcagaccacaatttcttgaattnnnnnnnnnnttcttaaaggcgggtgagggaggggcgagaagggggagccttggttatagcttggaatagttcatttcgacctggggagcgaagacaggtcacagtcgaggctgggcagcaagagtccttgggcagtcattgcaggagggagaagggagacaacccccggcccccaaactttctgcttcagggcatgggcaggacggagaggagctgggcggcacagcgcatccctcnnnnnnnnnnnnnnnnnnnnnnnnnnnnnnnnnnnnnnnnnnnnnnnnnnnnngtcctagtcggccgccatcggcgccggctgcagcccccggccctgcaaccggcccctgccccgcatggt

SEQ ID NO: 480365 - DNA, 1165 bp, Homo Sapiens
gggtctgtgagcccacgaggatgctggcaggggacgctggggccagggtcccacccgctacaaccgcgtggacgtgagtctcttcatgcctctgcgctgagccaggttggacgacagcacgggctccagccgcggggcctgaggtgttctgtttagagcaaagtaggtggcggccatcgcgcccttcaccaggtgcacgtcctgtcggctgagctggtttggggacaggtactctctgttgaccacccacgggtgtttgagcacttgcatcgccgtcaggcgctgatgagggtccacgtggagcatcttggacacgacgtctttagctgcgtcagatatcgagtcccagtttcccccagaaagggcatacttcccactgccgatccgcgccagaatctcctcaggggtatcgtctggcccatttgcaaaaggggtaaatcctgccagcatggtgtacaacaggatccccaaactccagatgtcacacgccgcatcatagccttgacgcttcaggacctccggggccacgaaattggccgtgtagcagggtgtcatgagcagcccgttccccgcgcgcagctgcttggcaaagccgaagtcgcagactcggatggattctgggctccccgactcatccctgtacaggatgttactcggcttcaggtctcgatgaacaacccccctgggaatggaggtagtccatggtcttggtgatggtgcacaggacgtcactggcttcgcgctccgagaagtatctctgccggaggatgcggtccaggagctccccaccacgcatcagctccattaccaggtacacaaacttgccatcatcatagacatccttgagggtgatgatgttcgggtgctggccgtaccgcaggaggatctcaatctcttccgaggggtctctcttgctcttatcaatgatcttcacggcatactcggtgtctgtggctttatgcacacatcgcttgcacactgagtaggagcccaccccgatgtcctccttgatctcgtagccatcggtgaagtggatgttgttcccgtgtaactgctgcacgattgggtgaactgggactttgtgcagatcttgctgtgagggctcctggatcaggcttgaggccacaaagctgaatcctctaaacaggtgatgagcatttgcact

SEQ ID NO: 480366 - DNA, 1124 bp, Homo Sapiens
  misc_feature (386)..(449): n is a, c, g, or t
  misc_feature (483)..(545): n is a, c, g, or t
gcaggtgggatcaggcccaaccccagctctgcctgcgcaggacttactcctggaagggccagggatctgtgggtgctgtgggggcagaggcagccgcggtagaataggaggcgctctctgctctctctccacatcctcactccacccctcattacatcctctgcccttggcctgaatgatgtcggctcggcatggacaccttgtgcatctttggtgaaaagggacctcaatgtcaggtgcagtttgccagggtgaccagacttcctgagcatggaccaggggaggtgaaaatggctggactccctgggtgagaaggaaggcttctccctgtggggcatgcactgtggcaggcaaggtgagcaggctgtccagggcagcttgtctgnnnnnnnnnnnnnnnnnnnnnnnnnnnnnnnnnnnnnnnnnnnnnnnnnnnnnnnnnnnnnnnnggggcagtttgctgtctgctttccggggcagttnnnnnnnnnnnnnnnnnnnnnnnnnnnnnnnnnnnnnnnnnnnnnnnnnnnnnnnnnnnnnnngctgtctggggcaacgtgtctgtctgtctgctgtccggggcagtgtgtctgtttgtctctctgctgtccagggcaatgtgtctgtttgtctgtctgctgtccggggcagtttgtttgtctgtctgctgtctggggcagtttgtctgtctttctgtctgctgtctggggcagtttgtcatctgtgcagggcaccaactccctgtctttctaggagcctggcacacaggaggtgctcagtaaatgtttgcgaaatgactcaacttatttcagtatcttattttttctgctgggggtggtgggggcaccggaataatattcaactccaaaaatgtaaattaagcatcggtatggcttaaacaggccaggggcctcctgccgtggacaagcccaggggacaggcttcactgagacgctgcctgcggatggtgcgtctcttaagaacgagcgtgcatgaaaaggggggccattcagacagaaaactacgctcgttagaggtaggggaaatggcttctctcccaaggccttcaaatttggcctcttgtgccatccttgtctggggatgttttggcccgtgcttca

SEQ ID NO: 480367 - DNA, 514 bp, Homo Sapiens
  misc_feature (303)..(303): n is a, c, g, or t
  misc_feature (311)..(311): n is a, c, g, or t
tgagccactgtgcccatcctaaaagatcattttaactgctctggggtaatttcactgctgatgggcaagagtggaatcaagaaaactagttaggaggctactgctgtaattgaagggagagatgacagtgtgcagtctggaatagggtgatttggggatatgctttgatgagcaaaggtagagctgtcagtatttgctgctgaattggttgaaaggtgagagagactggagtcaaggactactccagggtttttaaaaccagtattgggaaaaatggagttgtcatatagtaaagtagagaanactggggnaggagccggtaggaggactggaaatgtggaattggggtttagacacattaagttcattgcatcaggtggacgtgttgtattgagtaggcagttggagatacagacctggagtctgtgggagacagtggggtttctttggtgggggggtcatcggcatctaagtgctattcgaagtcatgggactgcagaagattatattaaca

SEQ ID NO: 480368 - DNA, 518 bp, Homo Sapiens
  misc_feature (487)..(487): n is a, c, g, or t
ttgggggcccccagagcctccagaacccaaggcctcctctcagtccccacccaacccagacttctccccgcccgtaggttgaagcccctgcccacggtcctcccatccatccaccagctgcaccccgcgtccccaaggggctccagcttcatagcgctgagccacaagctggggctgcctccagggaaggcctcggagctgctcctgccggcggctgcctctcttcgccaggaccttctgctcctgcaggaccagcggagcctctggtgctgggatctactccacatgaagaccagcctgccgccaggctttcccacccaggagctgctgcagatccaggcatcccaggaaaaacagcagaaagagcacctggggcaggctctgaagaggctggataagctactgaaacaggcactggagcgaatccctgagctgcaggggatcgtgggggactggtgggagcagccagggcaggccgccctctctnaggagctctgcaagggcttgtccctgcccca

SEQ ID NO: 480369 - DNA, 771 bp, Homo Sapiens
ctcaggcactgcttcggatgggggcatccgtaaatgcctgcaacgccgtgtctgtcttggctttcaccaggaccttgggaacttttgtgtggctggcgcagaaggcactgtagagcttgaagcggtcagcataatacaggaatgatccccccagagagaacagcactttcttaaattgatcaaccttctcaagcttttccaaatcaggtaccagtctcactccatcttctagagttttaaggaattctacttgaaactctaccatttccgttaaatttccaaaaagcacgtcaagctcatcctgggtgagaaaagtttctttttgaagaggctttaggtatctctccataagacagtttaaatccttcacgtaggtgcgctccgtctccaggagctcgcagatcaccttgcgcagcttatctgcatccgagagttgtctcatggtcgccagctgaggccccgtggagtcctgaggagatgggctctggtcagaggggttcatctcatgcaaactgcggcaaaatgcggccacctgttctgtactcttgctgctgtgatcagtctcatctgaggattccaagtctggcccctcggtctcctctggagcggtctcagcactgctgccctgctcgctgcaaaggctgtgccctgggttgctggtgaaaaaggcgaggggctctcgccaaggtcggcagggccgtccactcggtggggcgggctttccagcagctccactccttcctccagctcggggtaggtcctcaccaggag

SEQ ID NO: 480370 - DNA, 853 bp, Homo Sapiens
taggtgaggaagtcagtgactgcgtagcccccctttgtggggtggggggacagggtggagctgccaaagaggccaggaagatggggggtggctgggatggtctggggtcccacatacatgttctggacttctagccctgtgagccgccggaggctgtaaggaatcttggatgccgtgaattgcaggagttccttgctcagggtggccacctccttggggctgactggcgtatcctcctcctcctcctccagctgctgctgggcactggtgcgccagctgccggtccagggcactttcccagcgggcacggagcccgcagggacgccgccaggagtcggatggcactttcactgtctgctagctgcagctccagccagccatcggccaccaggcgggagcagtcaccattggtgtccaaagaccggctaaaaagcaggagggactggagggcagggatgcggacgcagttcaccaggtacggcttgttggtctccagcagggacacgaagctgaggagctggtgtttgctgctcatcttgtccttgtcgtctgaaaggttgaggaggaccgctcaggcccaccctggcccacccaggcccatcagaagcccgcctgtcccacccggtcaaagtacacatcgatagaaagagtatgcttacggcatggctttggtggcctggctcagacaagaaggtcagccaaatctgaatgtgactcccagcacgcagccatgcctgcagcgagacacccttccatgcacacgggtgccaggggggcctccctctgcaggacccacctgggagctcacagagtccataggacaggccccctgaccggtgctcactctctccaa

SEQ ID NO: 480371 - DNA, 852 bp, Homo Sapiens
  misc_feature (411)..(447): n is a, c, g, or t
gaaaatggacactgggattgtgacaatcaacagaacctcgaggacatgagggttaccttgaattggttatctggtctggctgggactgatggtttggaatatccagaagtattaggggatgggatcctggaagccaaggatatacttgtagttacctgggatgaaatgctctctgcagtcaatgttttgggatatctggtaggtgctcccaaggtacaataggaaggtcatgattccactcagtttccatgatccctggagatcctttaaggccaagacttctaatttacttttcgagttccatcctaggctcactcaggcccactctcatatttctcctttggaatcttaaagtccactgggccttgtatacactggattactcttggatgatcaaattttgggggtagnnnnnnnnnnnnnnnnnnnnnnnnnnnnnnnnnnnnnacttatgccaagttacagccaccaggaaaaatggcaaaacatttattgagtcatctacagcagtctgacatccttaaaatcctggacaagatagtgagcacagcattaatggcagcagcagtagcagtaaggtctgtggggcttacttagctttactgtgggagatgaaacccaggctggtccagctcccacaagtgaggcaggaaccatgtctgagatgccaggggctgcaccactccagccctgatagaggcaaagctacagaagacagacatcagacaagacacacatagccaagtgcagaaacaccccaagactgtgagttcaggaaaagaaggaatgggcacaccaaaatgtcccagatccttgaagttgactcccaggggcatggctgctatcacccaa

SEQ ID NO: 480372 - DNA, 889 bp, Homo Sapiens
  misc_feature (74)..(82): n is a, c, g, or t
ttggcgctgtgttctgctatctcgaggcacattctcccctccaactttgttaatgctacttgtctctggaacannnnnnnnncctacctcagagataaatgagatctccatttcccacttaacacagtgattatccttttttccccccccaaaatagtgacatttggtccaattataatctattttcctattgaactttcagcaataactgagctgtggcactagcagagctagtagccattatcagtgaaagaaaaagtccacatttctactctctgttgcaggtgaacaggagaggatggtacactgttactagaactcctctccttattgattatttttggacacacccagaaacttctttatggaggcttttgggttgatagtttaaaaggctgatttttctttttggttatgatttctcccttaagtggtctccgactttgtagcatttttatttaagctaaaacagagcacatgtatatgtacataagacacattaaatctataaatactatttattcattttatataaactaatgtaatggaaaacaaattcttatgactttgtggttttatagatgttctagaaactttgtatgtaggtatctacaaaattagttcattcccctgaatatttttgcattcatatttttgaggtcttgatgttttcagcctctggcgaatctttttcattgaatttgaaccatttgtaaaatctgtgatgctgaagcagagtgtgtcacaaagtgatgagaacattactaaaatccacggacgcactgcgacctaagggctcaacggctgactcggcagcgggcagccaccccacgctctcctgcggtcactcgcacaccacagcctgaagctcccccagcgcctgcacctc

SEQ ID NO: 480373 - DNA, 1454 bp, Homo Sapiens
  misc_feature (839)..(847): n is a, c, g, or t
  misc_feature (1033)..(1041): n is a, c, g, or t
ttgggtgcagccgattggggttttgggcgctcggagcagcatctgagagggctcactctgatcatcagctgcacgttaagccacaaaccggcgtcgcttcggcgttccggaacccaggcctgggggccgcggggattgcctctgcgtgcaactccggaaagtttcaaggggtcccccgactgcacaggtaccctcacctttcctgccggcgaacgctggcgaccgcccgaccctgccctctttctctcttcgcacgcaggtccggaaatcggctttgatatggaactactccgctctagcctggaaaggagacccgcgcactcctctcgcagctaatttcggatcattaatttaatcggaaatgaggtaaccagtgtaggagacagagaaagcaaccggagcatcaaatggcagttctcgagaatcgacgaggaacttaaatctggactcagggtttcagtgcggtctccgactcccaccaccccgcccctccgcctgtctcgccgccaggtgtgacctccacgcgaaggaatcttcttcggatgggtgcaccttgccaacaggtgtggcacctggaggactaggaggcgcctccagactaagggcgctcagtgcggcgttcttgttgcagatgattctggaaggccggtaggtgtcgggcgacatttgaccttcttcaggtgcttagaactaagtgtctggaaacatgatcctttcgcgtaagtttctttctgaaagccaccaatcttgactgtaagctgtatttgagagatcttttggctgagtttacttatgacctaacggttagtcaccaactgaggcagggcacaggatgaccnnnnnnnnngtgtcagtttttacacaactctggcctgcaagagcctacgtgcttcataaataaaaataaacatacgagcgaggaaggtgcagagccccggaaatatttttttctcacatttttgaaataccatgcacatatatgtggctatttaagtataactactagtgttcactcttactcatttctacaacnnnnnnnnnccatttaaaaatcgattatgttacggtttaaacctcgggtgggtctaaagtgacattgttggtctcattacagcctctagtggacagttaacatcagtttcctgaaaaggctctgactggttttgttttcgttgacaagcttggtcaaggtgaaggttagtacgtaagagcataaccgggtaaaatgtcccttcaagcttgtcctgagcccagccgaaaaccgtgcttggcaaggacgacttcagaaacggagcagaagctttgtaggctctgctatagaacaagacgtatgctttgtgctgcaggtattcattatcactggacctgtgaactaaacagaaagcttctggtatcacttcagtttcagaccagttcatacaactaaattccatctcaaatattcataaccgaaa

SEQ ID NO: 480374 - DNA, 869 bp, Homo Sapiens
tttctgattttctcttcatactcctctctatccgcgctttctctctctccagctccactctgtggagttcttgcattgcttgtgtttgcttctggatctcctcctccgccgtttggtacatcatattagtgtagcagctttcttgttctccctcaccacgcgctggatcaggcccagcaactgtgccctctgggcctcctgctcagcgcctgttgccttgttgtttaacgcacagtagcggtcaccgaaaatgtccatcaagtcttgaatgtcttctggagcttcccttaagtagtcatgcaaattggtgtcaacgtaagtcatctttccgggtgaatatgagaatcatgaaacttctagccctctctccaaacattttcaggatcttctctgtggctttgtgctcttcctcagtgtaacggcccagtggaaccaccagaagcagagcatgaggccctggggaggtcagaagaatgcagcgaataatctccttggacgtttcagcattgggcacctctgtgtcgaaaatgcctggtgtgtcaactacgacaagttctgtttccttccatgagctgctgcgtttctcacacttcttggtaatggattttgctgcagtgccagaatgagacactttccggccaaggatgctgtttcctgttgcactttttcctgctccggttttacccactaacacaattctcaattgggaatttctgggctcttgccttccaggccctccctgcagcctggtctggggagcactgaatgccctctcaccataactggcccctggtgtgctggggttgaagctcatactgccgtattgggctgccattgtcgcttgaactcctgaaaaatcaggatcccaa

SEQ ID NO: 480375 - DNA, 648 bp, Homo Sapiens
attttctccaggaatatatattgatattctaagtgggatgtttatatttataagtggcctttatgtctgtagggtcaaaatatctgggagcccttaaaagccctttctatttgctttctctggtgcctgtgctcctgggaatggggcttctgcttcctgtctttctcctgcctctggcctggctgcgtcatggatgttgggtcattgggtaaagaattgttggtctcaagctctatcaactctctcccactgaagaaggtcaacaaaggctgccctacccctacctctgtctgcgcccagcctcatctctgacttctccttttgttcccatacgcagattgtggccaccacggtgatgctggagcggaagctgcctcgctgcctgtggcctcgctccgggatctgcggacgggagtatggcctgggagaccgctggttcctgcggtgagtgatatgcgggggtaggtgtcccctgagaagcctcatcggcagggtatccccctgctcagacagcttccggctcctgggttccctgtggaggcctgtgtgctccctaggctctatgcttgttgattgagctggtgaggaaggggtcccgtttggagctcagacttcccaaagcatccagggagtgtgtggcagagccaa

SEQ ID NO: 480376 - DNA, 890 bp, Homo Sapiens
  misc_feature (55)..(102): n is a, c, g, or t
gagacggagtctcactctttgctgcccaggctgagagtgagactccgtctcaagnnnnnnnnnnnnnnnnnnnnnnnnnnnnnnnnnnnnnnnnnnnnnnnntgtagcccaagaattatttcttcaaaggaaagctatggcggctcactgtaggtcagagctgctatcagtgaagaggatgtggggcacttggagtcccagcaaagcccggggcacctttgggggccctggggagagtgtccaagcatccttgaatggaagcttcataagaggtaggcggggggcttcactccagacccagaggatccggctccctggaagcagggcctaggagcttgcacattcatctcctcctccaagggctccgatgctccctatcagtctctctttatacctcaagctgcccgtgcagctcctgactattccaggagatgggcccaggagtttaagggatgctgtgaccgggatccccctgacacttggagcagtaggatcctgagaaggagaagacggaacaaggtagccctggggccctgagattccccagaggccccaagaccttggccccaggaaccccaaggcccttacctccatgggtacaggctcccagaaggttgacgatgttctcgtgctggcccaggtggctcatgatcttcagctcggacatgagggcctccttctcatcagcatgggccgtggacttcagcatcttcacagccaccttcaggacagcatcctccttgcccagaccaaaggccgtggcctccaccaccttcccaaaggctccagctccgagggtcttaccaaactgcaggttgttccgggggaactcccacttctcgttgtaaggcagctgcgtggggtcgatgaaagtataactgttgccccaa

SEQ ID NO: 480377 - DNA, 802 bp, Homo Sapiens
ctacccgggttagcagccgccttcccacttgatgtgcagaatctaagagaagccgggcctccgtcgcagagcctggagttttgtcaccattcctcaaacagctttggggcttcagggctgctgggctctatgaaataatccgcaatcctaatctggaccacaatggacttgaggttccggcagatgctgttgaagtgcagtagggcttaggggtgacgggagtcgccgtgagcaccagcatctccagtcccttcaggccttcccggcagacctttgctgccacatcttgggtgatctctgacacgtggtcaagctccaggacctgcagccgcatgcagtttctcgcgagtgatgccaggccctgcaccccacagccggcacccccgacccccagggcccgcaggtggggccaacagcgaccaatcatctgcaggcagcggttactgaagcgtgtgggctgctggcaggggtgaagtggtgccacttggagggagacgatctctctgcagcctgcgcccagggcccaaatgacctcatggcccacggggtctgtggtactcctgtacgtgacagcctgcagggcacggcagtagcagctggccagccagagcgagcggtcggtgaggatgtttggacattgggagatgcgcaggatcagcaggttccccccagctgccttcagcagggactccagcccagcttccaggcagccccgggtgctccgggcatactcctccttgctctccttctttccccgctgccggggcttcaagttctgcagcgtcagagagtgggcctgggt

SEQ ID NO: 480378 - DNA, 1096 bp, Homo Sapiens
ttctgcattgtaattaagtttattaatcagctgactttagcattgggagattattctggattgcccaagcacttaagaataggagaaaccggagagatgcagcagcaatagtcagtggtttcaaatatgaaagggatttcacatactattgttggctttaaagataggaagtcgtgggggcaaggaaactctctaaaggaaattaatctggcaacaacctaaataattctagaaaaggattcttttccagagtcaagaacagagccaggtggttcttctcttctaaagacatttccatgggccagttccaccgcaagcttctcagagagaatatgttctgccgtacggacaccgaacgtcccctaagatggccgcccccatgatgctctcccctaagggctctggctccgttacctgcaacgcaccgctcgcttattttttgttctagtctctcttgcttcagtttttatacggcttctaaaacgcttcgcatttacaatagtgactgaggtgcccagaggtgactttaattttccattgagctgagacgtcacagccatcataaccgctaagaagggatgccgcgcctttgtggtaataatgggttctggcctttgagaagtttgcgccgttcactgtcccctgcgaggagaagactaacttatttctgttccgtgtctgttcagaggactttacccccacgccgtgtctgcctgtgtgaactcaagcctctgataagctctccattttctgccagggctgaggtgtctggaaatcggacagtttaagaggcctccgtccaccgcgtctcccggccgctgtgccttctgtacgtcacgtactcaaagatggccgcccccagagcggcgaggcgacgccggcgcggacgcgtctcctcctgaggaaaagccggaaggccgcattccgctctccatggaaacgcggctgaccgtctctggaggtttagagggggagggagttgggcgaggggcccagaagtggaagaagtttagggaagtaagttcagcttttaagaggtcgcggcgattccaaggagagtcaggtcagtgtgtgggtcagggcgtggaaacgccaa

SEQ ID NO: 480379 - DNA, 1414 bp, Homo Sapiens
  misc_feature (865)..(1133): n is a, c, g, or t
  misc_feature (1137)..(1187): n is a, c, g, or t
gggatcttcaggttccaggtctgggggcttcagttattgcaggctggaccctgtggatagaacacagggttactgatgattacacttggctattgctgtcatttggttcttttgatcttcactttgagtcaatggaactgttcaggcattctgtagggaggacagacaccagcgtgacactgcttcagcatttctttgttagaagcagtcatgccaggaacacactcataacgtgcagcagctacaggccaggctggctgatgagaggctgaaagcgtctcctctgtgcccttccgggagtggttcccagaaatgtcggtcttagcctctgacccagtgtcagcgtgctgttctcttgctcctccccgatgtcagtggattcatttttatcaaaaatgtcttgatgtttattgttaagcttgaattcccacacaattttagcacttcccccattttcttggtgtctcaagtgatttttcttgggactcagagttcagagaaacatgcatttccagaaaaaagctgggaagggactcttgcatgggaacactgtctaaaagcactttcaccttggtttctggaaacaggcacattgcaagctacagtttaggacctgatgccactttgaaggtgtgtcagctggacacagaaaacgaggttacggaaacaatggtcccagcacagctcactctccaccacgctgcgctctctctccttagtcttgtggggctggaggcacagtggcttagaagtggggtgacctggttgtgatcaaaaaggctcctccctctgttcaccatgccatggaaaatgtgcctcatcttgcaccacacaccagtggaaaagggaattttaggaaaacgannnnnnnnnnnnnnnnnnnnnnnnnnnnnnnnnnnnnnnnnnnnnnnnnnnnnnnnnnnnnnnnnnnnnnnnnnnnnnnnnnnnnnnnnnnnnnnnnnnnnnnnnnnnnnnnnnnnnnnnnnnnnnnnnnnnnnnnnnnnnnnnnnnnnnnnnnnnnnnnnnnnnnnnnnnnnnnnnnnnnnnnnnnnnnnnnnnnnnnnnnnnnnnnnnnnnnnnnnnnnnnnnnnnnnnnnnnnnnnnnnnnnnnnnnnnnnnnnnnnnnnnnnnnngcannnnnnnnnnnnnnnnnnnnnnnnnnnnnnnnnnnnnnnnnnnnnnnnnnncatctttttcccattgggtttgaccaactctatccaacttgatcaaatccgaaggaaaattccaaattatggagaacaagacctctgaattggctaaattcctgcaactgtcaccagggagccccctccctgcttcatgttgtcccatctttccagacgaaactgatgtacatcttacatatattgattgatgtctcatatctccctgtgcatggtggtgtgtgcca

SEQ ID NO: 480380 - DNA, 700 bp, Homo Sapiens
  misc_feature (475)..(475): n is a, c, g, or t
ccaactctgagaagtttccccctgactgctgggccctgaaaaataaataacagagactcaggtacacccaagagtgtctataaacaacaacaaaaactgcaaaccaaaaactagtttacaatactgaagttataggaaacaagcacaaaaggccattgggtggggctggatggagcatgatctggtcctttaaagtatgcagatcgcctgggaggcccagcctatggagattgggaggagagggagatgctggtgactggagatggtgagagcctgggctggggtagtttttagtcatgggcttatggaccctcccctcttctccagctagctcaggcctttaagaggcaggcccaagaagggaaccccaggaagccctagaagctccccagcgcctccatcccatggacccggatcccctgcaggaggggaagttgagcagtggcccaaagacacagtcgtcctcctggcttgnggcttgggttaccagggtccccaaggggctggcctggaaccagaggttctcataggacttggggcttggggtgaggcccgccaagaggggctgagtggagtcacagcggagatagtgccctggccctgggcttgtggggctgcccagcagctgcccataaaggacctgatcgcttgtgccagactgggattggggctgggtggaaactgctcttggtccccctcg

SEQ ID NO: 480381 - DNA, 1051 bp, Homo Sapiens
taccttgttgccccgctctttaccctctcacccttgccctctgttcctgtcccaccctgtcccttgacccacccaggaaaggatgggggtccaggcctccaggggacttcacagtaccccgagcgcacagcccaggctccctcccaacgggctccggctctgccccattctgcatgaccaggagggccctggaggcccagccacagagcagtagccaaggctgcctggcctccaagtggtttctagacggtggataagccccaggtccaccccacctgcccagagctgagatggtgtggacaccttccctgctaggccagccctgcaggggcccccaggcaaggccaccacccccacaccaggcccagctgcagccacccggcctcagggcagtccccaccacactgtggcccaacgaccttcctgttacctgagcagacctggctcaccacagggtcctactgcccagtgcccactacaggccccgcccctcctggtgcaggtttcagctgtcacctccctgaggcttctccagccccttcacccctgttccatttttcttcttttgcttcactgaagttctccttggtcctgattcttggcctcctcccaccagaacgtgagctccttgtgggaggcagtgcccctcccagcctcctccctgtcacagactgtgtgggggccacccaggggctgaatggaccagggggtcagcagggagagtgctaagtggtggcggggggcctgtggcagaggccttgtgacagtgagggttgagggctggtccagagagatgatgtgatccccaggagaagccacaggggaccatgacatgggcgccaccagcttccaggtgaacgtggacctatcgaaagccagcttcagggcaggacactgtcctttctggaggggatggccccaccccacagacaaggcaggcccagacaactctaccccactgcctagaagtgcgggtccccagagccagggtagaccccctgagtcaggagcccgggcacagaactgagcacctgcactgcaggcccagggc

SEQ ID NO: 480382 - DNA, 1097 bp, Homo Sapiens
ttgggtgcgagcaggcgcgcctgcgctgcgcgcccatcatggagcagttcaacttcggctggccggactcgctcgactgcgcccggctgcccacgcgcaacgacccgcacgcgctgtgcatggaggcgcccgagaacgccacggccggccccgcggagccccacaagggcctgggcatgctgcccgtggcgccgcggcccgcgcgccctcccggagacctgggcccgggcgcgggcggcagtggcacctgcgagaaccccgagaagttccagtacgtggagaagagccgctcgtgcgcaccgcgctgcgggcccggcgtcgaggtgttctggtcccggcgcgacaaggacttcgcgctggtctggatggccgtgtggtcggcgctgtgcttcttctccaccgccttcactgtgctcaccttcttgctggagcccccccgcttccagtaccccgagcggccccatcatcttcctctccatgtgctacaacgtctactcgctggccttcctgatccgtgcggtggcgggagcgcagagcgtggcctgtgcccagtagtcgggcgcgctctacgtgatccaggagggcttggagaacacgggctgcacgctggtcttcttactgctctactacttcggcatggccagctcgctctggtgggtggtcctgacgctcacctggttcctggctgccgggaagaaatggggccacgaggccatcgaggcccacggcagctatttccacatggctgcctggggcctgcccgcgctcaagaccatcgtcatcctgaccctgcgcaaggtggcgggtgatgagctgactgggctttgctacgtggccagcacggatgcagcagcgctcacgggcttcgtgctggtgcccttctctggctacctggtgctgggcagtagtttcctcctgaccggcttcgtggccctcttccacatccgcaagatcatgaagacgggcggcaccaacacagagaagctggagaagctcatggtcaagatcggggtcttctccatcctctacacggtgcccgccacctgcgtcatcgtttgctatgtctacgaacgcctcaacatggacttctggcgcct

SEQ ID NO: 480383 - DNA, 552 bp, Homo Sapiens
tttttgcaattaaaagctttttcatttttaacttaaaatacttcctggtttcacaaaggcatgtccatacaatttcctcaacattaatcttcagatttctttagttaatgcaaaacattaaaattcacttacttttttgtatttcaaatgaacaagtcagaacattaaagcttgctttatatttcatccaagaaacagacaaatcacctaaaaattgctttctgcctatgtatgtatgcctgaaacatttgcatgagagctaaacttcaaaatcaaaacatcaaaggaaataacagttaacagtaccatcttctggacagttctgacaccagaagttgtagaagttttacagaaatgcaaacacggttgtcaaggtaaaatggggtgggaaataatttctatgatatagaccacaaactagtaattaagcggaaacacaatcttgatctcaaataaaaccaaaaagcaccttttggttgctgttcccaacagccatacacagatgcctccccacaccaacagccacccatacgcctctttataagggggcat

SEQ ID NO: 480384 - DNA, 899 bp, Homo Sapiens
  misc_feature (440)..(492): n is a, c, g, or t
  misc_feature (813)..(836): n is a, c, g, or t
tttttcaatattttttctttattgataaaaactacacaaagctaattgataattaatttaaaaagcaatgttacacattatcttgtgtttagaaatttgtcagcttggcagtttcattcattgagcccatggtcatatctctgttatagctttagtccacatgagaatgattctgctggtcttctcattcggagatcttcatggctctctcaggcatcctacacagtgagggctgccaatgggacaaaacaaaattccttctatcatgtaccatatatggcatttgtcatgaagggtcattcacccagacttattgggttttccagtagttttgtcaaactttgtggtcaactttctccgtggtccgtggtaaagcacattttcttttggtacaacataagctttaatgctcatgttttgtattagaaacttgaccaggnnnnnnnnnnnnnnnnnnnnnnnnnnnnnnnnnnnnnnnnnnnnnnnnnnnnnaaataaatgaaagcaatttaaataaaatctgtgagagttacacacacctaaagaggaaaacggttgtttccctagcttcccacccacccctgtttatttgctcccctgtggttctccagcccaggaaccatgcagtgtagaaaaatcaaatatacaaacaaacctatatgtagctagggtgaaatctatttttataagaacttgacactcttactatttacatccgggagcatttttgtttgttttatgttttaaagcaaagaaagttctgcagtcctcccggtaatgctggaggtgcattcgcttgcctcttcaagcagnnnnnnnnnnnnnnnnnnnnnnnnctatgccataaatgttttaacaggaacgatgagcttgctcgattgcagggattgtggacccaa

SEQ ID NO: 480385 - DNA, 1068 bp, Homo Sapiens
taacattttcctcctaaccataatcatgaatggggtccttactctttaaaatatacatgcctgggttcaaatttcaagatataaaaagcaagaaaaaaaatatcaaagtatcattgggtaaaattatgattaaataggattaaataggtttgaatcacattagcttattcttgcataatataaactatcttacagaaaaatcgttaaattattgaagtgcttacattgataaaccatgcattttcacaaaattaaaatgtgaaagtaattcttctcttaaaatgtttcatttcaccagacactcaaaatactctatgaaaaactaagtttacatttctgtattttcatatactcccattcatattagtttgtaagtaggaataaaaagaaaaatgagttctaaataaatgacacaggaggcaataaattgacacatgacaagtaaataaaaggctaaagcactccaataccattgaaactgttttaatgttgttgcaactccaaaatgcaacaatcatcagcttgtaaaagacccaaatttcaaaaattcattttaattactcctttatacctattttacaaaataaaggtaagacacatttaaatcctccttgtcctaattggctatgttcctaacttgttttctatcactacagtgaatgctgcaatactgatataagaaaaaataaaataaaatagtaacctctgcttcaatgtacagtttccagaatctgccagaactggggaactgggcaacaaggcgttcataagtcttccgtgctttgtctataggttgattctgtgcctctcgaatgagaatgctccaagcatcaaggtcatatggattctcttctaatttcttttccgctttcttcaccttctctgggacatactcagctgcctgctccgtggctccgtctcctgacatggcctcagctgattacaacgtgcgcactgaccgtcgatgggaagctagaaaagaaaaattaaactaaaaaccacccccaaatcagtaaagttaccccctgcccagctgagccagaccgccaacaccaatcgccaccccaa

SEQ ID NO: 480386 - DNA, 829 bp, Homo Sapiens
  misc_feature (143)..(207): n is a, c, g, or t
  misc_feature (655)..(664): n is a, c, g, or t
  misc_feature (666)..(783): n is a, c, g, or t
ccaaagataatatcctttattctgctcattttctaggcgttcacagattcccctccgtattgtttgattacaaattctactagcaaatgacacctgccacagtggaactgcttagcatcctttactagtaggattatagctcnnnnnnnnnnnnnnnnnnnnnnnnnnnnnnnnnnnnnnnnnnnnnnnnnnnnnnnnnnnnnnnnncttctgctatgatataaatggggttccactgtgtggcctaatacgggcagcaacaactctgatgacctggaagaactcagccctctcactcttgtctttaggtggcagcttggcaggccccagtgactttctctaaggaccctgaagcaagcttttctcctaaagtaattgtactcgttgatttttttatgtgctgcaaatattttcttccatatctgtcatttgtgttttaaccttgatgttttccatcacacagagactttcgatattttttggttgcgaaatctgcttatcttttcccttattatatcttttaagtctcatgttaaagtttagaaaagaccgtcccacaccagaggtataaaaatttttgagtaattttgtggtatatcttccctctggaactaatttgtatggacactgtgaggtagagatctaacttagtggnnnnnnnnnngnnnnnnnnnnnnnnnnnnnnnnnnnnnnnnnnnnnnnnnnnnnnnnnnnnnnnnnnnnnnnnnnnnnnnnnnnnnnnnnnnnnnnnnnnnnnnnnnnnnnnnnnnnnnnnnnnnnnnnccctgccaccatcccacaaatcagtacataggccaagtgcccccaa

SEQ ID NO: 480387 - DNA, 773 bp, Homo Sapiens
  misc_feature (564)..(595): n is a, c, g, or t
gagtttctccctcagtcctgggtccaggtagagccgtgtgtagaacagctggtcgtcgtcatcatccttgtacttccactggcgcacgatttggtggatggtggtggcaaaaccgatgaatccaccagaattgaggaagcgcttccccgtgcccacctcagggtactgctccgccagcccccactcgggccagcagaagctctctgcagagaagagcaggcggctgccactctggacgaacttcttcagcagctctgtggggctgccggccagaatcacgtcgtagctatccacaaacatgatgatcatatcctcccggtcagcgtatttctccatttccttctttaaccaccggaccttctgtcctccaccaactgttcgagccacatcaccccctcgccactcctctcccaggcccagggtccagcacagtgtagttgaagaactccgcagagcgcaggaaacgcaggtacccctcggtttcagctgtggccacagtgatcaccagcagcttctctgggttgaccgggtctcggccccggggccggtcggaggctgaggccnnnnnnnnnnnnnnnnnnnnnnnnnnnnnnnngaaccggggtccaggccccgaggaggtcatggtggggagcgggcccagacagcacccaggatcctgggatctccgctacgcgcctggatcccagctccggaggggagctctggaaagggggcgctcgggctgctgtgcggccgccgcggggagcagcttggctggggctacgccccaa

SEQ ID NO: 480388 - DNA, 1131 bp, Homo Sapiens
cttttcgtggtttcagaggagcagcctttctcatcctgcgctgtcatccgcttgtctccggtgtactaatgagtcacctgggaagtagtaagtgcgtcctcatagcaggtcgggtctttcacagggttttccgtgtcctctttcaacggtgtccccatagcggtcccccacgctcaggcttcggaagaccccctggcgtggcccaggccgccagccgcccaagcgagagctgtctcaggctgaagggcaaggcggggcccgctggccgggcgggggcagcgagttgctgctgacagagcgctgcagcgctggcagcctctgaggtaggcgcccgagcccgcgcccatgaccacggcctccgagtagctgggcacacagctgccggttggagcagatgtgccactcgagctcagtgaagtccactgtggccacgcgggacagcgggggcccgctgggcacggcccccggcgggggcgagcatggcgccaaagagcttctccacctggtagtgcacgtgagccgtgccataggcggccacgacgtgcaggggccacagacagcgtggccgccgacacgagccagaagacccaggcgcagcgcgtacacagggcgggctgcagggggtcggcgaagaccatgagcgactcgcggaagtctacgtccttcaggtgcatgccctcgcgcgcctccagatagtcgtccaggcccttgttggcgctgaagaagcgcgcccgctgcgtggggtacgaggcctcggcctccgcgctgccgaagctgaagcacttggtgaagcgcagccgcgtggccgcgtgctccgccagccccaccagctccttggagacgtcgcggacgccgtgcgccgagtagtcaaactcgccgcgggccgtgcggctgtcagcgcgctcatggtacacctgcgtggtggtgtaggcgtcgccgttgcggtagcgcgtgatctggcgtgtgcgccgcacgtagtgatagctggtggccttccaccagacgcacggcggcgcctgctgcagccggcggatcagcgccagcaccgtgtgggcgtcggtgcgtggcgcctggcaggaccgcacgtgacagtgccagcactcagccaggtagaggaggtagaggagccaa

SEQ ID NO: 480389 - DNA, 618 bp, Homo Sapiens
  misc_feature (47)..(73): n is a, c, g, or t
  misc_feature (123)..(214): n is a, c, g, or t
tcctgaatagctgggactacaggcatctgccaccacgcctggctaannnnnnnnnnnnnnnnnnnnnnnnnnnaagtaaagatgaggtttcaccatgttagccgggatggtctggatctcctnnnnnnnnnnnnnnnnnnnnnnnnnnnnnnnnnnnnnnnnnnnnnnnnnnnnnnnnnnnnnnnnnnnnnnnnnnnnnnnnnnnnnnnnnnnngtgtgagccaccacacccggccctcagaattatttagagttagaattcttagtctactagtcaagtttcaatcaagagacactgtatcagttatttcaagagagaatttaatataaataattgttatccagctagtacgagatttacaaaacaagtcagtgatactgcagatatcatgaagatctggacctgcaagcctcccagcccaaggactcataacaacaaagaaacagcacggttgaaaactatcaaacactcagaaatatgaaggtggcccctagggctggggggtaaggcctctgaaggaaggaggcactattaaaggcaacacgttggcacaagggtctcaacgccaacggtccaagaactggacgcagacatccggcagcggggccctggccgac

SEQ ID NO: 480390 - DNA, 855 bp, Homo Sapiens
taatctcgccgtgatcagcgagaagtgtcttctgcacggggtcaaacaccagtgagtaaaaaaagcagtcctccttttccaggtactggctcaagatatctgtctcattcaagagggtcacactgcatttcccccgtatgtgggtggctggtaatgattcaaattgccgagaaagaaaaagttcccggtgcttcagttgatggcgctgctgctcagacacccctggctgctttgattcctcttcaaactccctggcattactatcagccaggctgttgaggctactagaaatgtccctgcgccggaaaagacagacaacctttgcctccacatttccatttgcagtcttgttgagctcctcaatccgtctaaccaggtaaggattgctggaagagttctcaaaatagacgtaatctcccacccggtacatgttggccgccatggccgttcccgccgccgcctccggccgcacaaaggggtccgggaggctcgcgggggcagggctcggctcgaggcaaagccccgaacggtgggctgccgcttcgagggagtctcactggggcccgcgcagccggcacctccgctgcctcagccgtcgcggttcatcccggcccgcgctgtcgccgccgcagctatcgcctcactcccgggacgctgaggctggcccccgtccgctcggcttcttccaggaacgagctcggctcctgccaggccagagccaggctccagctacccccgcccccgcggagtcaccactagtcgttgggctctgcacaggccagcagggaaggcttgccgggcccagcactcagggttcgcctccttccggaacaccttcggccgatccggagccaa

SEQ ID NO: 480391 - DNA, 849 bp, Homo Sapiens
  misc_feature (593)..(613): n is a, c, g, or t
gaggtgacgcgctgcgggctgctcatctcgccctggttcacagtgatggcagggacggggctgggcacggagctctccagttcatccaagagactctccacactgggccgcacgtcctccaggccccggccccccattccgcttaggcttctctttcgtcaggggcccagctttgcctcccaaggggctgttagtctctgggacaccatagagggggctcagggccccaggaagcggggggcttgagttggcctcatctgcagggaagcctggcgggttatgctgtacagcgttcagttccagcagcaggcggtcgagttcagaaaggttgctgcccagggacgtgctcattacggtgggtgaaggctcagctgatttctgcttgttggggaagctgtagacgtgctcctcctcacccactcgggagcacggagagccaacactgtcctgagggttggagacactggaagttttggcactggagccgtacacaggtgatgaggactgaggctgctggtggatgaatcgggagctgctgggctgccactggtctaaggggtcaaggattgtgccattgagggcctcgctggacnnnnnnnnnnnnnnnnnnnnnggcacggcaatctcctggtatgtgtggtttccagttgggtatgagtagggggtctcctccgacaagaacacaggccgtttggagatgtgggaggtggtagactccaagtccgccagcagggcgtcgaggtcgtccatggccggaccacgggcgccggctcagggtcgcgctagctgcccgtcccggggccgctcgtctatgccccgcaacttttccgccgcgagcctcggccccaa

SEQ ID NO: 480392 - DNA, 1279 bp, Homo Sapiens
  misc_feature (154)..(377): n is a, c, g, or t
  misc_feature (578)..(633): n is a, c, g, or t
ttggcccttctcccatccccctctcccaggctccctcccttcgccgtccgctttcctgtgcgagtcgccggacgcaccgcccagcccgtccgcagccccgcgccgggtcggggcctcgggccgggccatttcggagggaccgcggcttcggggnnnnnnnnnnnnnnnnnnnnnnnnnnnnnnnnnnnnnnnnnnnnnnnnnnnnnnnnnnnnnnnnnnnnnnnnnnnnnnnnnnnnnnnnnnnnnnnnnnnnnnnnnnnnnnnnnnnnnnnnnnnnnnnnnnnnnnnnnnnnnnnnnnnnnnnnnnnnnnnnnnnnnnnnnnnnnnnnnnnnnnnnnnnnnnnnnnnnnnnnnnnnnnnnnnnnnnnnnnnnnnnncgagcccggggaggtggggagcagaacggggatcggggtttgctccgggggccggcgggcgattggggccagggtcccccaccacctcctccctatggccgcctcttagccaacagcaatgcccatccaggccccttccctccctctattggggcccagtccaccgcccacccaccagtctcaacacatcaccatcaccannnnnnnnnnnnnnnnnnnnnnnnnnnnnnnnnnnnnnnnnnnnnnnnnnnnnnnnctcacggaaactctgggccccctcctcctggagcatttcccacccactgcgcagggcggctagctcccaccacgcacaccctctacgccatgtctcccatcccctggcggtctctgaggccctacccaccacggaccagacacacctgaccaccaacctcacagccaggtgtcctacagccaacgccacgccccaactggcccatccacgaactctctcctcttccaactcttcctcttccacttactcaagggctccctacccatgtccacacccctccccattacccagacggcaccacaaggggaccgccccataacactaacccaaccggaagaccctacagccaaccaaactactatcccgactacacacttacccaccggcccataagcccaccgacgaccctaccccatcggcccagcacgagactaccacaaccggaccctccccccaaccctgcgcgcccccaacacgcacacgcgaccaccgcaaagaggaccccccggctcccacacacggggagacacataccacaacgagaccgacccaccaccacacccggacactccacaacccaccaacgagcccgaccctcccctccacataccacacacgggggacaaccacaaacagccgaccatcg

SEQ ID NO: 480393 - DNA, 1339 bp, Homo Sapiens
  misc_feature (762)..(771): n is a, c, g, or t
  misc_feature (992)..(992): n is a, c, g, or t
  misc_feature (1086)..(1086): n is a, c, g, or t
  misc_feature (1088)..(1089): n is a, c, g, or t
  misc_feature (1141)..(1141): n is a, c, g, or t
agcgtggagagggagaaggctctcgggcggagagaggtcctgcccagctgttggcgaggagtttcctgtttcccccgcagcgctgagttgaagttgagtgagtcactcgcgcgcacggagcgacgacacccccgcgcgtgcacccgctcgggacaggagccggactcctgtgcagcttccctcggccgccgggggcctccccgcgcctcgccggcctccaggccccctcctggctggcgagctgggcgccacatctggccggcacatctgcgctgccggcccggcgcggggtccggagagggcgcggcgcggaggcgcagccaggggtccgggaaggcgccgtccgctgcgctgggggctcggtctatgacgagcagcggggtctgccatgggtcgggggctgctcaggggcctgtggccgctgcacatcgtcctgtggacgcgtatcgccagcacgatcccaccgcacgttcagaagtcggttaataacgacatgatagtcactgacaacaacggtgcagtcaagtttccacaactgtgtaaattttgtgatgtgagattttccacctgtgacaaccagaaatcctgcatgagcaactgcagcatcacctccatctgtgagaagccacaggaagtctgtgtggctgtatggagaaagaatgacgagaacataacactagagacagtttgccatgaccccaagctcccctaccatgactttattctggaagatgctgcttctccaaagtgcattatgaaggnnnnnnnnnngcctggtgagactttcttcatgtgttcctgtagctctgatgagtgcaatgacaacatcatcttctcagaagaatataacaccagcaatcctgacttgttgctagtcatatttcaagtgacaggcatcagcctcctgccaccactgggagttgccatatctgtcatcatcatcttctactgctaccgcgttaaccggcagcagaagctgagttcaaccctgngaaaccggcaagacgcggaagctcatggagttcagcgagcactgtgccatcatcctggaagatgaccgctctgacatcagctccacgtgtgccnanncacatcacccacacacagagctgctgcccattgagctgaacaccctggtggnggaaaggtcgctttgctgaagcctataaggccagctgaaacaaaacctttaaaacaatttgaaaagtgggcagccaaaaatcttccccatagaggagaatggccctttggaaaaacaaaaaaggaaattctttccaaaaatttattttggaagggtgggaaacaattctccccttttccttaaccttttaagagaccc

SEQ ID NO: 480394 - DNA, 1341 bp, Homo Sapiens
  misc_feature (511)..(511): n is a, c, g, or t
taatgaccccttcccaggcatactttgccctctcactcacgggtacttgggagcaagggtgtgcagaggcgctggcgggcacgggtaggattaggtccacaggggggcatgcacagcccccaggtactccactctgaccatgatcctttcaaggggcagtgctggatgctgtagcagtgccggatatcctgctgttgcccggcacatcgatgtccgtcaaacttgcggcccctgcaggtcctcccgcgtgactgctggcccgggatttcttgacagctgatggacttcatgttccgtcggatacaggggctccactccccccacgagtcccactccccatccacagggcagggcacagctgtgttgcagatgtgggtccgggtggcatcgccagcacagaaggggcccccatgctggggcacagggtgattgcacgtccgttgttccatggtctggcccaggccacaggtcacagggcagggtggcaggccggtgcacctcccgctgcttncgtaggctagccccgggcagggctttcccaggagggtttctgggagggctcaggtgcagaacacttgcggctttcgtgtctccttaggttcgtggggtccaccgtggcaaggaggctgagcagggggtccaggggcccccaggtggccccaggccccgtgtgtggggcagacctgctgggtgtcacaggcctctgattcctgtgcctgtcctgggcagtggcccccacacttgggagcagggtgattacaggctcgcctgcgggtccgggtccctttggagcaggtgacagagcaaggctcccagggcccccagccagaccagccgcccatctcaggacagcactgctggtcctcacaggcctggagctgccactccagggtcccaggtgccacctttccagagcactgcccattccagcccacacagcgccggtaccgcagctgggagccctcagagcacgtcaccgaacagggggcccatgtggaccacagggaccatcgtggggacctgcaaggctgacagagcccaccactacgtttctggtaggcaaaggcagtgttgagacagcagtcttccacgctgacaccaccccccaggaggcccttgcacttgccggaggattcttcatactgggtgaagcagagcacggggtctgagcctgtggctggcagggtgagcagcaggagcagcggcggcagcaacaatcgaggggcctgcgctccctctgtgatcatgttgagtactgccccctgcacctctaccagagaggaggtcccgctttatctgggttgataggctccatcccaggaattccggaccggtccagcc

SEQ ID NO: 480395 - DNA, 1047 bp, Homo Sapiens
  misc_feature (49)..(67): n is a, c, g, or t
cttgacatattagtcccccgccaattctgttgaggcccggaaccccccnnnnnnnnnnnnnnnnnnnccaatgaccaaggttacttttcctggcaagattcaccccaagtgtgttctttcctggcgggtttcccaggggccttccagaatcaaaattaagcccggagtgaaccgtagggtgaagatggcatgaggccctgctactgacgtcggttcttcccagtcgctgcggtggtccggttgatattgcccgcatccataagttcttctacgtccccataattctgtactaaatgtttgggataaatcctcaacataagggctttctttgggatgctcacggactctcaaattgaaggttttagatgacttccgccgaagtagatctctcacacgttcgttataaatttctaagtagctgacttcagttcgaaaagaagcttcatcccatctggtggtttcatttatccgactgaagagtccttcacagatccgaggtattaagccagaatctccagaatttcccatcatagtgtatgactttccagatccagtttgcccatatgcaaagacacaagcattataaccttcaaatgcagacttcacgacatctgtgccgagggttttgaaaaccatttcttgtgaaacgtaatctgggctttttgtatcagcagaataaaaagaaaagtcataggtgaaggtcttggtccgttctcttcctgagtccccagtgcctccttctggtatctttaagtttgtgattgtcgttttgcttttctccatctgaataatgaacttggcctccaagtccttttccctgcgattcatgggccggaccctcacggccaccttgaccgatgccatcgctcatcccgaaccagcccgcgcggggtcccactagcccagaactccgcggtcgccggcgacgctggctactcagatcgcggctcccgcccacttccctctcgcccccgcccctctgctcccggccggacctggagttccgcggcggccccacctgccatcccgggaattccggaccggtcc

SEQ ID NO: 480396 - DNA, 436 bp, Homo Sapiens
tatagccaacatgtctttcttttgacttctactttggtatcttttcttaaatggttccctctgtccccccgacacacacagaatgggggagaggctgtcagattctgagctccagaacctcaggtgtagcactgggattgggggtgggggctcaggaaccacctaggggagaagacagggtgggaagaaacaggaaggaaggtccccaaaattatgtttgtttgcagaggccagccaggctgcaggggagtgtggactcagtcgaaccatagggccccaggaccactagcttctggccagcagtcatgccctccacagagctgggtccgtggaaattgcatgtaggagacacaccagacttcccaggacagagcccttttgggatggccagcactacccagcctccactggtgagggaggtcaggggctgtgccaa

SEQ ID NO: 480397 - DNA, 904 bp, Homo Sapiens
tcttcatggttcttctgggaatcctgcagctgcagggcaagggcgagcattttctccccgaattgctagaacctcttgtgaaagctgctccagcttcttcaacaactccttgatcttggcttccttgtctcggcaagccccaatgagatgctccatcttctctttcagcagctctgccggttttctcaaactgctcggagcgcccccgcatctcgctggcctggcgctcttgttcggctgcctgagcggccaggtccccgctccggcggcgctcctcggccaccgcctcccgcagccgacccacttcccggcaggcggtattatacttttccagcagagcctttagctcctggccccaagcctgagcctgggccaccagcgaaccccgagttttctcgtgttgccgtaggctggctgcctcccgggcccttagctcagccacttcctctgtggcttggtagagcagctgcttcagctttccgatctcctggctcttcccgctcatcgtggcctgaactgcccgcagctcttcctccagcttccccaggtcttgctccagagcggccacttggggggatgctggggcctttaaggaggtgcctggctccctacacggggacaaggacccccgcaactgctggttttcttcttgcagccgagccagcacctgctgggcctcccggtgccgatccaccagggtgctgatgcaggcccgcagctcctccagggactccgctgctttgctttgtgcactcctctcgcccactaggtctgcgggcaggcagtcccacagccctcggagaccgctgctctgggaggccaggagcttccgcagcttctctgtggcctccttctccatggccagttcatttgtcagcagccccacactctgtcgcaactgctg

SEQ ID NO: 480398 - DNA, 876 bp, Homo Sapiens
ccacacatatctgacataaaccaagagtgtgggaacacttgccatatcagtgctctcattcgagttggattgcaaagtctataccggaacggcagccgtgtaataagctttgcttcctaatgcttttgcaatcgtacagattggacgagatattgtattatcactaagaggtatagtttcttagtttactcagctgatttgtcatcgataattgtccgtaccatgtcccatacatgctggaaggataattttttcagccggctgtgtgagccatttttctcttttggccactctatatgcaactaaatacgatgaccataaggctctctcattcatagttgtagagcgactgagaacttgtggcgatgactctactttgtttctttccttttgaaaatggtcttcttcatcttcctcctccaccttcactatcacgatgccttccatctcctgggtaccccctggagacaaatctgtagtatcccttgattcaggagtcattattcaggttccaggaactggctcacttgatccaaatagggtctgttttgcagggctgtcctttgtgacctaggttttatgagatcaggttttgctatcctgtatccagggacacctctgctgggggacagcgcttgccaccgccgaggctggcgcgaggaacgggggcacggacccgcttccactccgtcccgggcggtcgtggcgatggggattgcaggacacagccatgcacgtcccccctctgtccccgcccggagaagtctgggatgctgggatagaaggggttgtgactttggggaccaggagcactagactcacatccaagccccctggccttcagagcccagggaaagcgtcccaacttttttgtac

SEQ ID NO: 480399 - DNA, 1072 bp, Homo Sapiens
  misc_feature (128)..(153): n is a, c, g, or t
gggggccctcccccggggccgggggtttttcccttcggctttttcccctggtcatgcgggttgcccccctccttggttgtcccccggtacccacactgcccccgttctgccttggctccaaaatcccnnnnnnnnnnnnnnnnnnnnnnnnnngttgaaggagcctcctccctttgctgcccctttccctaacctggcttcctttcatctctccggatactgtgctttttctcgaaatgtgtctagttacttttctcttccctggtactttctcggcttcttcttccactcttactgtctctgaaaatctctaaccatcttttactttgccatttttttattgttttgcctcattctttcttgtctcaggttttctactgctctctctgtccctcgatccctttggcccacacattcacaggacggtttggtgtaagacgcctgcatcctggaggaagcgcattttccagggggtggaggagggcaggcaagaacatcgggtgtcacaggacaggccttgagcacctccccagcgcgggctcaggggaggcctggggagcagcggggcccggcacgaggaggagggaggtggggggcgacagcgccttcagacaggggtggggtctgcaggatcccaggaccaggcagaggacgcagggctccccgggactgcggctgcagctgctgcgctgcgctccaggggccgacgagggcgaggctgggaggcacccaggacgggaatacacctcttgggtgaagactttaaaaagcccggggatgggggagggggtcaggaaaaggttttaagcgggaggaagaagcaaaaggccggggacggggagcagcctcaaagcgacttcaacccaaagggaagcgactccggacccacactgcgaggcctgtattcacctggggtggagtgtgcggggattttaagggccgtatcgaccctggacatcggctgtggaaatgggaaacagggagcgctaggtttaatctacacagagggtcactcacgctcgacgccgtcaccttcacccaacgcgatccgtttccggatcccgggaattcc

SEQ ID NO: 480400 - DNA, 1167 bp, Homo Sapiens
  misc_feature (744)..(827): n is a, c, g, or t
  misc_feature (1012)..(1093): n is a, c, g, or t
gaccctcacagactggccaaactcgacgcagacaaactcgatgtgtggcaggtcagggagggggagcctttccaggtctgcgtctcctgcactcaggtctggcgccccacctccccaagggtgagccgcaggtgtcaagtggggctggggtctctggttctggctctggagtggaaattcccagaagcagccttaaaaggagccgcctccctccagggggcaggggtgggcttggcttggagcagctgattgcccgggaaggaggggttaaggctgtcctgatcggcagcaaatactgggcgcaacaggttgggggtcagaggtgggttggcaggtacagatggagatctaggaagaatcccaatggagagttgcaaaagctagcctgagacagacacttggagaagagctgggtgtcctggcctaagcccctttttccttgggcctctgtagttccatcgtgagaaaatgaggacagtaatgcctcagggtgttggggggtcaagtgtgaaatcagcacatagcagacttcaagatgtctgtgttctgagacccagctccactcaccattctgcatccccttccttccagtgcctgtccctagagcctctctgagctaggagcaggctcggagtcccctccctgtgtcccatgtccctgagcagctgcctgggatgaagtgcctaccagcctcttcccatgacctccggtctcatactgctcggtacaatgccagcgactagnnnnnnnnnnnnnnnnnnnnnnnnnnnnnnnnnnnnnnnnnnnnnnnnnnnnnnnnnnnnnnnnnnnnnnnnnnnnnnnnnnnnggaaaagtccatgcttcttctgttctgcatggattgagttgccaccctgcagatccagccccaaacctgcttcattgtagggatacagaagccttcctgggttttcaggattaaaggtggaatccgaggtcctggagaccggtgaacagagagctccatgctgttccctccctttgcaaattttnnnnnnnnnnnnnnnnnnnnnnnnnnnnnnnnnnnnnnnnnnnnnnnnnnnnnnnnnnnnnnnnnnnnnnnnnnnnnnnnnnttatttcctcttcctccttgtccagcttttttttcttagccacgctcgcctgcttctggggcaccagccttttg

SEQ ID NO: 480401 - DNA, 933 bp, Homo Sapiens
cctcatatttcaatttattcagtaaggggaggtcaaaaatgaaggcttttttcccttctaccatattcgctaaatttatgtttaaacctgatatatattttataacactatttaagttatggctttttctaaaccagtgctttttaaggtaatagttataaatacaactgttttgagaaaataggaaataaacactttcacttgctggtttctagttcattattccctttgtcattaagatgataatgctagacaaattaatgtttagacataaacagcctacacaattttgacatttttcataatattgagagatgtttcagtattatataatctttaaatctattacttatacacatgtatacatcttatcccaatacatttaaaaacctaaatgggacaaatactgggtcattattcctccaaaggtgagctggtattatgaagaggctttgatttctttctctttatcaggatattcttccacctctgaggagaacattaactcttcactaagatccatgcctggcctataagacaaaaatagccaagataatccaaccagaagagccaccacgagattcaccacaatccatggctggagaatctgttcctcaattcctgcttcccagaggctaccattaacagaagaaggtgtgtaaaggtggattctgtcacttgtcatttgctgactcagagatagtataagagcagtaaagtacaagaaagatgctaaagctgtaggatccagggcctaaaaatttcggattgctactgatattttagcaaagtcaatcctgtcaacagctgaaattgtactcagagccaaaagcaagtacagaagactctggaatggatacgctagggtcttgtattgttgcagaaggtttgagaggttggatagctgatctcctgctagaacatatatcacaa

SEQ ID NO: 480402 - DNA, 1050 bp, Homo Sapiens
  misc_feature (51)..(59): n is a, c, g, or t
  misc_feature (122)..(122): n is a, c, g, or t
  misc_feature (162)..(312): n is a, c, g, or t
  misc_feature (350)..(362): n is a, c, g, or t
  misc_feature (379)..(469): n is a, c, g, or t
cgggggatgataagatgaattggggacagaacagggggattaaagaatgannnnnnnnnaaaataggtgatggaaaggataaatggcggatttgcgggcgggagaggtcagtcagatgatangtggggtgaacgcttacggcgataggagcgggtcaaacannnnnnnnnnnnnnnnnnnnnnnnnnnnnnnnnnnnnnnnnnnnnnnnnnnnnnnnnnnnnnnnnnnnnnnnnnnnnnnnnnnnnnnnnnnnnnnnnnnnnnnnnnnnnnnnnnnnnnnnnnnnnnnnnnnnnnnnnnnnnnnnnnnnnnnggggggaggcggtaagacagggggagatacaagaggannnnnnnnnnnnnataccgaaataatcagnnnnnnnnnnnnnnnnnnnnnnnnnnnnnnnnnnnnnnnnnnnnnnnnnnnnnnnnnnnnnnnnnnnnnnnnnnnnnnnnnnnnnnnnnnntagtgctgggttgcgagaagggggaaaggcgtacgggcatggaggggagccgcaaatgccaaacgaggtcctcccgcccacccacccccaaaccgtctcagcgtcctgcggccccgggtagggggagggcgagctggttgtgcttccttgtggcggagggggccccccactccgcgggtgggtcgcgggggggacttgagcacccactcggagttgccccgggccccggcgttctggcaccgtctctcgctcctggttcccgtggctggcactgccaaggcatcggggggcccccggcctagggcacggggggcgcagtcctgtccgcccccccataggggaggaggtgggccaagtctgtgcccggccgggcgtggcagccgcggtggcggtccccaggccgggcctcgccgctgttgaacgtgtgggtgcggcgcagggtggcggccggaggggcgtgggggcccagtggcctcctcaggctgcccgtcgggggcgggctccagggccgcgggaggccatcggcggctgaggctgggtccaaggggcccgtgggcgcggacaccacccgccggcggaac

SEQ ID NO: 480403 - DNA, 1071 bp, Homo Sapiens
  misc_feature (916)..(956): n is a, c, g, or t
tgtaaaagttttgtgggggccccttaacgataaaaccccgtttctgctttaaagttcattgggaaagagctagcggaagattgaaaggttcccccaaaggggttaggattcccccaaggccaattggattttaggtgaccatagaaattaaatgcccaagggttttcttattggccatttgtcaaattgccacaacaactttttggtcatatccacattgctcattgcattaaacccataagcggactcagccacctagcttaacaaggtatcactggagcaaccaacacgggtctgcatatttgtaacattgtataataaccacaaaaccaatgcatagtaaacacaactctactgaaacaaaagccgtcgctttatttacaaagtcacaaaatgaagtataaatacttctgtcattaatgtttaggaaaaccatttacaaaattttcaaatatgtacacgtagcttgaaaaatcaccagctttccattttgtcacaggtagagagagggataagcatgggctgacaacaccactcaaattgtaacgggagacaactgcgggtatggatcgacaccacttcctagagtgatgtcaccatgggggtttctatgggcatcctgctcagatttaaagtgccccagcatcctgggtgacttgcccagaattctgggctgtggcattttgagcagcagcatgctgttccaaaatgtcgtcgatcagcctcaagttgcacacccagtcttcatctgggctcacacaggagcctttcaagagagcttcaatgaaatctacctcattgcagtcaggtgacgaaatcagatcatttagtgggggttggggctggcgcaaaaagtcggcaggtggcagctcagggggaatatccgttctgtcgaacggacctgggaactggctgnnnnnnnnnnnnnnnnnnnnnnnnnnnnnnnnnnnnnnnnncacatagcttggtggctcgatgccctgtatggggctcaggggactaaagctggccataccctgctggaggaacttggtggtgtttgctacaggcaccgggcccatcccgagaatt

SEQ ID NO: 480404 - DNA, 956 bp, Homo Sapiens
ttggggctcagcgggacatgtggtgctccacgctgcagtcctgtctgaaggagcagcgcctcctgggccacccccggcccccacaaccaccccgacccctccgcacgggcatgctggagctgcgtggacacaaggccaaggtgtttgctgccttgagccctggagagctggcactgtacaagagtgagcaggccttctctctgggcatcgggatctgcttcatcgaactgcagggctgcagcgtccgggagaccaagagtcgaagctttgacctgctcacaccccatcgctgcttcagcttcacagccgagtctgggggtgctcggcagagctgggcggccgctctgcaggaagcagtaaccgagaccctgtctgactacgaggtggctgagaagatctggtctaatcgggccaaccggcagtgtgcggactgtgggtcctcccgcccagattgggctgctgtcaatttgggggtggtcatctgcaagcagtgtgcaggtcagcaccgggccctgggttctgggatctccaaggtgcagagcctgaagctggacacgagtgtctggagtaatgagatagtacagttattcattgtcctgggaaatgatcgtgccaaccgcttctgggcagggaccctacccccaggtgagggactacatccagatgcgacccctggcccccggggagagttcatctcccgaaagtaccgtctgggtctcttccggaagccccaccctcagtacccagatcatagccagcttctccaggcactgtgtgcagctgtggcaagacccaacctgctgaagaacatgacccaagctcctctgtgttgaggccattgaagacgaggaggcatggttcccaccagctcctgatgacaactgaccaggcctcttgccctcagacaccctccactggtgtgtacaatgagtgtgagtgcgtgtacttacaccgca

SEQ ID NO: 480405 - DNA, 887 bp, Homo Sapiens
  misc_feature (417)..(480): n is a, c, g, or t
  misc_feature (535)..(555): n is a, c, g, or t
  misc_feature (825)..(826): n is a, c, g, or t
ggaattcccgggatcaggtggaagggctctgagggagactggaattttctggcctggagaaggacccgcccgcccgcccctatgaccaacatgagctggagcttcctgacgcggctgctggaggagatccacaaccactccaccttcgtgggcaaggtgtggctcacggtgctggtggtcttccgcatcgtgctgacggctgtgggcggcgaggccatctactcggacgagcaggccaagttcacttgcaacacgcggcagccaggctgcgacaacgtctgctatgacgccttcgcgcccctgtcgcacgtgcgcttctgggtcttccagattgtggtcatctccacgccctcggtcctgtacctgggctacgccgtgcaccgcctggcccgtgcgtctgagcaggagcggcgccgnnnnnnnnnnnnnnnnnnnnnnnnnnnnnnnnnnnnnnnnnnnnnnnnnnnnnnnnnnnnnnnnggctggcctgagcccgccgacctgggcgaggaggagcccatgctgggcctgggcnnnnnnnnnnnnnnnnnnnnnacgggggcagccgagggcgccggcgaggaagcggaggaggcaggcgcggaggaggcgtgcactaaggcggtcggcgctgacggcaaggcggcagggaccccgggcccgaccgggcaacacgatgggcggaggcgcatccagcgggagggcctgatgcgcgtgtacgtggcccagctggtggccagggcagctttcgaggtggcctttcctgggggggcagtacctgctgaacgggcttcgaaggggcgaaccgtttctttcccttgcaanncgccaacccctggcccggcaacgtgggtgggaactgctttcctggatccccgccctacttg

SEQ ID NO: 480406 - DNA, 841 bp, Homo Sapiens
ttgggaggtggtgtagaccttgctaaccaggacggcccagtaggcagagctcatttttattcctgtctgcaatcgtgcaaaaacgcctcttatggaaaagccagagcgccaggagtcagcaaaacacactaaagattgggcagtcactggggagaacgtgagtaaaagcacaggaacagcaaagcgttcaggaacgttcgaggctgacgcaaccggcgcaggaaggtggtgtgtggtgggagagtgggaggagacagtggaaagtttagacttgcttctgtaagtgataagaagtcatcagatattttcaagcaggagaggaaaataatctctctgtttcgcaaagttaactctcatggcaacagagcagagtagcggggggatgggggctgggagatgttgggaagctattgttaccactctggtgaagagtcatgggacctcaaaagctgggatagtcacggtgggaatggaaaggaagggcacaagctgagaggcatttgggaggagaatcaatagcactttattgactggatgtgtgagatgagtgaggacagcaatcagaagaggactttgaggtttctagcctgagtggctggaaggacaccatttcccctacctgaaataggtagcaaaaaggagagagaaagagagaagcagagggattttgcaaagggaataggagttcagtttttgacatgtggcatttgaattgcaagaagtacatccctgtggatgtaatacccagtagacagttgggaattatgatctggtgtcgagaagaaaagtagagatgagatccaaagggtttatagtggatcgggagagaaattgatgacct

SEQ ID NO: 480407 - DNA, 1208 bp, Homo Sapiens
  misc_feature (489)..(787): n is a, c, g, or t
acccttacataagggcaactttgtacaaaaaagttggggcactgctcacttcctagacctctgctgccaccatcactgtgtgaagctttcaagagcttggtacttcccagggctaccggcagtcctctgtagtccagagaggtgagattagatcttcttggttccctgtgaggtttcaggcactaaaactctatgtggggaagggaggggttactcctcctccaatgggactcaaggacttgacctccaggagtaggcccctggtcagaagtgccatctcaccagtggtcttcattcttcctcattcattctttatcatcctgtgttctgtttagttgcaacaatctcttgtgactaatgtcactcaaagcatcttgtaaatcctagggcttcctggaagttagttgccaaagtcatgcaagcatcacctgtcattcttgtgttggagttatagaattctacatcttataaaacctaactggcatttannnnnnnnnnnnnnnnnnnnnnnnnnnnnnnnnnnnnnnnnnnnnnnnnnnnnnnnnnnnnnnnnnnnnnnnnnnnnnnnnnnnnnnnnnnnnnnnnnnnnnnnnnnnnnnnnnnnnnnnnnnnnnnnnnnnnnnnnnnnnnnnnnnnnnnnnnnnnnnnnnnnnnnnnnnnnnnnnnnnnnnnnnnnnnnnnnnnnnnnnnnnnnnnnnnnnnnnnnnnnnnnnnnnnnnnnnnnnnnnnnnnnnnnnnnnnnnnnnnnnnnnnnnnnnnnnnnnnnnnnnnnnnnnnnnnnnnnnnnataaaaaatactgtaataaaagtacttataaacatactaatcctctttcaggaccctaaagttgcaggttagtaaggtcttcaaggacaaatctgtaagtttcttatttctgtagtgcaagtaaaatttcactttttgaaactatagagagatccctttctgattagcctacagaacttaaagtgagggaaccatttcctctcacagacaaagaggcctgggatattaggactttggggtttgagagcatcatggggcagacagatggtggatggtctggacaagaagcgagtaagccactgcggttggtcatactgaagggaattggtggcaagaggatcccctggagcagtccgaaattactctcattcagtcggtcaggggcacaacctgaggacctcggctgaagggggcaaggctg

SEQ ID NO: 480408 - DNA, 895 bp, Homo Sapiens
  misc_feature (356)..(368): n is a, c, g, or t
  misc_feature (800)..(850): n is a, c, g, or t
aaaaagtgcagaaaaaattcaagtttaaagttcagtgctctttattttgctgaaacaaataaaatcccaaaagttaaagtgtaaaaataaatctttgccacaaaaaatgtacctttgggatatagcttttctaatgtcacatgagaaatgcctttaagcaaaacatacatggaagatagaactcagggtaaaactttgaactccgtggtgtcttccacatattcttcctttcctcagctgtctccccagcacccctgtaacctaaaagtatgtaacactttcagacttgtttaaaacactcacatatctacatgaaatcgcttcagaggaacctacaattaagaagttctaagccnnnnnnnnnnnnnttgcttcgttctttaaactattgtacttaattaaattgtaatatacttacacataataacatagacaagtagcagcatttttcacatccataaaaaatcaaatggagaagttagtaatagctcagtcgaatctataaccatttttttggaaacactttgtacaattgaaatgcaaagcaaaagtgttaagatgatgcaaaacttcaaatggatgtaatgtacagaatttgtcagaatataagatttcaaataactttctcagcaaatacatatggattttagtttgaaaactgaaatgaactggatatatggtacatacagaaaaaccacttcctacttacaaactactaatcatgaatacttcagtgattttagagtcaaggacaaatgcaacaaaaacaatgaggatatggagagggcacacaaaaatcnnnnnnnnnnnnnnnnnnnnnnnnnnnnnnnnnnnnnnnnnnnnnnnnnnnctgaaatcgtggcgtgctggtgacccaacttttttgtacaaagag

SEQ ID NO: 480409 - DNA, 883 bp, Homo Sapiens
agtattctcccagggagcgaccgggcggtgccccaacttcgccctatcactaaatggggcgcggcggggcgcaaacaaaggtggtcttgtaaaaggattttatcaaggcccgagggggcgccggacaaaacaacccggtaaggaggcggggtgtccggcaacgcggatttaagggggggtaggaggggggcccttcccctccattccaggccagcctgcggggttctttcaagctccccccggtaagaagcttccctcctagactccattccaccccgggtaggggtggtggccaaaaatcttcataggtggtgggaggggtgtgtgtgattcttcatccggctcattttcaccgcaccctttcttggtcttttcatcagcgctgtctccctggggggttgtttcgtccccaggcttgggagatcccaggtcaaagctcttccgcccatcgcgaactttcttctgctttttgatgtttccatctgccttcccgctgttgagccgacgcacaggactcgtcagccacttcttaagagtgttggtggagcgcttgggacccggggacctgtggatggagttcagggagggctgggcctgcaggttggctacggactcggacttgcctccattctcgcttgaggaatgagagtatgcatctctacacgggaagcaacagcagcacttagcaaagagccaccccaaagagggacctcgggtgtaagccctgtcgccgcccttcatgttgccccgccgccccagcgctcccgcatggcacggggcgccagcccggggtgagagcgcggcgggaaggaaacttcagcgccgccgcccgagagccggctcccgccctccccgctgtgctctccccgcaccgcggccgccc

SEQ ID NO: 480410 - DNA, 1467 bp, Homo Sapiens
ttgggccatgtatgccaggaacataccaggacatggaaggccagctcagttgcacaccgtgccccagcagcgacgggcttggtctgcctggtgcccgcaacgtgtcggaatgtggaggccagtgttctccaggcttcttctcggccgatggcttcaagccctgccaggcctgccccgtgggcacgtaccagcctgagcccgggcgcaccggctgcttcccctgtggagggggtttgctcaccaaacacgaaggcaccacctccttccaggactgcgaggctaaagtgcactgctcccccggccaccactacaacaccaccacccaccgctgcatccgctgccccgtcggcacctaccagcccgagtttggccagaaccactgcatcacctgtccgggcaacaccagcacagacttcgatggctccaccaacgtcacacactgcaaaaaccagcactgcggcggcgagcttggtgactacaccggctacatcgagtcccccaactaccctggcgactacccagccaacgctgaatgcgtctggcacatcgcacctcccccaaagcgcaggatcctcatcgtggtccctgagatcttcctgcccatcgaggatgagtgcggcgatgttctggtcatgaggaagagtgcctctcccacgtccatcaccacctatgagacctgccagacctacgagaggcccatcgccttcacctcccgcttccgcaagctctggatccagttcaaatccaatgaaggcaacagcggcaaaggcttccaagtgccctatgtcacctacgatgaggactaccagcaactcatagaggacatcgtgcgcgatgggcgcctgtacgcctcggagaaccaccaggaaattttgaaagacaagaagctgatcaaaggccctcttcgacgtgctggcgcatccccagaactacttcaagtacacagcccaggaatccaaggagatgttcccacggtccttcatcaaactgctgcgctccaaagtgtctcggttcctgcggccctacaaataaccggggggagcggccctggcctgggggtggcccggatccgcgcaggggggacccgccgctatgcggtcggtatttttttgggacgctcctacacgtgaatgagaaaactaactggcccctcacctccggatacccctaaactaacattggaatacacttcccagggagattgatagaccccccgacccgtaggtgtccactctctcccatttttccctagttttcttcccctaagcaaccaacacgatctttagacatatacattgcataacgttccgcctctctgaccttcgtctaaaaccccagccaatcatatgcgaccgatgttgacgtaaaaaacacggaccgctttcccccttgcaatgtcacaacaatatacgagctggtatcgttgggggcctgcgagttgccgggccgcaagttttgacaaccaca

SEQ ID NO: 480411 - DNA, 932 bp, Homo Sapiens
gggaagttccaaacccaccagacaggcacatccagtggggaaagacttcccattccagtgtggctgcatccctcactctgcttcccagtatctgctgacctcagaggagcagggtggccattgctgatctgggttagggagatgccagaaacacacccaggtttgaaccacaggttagtggtacaaagtcacagtccttgtgctttcagaaaacccagaggccccaaatacgagtgggaagagagttgggaaaaactgaaccagactcttccaatggccattaaagagaaaattcagcaacgcttgcctttgtctttgaccctgagaagttaaggggacacagattgtggcgccgtgatggaacatggagggaaggcatggtgtgcttcctgcagagatgcctctggagtccctgtggccacgggatctcactggccccctcttcaggcaccttgatggggctcagtggggccaggccgaagggtggaagtagaaaagcatcaacaggctgtccagatcaattggcaccatccaaggccctgctgcacccacacatggaggtcaccagctcagccccaggggttctttcacacacaagctccttccctaaggagtcctgtggggttccacactcagtgtgctgcccaagtcagagatttaccacagatctgtctccccctcaacctggactcaagttactgtggtgagaaacctcactgtccatggttaactgaagaaatccctccttcagaaagaacttgagtagtagatgaggtggttagacaggatctttttccctcaagctgtttggacgccacagccaggaccaactctgacagctgcgagagagagagcccctccaatgtggaacctcctacacagccccccttttgggtccctggatatgagcccccagcaggaccaccactcta

SEQ ID NO: 480412 - DNA, 804 bp, Homo Sapiens
  misc_feature (267)..(323): n is a, c, g, or t
cgagtgttggttttgtttttataaattgcgatatcaaatatatacattgggtatttttaaaaatgcggtgggtgttgtggaatatatataaggtcggggtaaatggtataaaaaggtatgtatattttttaagttcttgtacttgttttcttatatatatctattcgttttgattcagttgcgatttttaaactatttctaatttcattcatgttattaccagtatttttatgctagagaaggttttattatgatagtttatggtgnnnnnnnnnnnnnnnnnnnnnnnnnnnnnnnnnnnnnnnnnnnnnnnnnnnnnnnnnaggaaggattggtaaatgtaatgggtatatttaaggtgtatgtctagaatacgggaggtgtttatatatagtggttcgtttttgtttgagtgaaaaaagatattgaatttgaatatcgtgttggttttttggatatgttgacatttgaaatcccaattttagaattgtttttcatatgttttattttcaggaggggtgatagaagccatgttaggtgcatgggggcataccaagcccccccacgtgcacttgctcagtaactaaggctccatgactctgcaggcggcactgcccagcacgatgctgctggtggggcaccatggacagaccggctggacctggctgggtctccggtgtacagggtgggggcctgagctcatgcttgtgctacagcttcaaagacagcagcgcaggccgcgccgcgggctggagctacctgcagtggactggcaacaccacaaccctatgtttccattatccg

SEQ ID NO: 480413 - DNA, 1200 bp, Homo Sapiens
  misc_feature (1060)..(1060): n is a, c, g, or t
ttggcatatctgcagggcaaggtaccagaggacagaggcggggacagggacacttccattccagacctagcagcccagcactcagcaccatgcatgggagcaaatggctggactcctgggtggggtgggggtctcagagcaggctcccagagggcttggaggtgactccaccaggtggggacggcagctcccaggtagggtgtcatcagagtagacagcattgcttgctagggacccctggggaggctgacagggtcagtgggtttcagttggggggctcccctgctgagaacccagtaaagccggccttccattcgtctcccgtgtgcccagagcctggtctgagggccgccttgtgcatgccggcccttccaacttggcagatctcagggggaaataacacctcagcttcaccaagatactctcctcgccaaatgtcatccctacctgggggtaacacctcgtcatgcctatgattctaccgatacgttataagtatcctaatatataatgtgttaacatacaatcacatcactcgcctattacatatacctcagctatatcgaacacaaaataaacatagataaggtaaaaaatatgaattatcgcaatctacaaacaaagtaataatctcagaatgctcaggataattaaacacatacaatatttacaatcatagcctgtgtgtcctctatatgtatacgcattcacaatttcttatgaggtgggtaccatgccctcgctcctattattaccaacggcgactaagtaatattgtaaagataaagaggaatatacctggactgattcgactaccttaattgtcacctcctctttcattctccaggaacttagtcatatttaaccgcatagatagtaatattattcacaaaagaccacatacagacccacaagtatactaataggacgcaagacatctccggccacgcgaatgcagaatgtgtacacatatatatacacctgtatgaatgtatatagatgatatcatatgtataggttgaagtaagttgtattattctacagtcacgtacaaacaganatgtgtaaagcgacgactaacctacaactatccgtatgaataacacatatgtagaagaatctccatcgtccagcaacagattgcagctctctacggatgattcacaactgactcagcgtgcacgcgtacactcgcagcat

SEQ ID NO: 480414 - DNA, 1295 bp, Homo Sapiens
  misc_feature (81)..(89): n is a, c, g, or t
  misc_feature (574)..(624): n is a, c, g, or t
ccgggccctggaggggggggaaaattttgtgttggaaagggggggaaaaattaaaacccatttcctggttcacaaacaagnnnnnnnnnaaaggggggtgggattggcaaaacaaagggtttccccattccccggaagggtttttttgggaaattccccgccaaaaaaagggggaatgaagacttggggagtccaagggtttgaaaaattataggattattttgccctagtggttgggctgcatctgcctccaaataggttgtatataaaaatcacacaaaagtgaaagtataagcatgttttaggagaagataatcaatacagatttgaataattaaatttaagatgtttgtgaatatgtctaggaagtagactcgtctggagttcagtcattgtgtttcagctttgtatatatgggatcatcctaatatgtgttttaattgtaatcaagggatagatgagatttgctcaggtaaaatgtgcagagtgtgaacaggcagaaagctgtatagccctgaataacacaaacacatacagaataaaccaaggaagaatgtgggaggaagaaaaatcnnnnnnnnnnnnnnnnnnnnnnnnnnnnnnnnnnnnnnnnnnnnnnnnnnntgaggaaaaccagcagggtatagtgtcatagaaattttttaaaatgagagtatttcaaaaataaggagtgatttttacttctaaatgttaaagagagattatatgagatgaagactgaaatatggcattgtatttaacagtaaagaagattgttatgtgtgatgggaagtaaataaatagatacgaaacagttatttttaaatttgggatgtgtttgtgtgtatgtacaaacctatcatatatgaggaagtcatctttgcttccatttaaaagagtccagacatctgtttggttttcttcttgttgataaacaggaatatgctctgaaaccttattcttaagatgtgtgtattttaatcgagaagagattccttgatgattaacaacaatataagaaatattagaatatccttctttcttcagttttactcgcaggtcttctaatttagatgcctgcagtatgcacaggtatcagctggcttgaagaagagcaaccacagtcactgaaccattggagtttagcattggatcttgatctcttatgctccaggctgggggttgcttacataaggagctttggtcctggctctctgttcctcccgatgggaggagacagagagccagggcaagccccaggcttctccacattgctggggttgtcacaaccccaa

SEQ ID NO: 480415 - DNA, 1238 bp, Homo Sapiens
gggatgggaaataaaacccaagagaaaaagagtctgcactaatgtcagaaaatacattccacagtcaggcgcagaatcagaacaccaagaatgcttagattcaaattcagaaacagcatataccaccaaaaagtgcttcttttctacctcactccatggccaggctctccaggggcttgtctaaagcagagtcacttgttctcagatgccagagtagaagtagactcactctatgcaggaccacggtgatggcttccatgctgagggacaagtggaccccaaaactctgtcccttactgttgctcccgtgatctctgatggggctgccttttgccacctgggaatcacttgcacccaaggcttatgtgctgttgctgaataggtttgtattcatgggaattcagtgggacaacatccagagaggaaacaggtacatgaggaagattccactccacaagatacagaacccacttctcatcctgtgctactgacattcaggttcgagaatgtattgttgcttccaaaagtaaccctcaaatgttcgaatcacaagcaacacattgctgcaagataaaaggcacatgtctgtaagacagaggtttcgaagatagttacaaaactgtccaccagcttctgtccatagtgccttccaaagcttcataaaactggccatgaattatgcaagacacacggcaaaacacttcttcacagcatcccttgcaaatggtatgaaggaaaggctgtaccacgtcaatgccaaagactgcaaaatgcagaagataagtgcaagtcccttgttatgccaccaaaaggcagaacacagggtaagtgcaaaacacaacagcaccatgatagttgcaatcaaacgagtaggctcaaacattcgcttcagctgtttccctggtcccatgaggaagatggtactcccaattgatgcgatattaccaaaggtataaaacactgcgaagaggtgtagtcccttcctgggcacccacagcagaacagtacccagcagtgagcagagaattcctatagcaaaacacgcaatgaagccttttatcctggtactccagcttaatgaagatgcctcaacaacctcggacaggccgctccggtcctccgtgtcctgcccgctcagcaccttcttcagcttgtccattgcggcccagtccccaccagctccagctcctcagcggcagcctgttgcgctcgctaagttgacggctcttccgggtccc

SEQ ID NO: 480416 - DNA, 1306 bp, Homo Sapiens
  misc_feature (726)..(734): n is a, c, g, or t
  misc_feature (817)..(1053): n is a, c, g, or t
  misc_feature (1157)..(1172): n is a, c, g, or t
caaaacttacaaattgttcatttatccacattctcaatagaggattttccactatatttaagtatggcaggataatcacccacctgttcctcttttcagcttagaaacataacggttcattccttttattgctagagaatgtcattcctgaagattttataaacaaaggcaaatatgaaggaaaatttgtaattatgaaataagtcctttgtagtaaagaatatttcccaaatcataacagttctatttggaatgatacccacaactctacaagcatcttatccctctacaggaatgactaccttattaattaaaataaaaatttaacaaggatcaaaataaaattctttagcaatagactcctgcaaaaataaaaactaaaactagacctagtcattgccatttgatcaaacttagaacaggcttaaataacagaaccactccattaaagaggcatagaaagaaaagtttactaaaataaatgtaaaagtcttatggagatgaagatctctagaatagtcttaagtctatgactactgctatcattaatgagcaaataaatgacttgaaattattcctctgaaaaggtaaaactcatacgtattatgaaaaagactatggcacttagaaaatattcctggtaagtaaacatggttaatatagggtacatcctagcctctcgcctacttttaaattattttgagaaagatagcactagctgggagnnnnnnnnnttccttatcacctgaaggtgaaattaccacatagtcctaaaaataaatagctttgaaaagaccgtcgggtgcggtggctcatnnnnnnnnnnnnnnnnnnnnnnnnnnnnnnnnnnnnnnnnnnnnnnnnnnnnnnnnnnnnnnnnnnnnnnnnnnnnnnnnnnnnnnnnnnnnnnnnnnnnnnnnnnnnnnnnnnnnnnnnnnnnnnnnnnnnnnnnnnnnnnnnnnnnnnnnnnnnnnnnnnnnnnnnnnnnnnnnnnnnnnnnnnnnnnnnnnnnnnnnnnnnnnnnnnnnnnnnnnnnnnnnnnnnnnnnnnnnncgaaagagtgagactccatctcaaaaaaaagaccaatgaaaataatactataattgtctcatccattttcacctttagtgtctctgtagtttttttaacttacnnnnnnnnnnnnnnnnttaccaatgcaatttgagtcacatgtggacaaaattatgctttcatatgaaatgtaaaataaatcaaatataacagggctatgtgctgcagctaaaagccaagttttgcctctcagtcttttgagtatatctcc

SEQ ID NO: 480417 - DNA, 1245 bp, Homo Sapiens
  misc_feature (266)..(316): n is a, c, g, or t
ttgggccaccatgcccagcctctgattattttctaatttcctccctcagttcttctttgacccatggattatcagaagtgggttgtctgatcagcaaacatttgttttttttcctcttaatatcttcttgttgctgatttctactttaattccattgaggtcagaaaatatcctctttatgatttcaatcctcttagttttattgagactggttttatgacccaatatgttgtctgtcatggtgagtgtaccatacacagtttaannnnnnnnnnnnnnnnnnnnnnnnnnnnnnnnnnnnnnnnnnnnnnnnnnntgagattacatgctgagattacagctgtaatctgtaatttgagaggctgaggtgggaggatcatttcgagaccagcctgggcaatgtatagtgagaccatgtctctaagaaaaacaatatgtaatttgaattgttgggttaatatgttttgtaatatcgatgagattaagtggttgatagtattgttcagatcttctatgtctttactgatccttttgtttatttctatcaggtgctgagcaaaggatgttcaaatcgttcaattatgattgtggaattgtctatttcttaaattctaccagtttttgtatgaagctctaataacttatgtcttcctcaatgtattgaccattttatcattatgaaatttccctctgtctctggtaatttgggtttgaaatctactttatcttatgtgaatatagccactgcagccttcttaagcttagtgtttgcacagtatacctcttttctattaatgttactttgtgcttctgtgcctatttaaagtagtttcgtttaaacaacatatacattgagacttgcatttttatcgtgttctctctgtatcttttaataagtttaacattaaatgtaattattaataggtttctaatttacatgtttccgtgtttagataagagttattttataattgtattttaatttattggctctttagctatactgttttaataatttttttaagttggatgttctagtgattacaatatacattcttaatttttcagtctacctagagttgatgtgccacttcacataaaatgtagaaatcttgtaagtatgtacatccatttatcatacctgtcattttatgctgtagttgtcatacatattaaatctacatatttaaatattgtaagtcctgtcataagttacatttaaatgcctttaggtaatgatagtga

SEQ ID NO: 480418 - DNA, 490 bp, Homo Sapiens
ttggcggcggcgacggcagtggaaggagcgcggtggcgcgggagcggccccggggaccccgcgctgctgaccggcggcgaccgcggccggaggcgggcgcgggtctcggaggcggtcgcctcagcagcgcccccacgggcgggccccaggccgcgagaggcagcatgtggctgatcgccaggcagtatgcctcgaggccatggacgttcggagctgagcaatcgtacgagaggcacggtcattgatcggcatggatcagggaccttgcgaagcacaggacccggcgcgctcgttgaccagggtcgactagcagcacaggggaagaacgccaagagaagtcgataaccaacgatagcacatagactctgggacaatatcacggcgtgtgacaacctagagtactttgtaatcaagaacgtgcactggactcagcaacagaagagcaggaaatcgccagcggccgatgactggcgcagtacctaggaacccc

SEQ ID NO: 480419 - DNA, 1445 bp, Homo Sapiens
ttggagcgaggagaagcgcagcgacggcgtcgggagagcgcgcctagccggctcgcgagacttgacccaatgaaagaagcatatggcacttgtgaagataaatgttactcctccctttttaattggaacttctgcttaggacctgtgtatgacgtttcacctgtgatctgttctttcggtagccactgactttgagttacaggaaggtctccgaagatttgtgtcaaatgacgtcaatggccagcttgttttcttttactagtccagcagtaaagcgattgttgggctggaaacaaggtgatgaggaggagaaatgggcagaaaaggcagttgatgctttggtgaagaaactaaaaaagaaaaagggtgccatggaggaactggagaaagccttgagcagtccaggacagccgagtaaatgtgtcactattcccagatctttagatggacgcctgcaggtttctcacagaaaaggcttaccccatgttatatattgtcgtgtttggcgctggccggatttgcagagtcatcatgagctaaagccgttggatatttgtgaatttccttttggatttaagcaaaaagaagtttgtatcaacccataccactataagagagtggagagtccagtcttacctccagtattagtgcctcgtcataatgaattcaatccacaacacagccttctggttcagtttaggaaacctgagccacaatgaaccgcacatgccacaaaatgccacgtttccagattctttccaccagcccaacaacactccttttcccttatctccaaacagcccttatcccccttctcctgctagcagcacatatcccaactccccagcaagttctggaccaggaagtccatttcagctcccagctgatacgcctcctcctgcctatatgccacctgatgatcagatgggtcaagataattcccagcctatggatacaagcaataatatgattcctcagattatgcccagtatatccagcagggatgttcagcctgttgcctatgaagagcctaaacattggtgttcaatagtctactatgaattaaacaatcgtgttggagaagcttttcatgcatcttctactagtgtgttagtagatgggattcacagatccttcaaataacaaaagtagattctggcttggtgttgtctgtcacatgtttaatccgtaattcgacaaattgaaaacactagggcgacattattgcgcacaaaggtgttcatctgtcctatgttggtgggaagaaggtggtatgtcggataggcctctcagtggacaccagcatatttggtccacagtttgtgacctgtcgactttcatccatgggtttcatccccaccaacgtttttgtgaaattccccagagtttggtccttcaaatttttaacaatcagaggattgcccaatctgggccaacctgtaccc

SEQ ID NO: 480420 - DNA, 905 bp, Homo Sapiens
ttggcgagcgcctggtggccgaggacgcgcctagccccgcggcaccgccgctgtcgtccggcgggccgcgcctcccgcagggccagaagacggccgccttgccccggacccgcggcgccggcctcttggagtcggagcttcgcgacggcagcggcaagaaggtagcagtagctgatgtgcagtttggccccatgagatttcatcaagatcaacttcaggtacttttagtgtttaccaaagaagataaccaatgtaatggattctgcagggcatgtgaaaaagcagggtttaagtgtacagttaccaaggaggctcaggctgtccttgcctgtttcctggacaaacatcatgacattatcatcatagaccacagaaatcctcgacagctggatgcagaggcactgtgcaggtctatcagatcatcaaaactctcagaaaacacagttattgttggtgtagtacgcagggtggatagagaagagttgtccgtaatgcctttcatttctgctggatttacaaggaggtatgtagaaaaccccaacatcatggcctgctacaatgaactgctccagctggagtttggagagggtgcgatcacaacctgaaactcagggcttggtaactcagtattcacttgcatttagaaaacagtgaagatgcaattgaaattacaagcgaagaccgttttatacagtatgcaaatcctgcatttgaaacaacaatgggctatcagtcaggtgaattaatagggaaggagttaggagaagtgcctataaatgaaaaaaaggctgacttgctcgatactataaattcatgcatcaggatagcaaggagtggctgatggaggatgtggcaagttacgtgtcttgggacctgatctacctcgacggagcataccacttagg

SEQ ID NO: 480421 - DNA, 971 bp, Homo Sapiens
  misc_feature (850)..(916): n is a, c, g, or t
gccccgaggttcttcagcccttctgggccttccacaccaaggctgctgaacttccaggtcaccaagatgggatctgcactccatctgcctcacacaccgggctgtcccgccctcgactctgcatacagtgctgggcatttgccaggggttcaggcgggttatgatgagggatggaaggagacagcttcgtctcccgaggcctcccacgggcagggaaggtcacggctccattccccacatcacaggcctggaaacctgagccgccaggacgcacaggggcctgatgcttccaggagacagtggccacccactaataagccaggagaccaccctcttggagacgccgctgtggacagcgctgagcaaaagcccatccctgaagctgcagcctaaactgtcaccttcagcagatgagctccacccggcacagaagccaggcagggctgcaaggagcctgcaggccgcaacctgcggctcggcatggctgggggattgactcagctgtcctgaatccatacttggacagggcaccctgggagatgcagggctgaccacaggtcccagcccatcagtgtgggctgcatgactgccctgtccccagggaacagacgccaacccgtgcccaggctcacaacagtgggtagagcctaccccatgcccaggtccgcatgggggctgagcccccgtctgtgcgcagtgactgccctgtgccctaggcagtgccccaggctggcacagcaggcacaagctggtgcccatgtagggcggctcctccctgccctgctgcagccttctcttgagggcagcatcttgggttcttgtgctgactgtattttaaagcccctgtttnnnnnnnnnnnnnnnnnnnnnnnnnnnnnnnnnnnnnnnnnnnnnnnnnnnnnnnnnnnnnnnnnnnctcccaggttaaggccattctccccaacttttttgtacaaagttggccttaacag

SEQ ID NO: 480422 - DNA, 1012 bp, Homo Sapiens
cctttaaaggcaactttgtacaaaaaagttggcccgcgggtacgcatgagcggcgcaccttaagaagcgggtttatgaggaattcacgaaagtggttcagccacaggaggaaattgctactaagaaactccgactaacaaaaccaagtaaatctgcagcactccacatagatctgtgtaaagctacctccccagcagatgctttgcaatacttgctccagtttgccaggaagcctgtcgaggcggaaagcgtagagggagtagtcaggattctcttggaacattattacaaggagaatgatccatctgtgagactgaaaattgcatcattgttgggtttattatcaaagacagcaggattttcaccagactgcattatggatgatgccatcaacatcctgcagaatgaaaagtctcatcaagtcctagctcaactgctggatactttgcttgcttgcagttacttggcaatcttggctctttggagaaaagtgtcacaaaagatgcagaaggcctagctgccagagatgtccagaagattataggggattacttcagtgaccaagacccacgtgtcagaacagcagctataaaagccatgttgcagctccatgaaagaggactgaaattacaccaaacaatttataatcaggcctgtaaattactctctgatgactatgaacaagtgcgcagtgctgcagtccagcttatctgggtcgtcagtcagctctatcctgaaagcattgtcccaaattccttcttctaatgaagaaatacgcttagttgatgatgcgtttggcaaaatttgtcacatggtccgtgatggctcttgggtggttcgtgttcaggcagcaaaactgttgggctctatggagcaagtcagttctcatttcttggagcagacccttgacaagaagctgatgtcagatcctgaggaggaaacgtactgcaccatgagcgtgccaaggaactttaccgtctcaggggagttttcccgtgcatccgataaacag

SEQ ID NO: 480423 - DNA, 287 bp, Homo Sapiens
  misc_feature (226)..(241): n is a, c, g, or t
agttcaatgttggggtgggctgttctagaagaggtcgaggctggatctcacggtttttaaactgtatttttacccctttgggacccatacctgtgccctggagtctttcatgaggcacgtgggtcctctgcatcctcactctcccccctagccctggtgcagccccgggaggggtgccctgaccccgccttaaacaaccaactttcccaccgaatcccatctggcnnnnnnnnnnnnnnnntttgggtgccaagtgccctggaaacctattgtcttttggctcagcc

SEQ ID NO: 480424 - DNA, 263 bp, Homo Sapiens
aaggaagtttggaatgatctcacccagaagttgaccaatatctggagctcgagtaagattggtacagattaagattccacagatcacatcatgtttggtgcattgaatccaccggtctccatccttcccgcagtttcccttctcagtgccttctgtattcagcaatttcatagcagaactagtcagaccctgcagcctctgttaaccaagatgtattgtctctggttgtctctggttttgcactagccattgtagcagcggcc

SEQ ID NO: 480425 - DNA, 941 bp, Homo Sapiens
ttttgctgctgggaggtgttttctgctccaggaggcaggttctaactgctcctcctcggactccgatgtcatctcggactctgatgagctactgctggaatcgctgccctcatcagaggatgacgcttctccttttctctctggcaccttcttctttgtcttcctcttaccatcctcctcactctgttcactctcactgcctctccctttctcctcatcctcatcctggtcttcattgtcggactcactgctggactccccagagccgctctcactgctgctcttactgtccgattcactctcagactcagggtcactgtctgcggactccgtggggcctgactccccctctgagtccgagtagaagggtttttccttctcctttctcttctcccgatttgagcacttggtccattcgggtacctccacgtctgcgcacagatgggtctggggcttcctctggccagtctgggagctcctggtagcctgtggccttggcattaagcagttgggacagtgagcccagctggtagtggtcccggtctttgaaggatgactccaagactggagctggtttgggtgccaggaagagcttcttggcatggcggctgagggccccaccctgctcggaagggacgatgagctgccgggtgaagcgcgcccggtcgcgaatatcatagttctggtcatatttggccagactcagcacatactgggtcagcagcttggtctgtttagagttggtccaggtagagcttggctgcccaggttgatgacctgcagcttgacaatatcctcctctgctgtgaatgacttggccatttttcttaagacatcaggtgcaatcctggggacatgctcacagtactctccgatgagccacaggatgctggctcggccatgggcacctggatgttgtctgtaagctttgccaagtgttc

SEQ ID NO: 480426 - DNA, 771 bp, Homo Sapiens
  misc_feature (328)..(410): n is a, c, g, or t
tcttcttgtcttccctgggcctcccgacatgtagtctccaggagtcctcccaatgtccctggtagccagctccaccctagggctttattaaggcctgagccctcttggcagcactctgaggcccctcagggacgcaggcccctgtgcctgtctgtactctgtgcatttgccattgcaccctggctgttccaccctgatcgtgtccttccctcagtactggttgggtggggctgttgtcggcaactcaggttcacagatgctaccactgagctcagcccaggggggccaaagacggctccaggaaacagatctgtacttctccttcccnnnnnnnnnnnnnnnnnnnnnnnnnnnnnnnnnnnnnnnnnnnnnnnnnnnnnnnnnnnnnnnnnnnnnnnnnnnnnnnnnnncagcgctcttcagacactctgcctttccatgccagtcctcatgggctgggtccctgtctcggtctccaggaagggagaatatgggtcacaaggagaggaacagggatggcccttcctacaaggaggtgcctggaagccctcaaaagacctgggaacccccgggggcccctactccagccataagacccaacatgagcttccttggggattgggtggctgacctcagcaggggcagagccaggctttgggtggcctaagcttatgcagttcgaggtccctctttaagaaaacgaatacaaaatgacaagtacaaaagtagatgcagggccttgcaaaagcccaggcagtgagagacccccaa

SEQ ID NO: 480427 - DNA, 1198 bp, Homo Sapiens
ccctccagctcattcttgttgcgccccaaaactggacccccaccctcagcgcagtagcgggccttattccggccccgggttccggttgtcggtcagctcttccttcatagtcttcttcctcgtcctcccaggatccctgtcggggctgggggcgtgccgccccctgcagggtctccaagccctggcccctctgaggggtcagtctccatgtccacacatgagtctcccagctccgtgtaggcagagtttcggctgccggaggtgtcggcatcaaaagtgtcttggcgggacagtgcccgtagcgtgcctgcccggcctgggtgggtggctgctggggtaaaggcctgggggctggccccagctcccctgggtactcgtgcatgctggcgtgctccccggtggcccgttccagtggctggtccccggaagcaaggtagggtccctggaggttggagacaggggcagggctggcagccagggctgcggtagccatggtgcggttcagcagcggattgggtggcgtgctgctgggcgggtgtgtggccttccaataggcttccaagtactccgccagatgctcgcaggcatcctccaattggttctcatccaggatgatgtcaaacatttcaggggggcactgtgccagcttttccgaggccgctatttggacattgaggtgtttggactgagactttcctcgggacttgatgagcctttgaagtaccttgggagaggtgatcttgatgtaaacaatgatgggggccagcgaggtcttggacagctgggctgggtgattgatggtgtcagcatccagagcgaccaactgaagggtccgggccagctcgaagattcgctcgatttcactctgcacctcagccaggctggagcgtgtgttggagcgctcaatgatgatgtgtttgctggggttgttgagaactgagcgcttagccagggaaatatctgccgtcacacgagtgatggagatcctgccatcaaaccgatgcttcaagaagtcaaataaagctttctgcatcatgtctgtaacctcgtagcccttgagcgacggtcccaccaggatgatgggcctcatggaaggcaccacgtcataggggggcacatgctctgtcgacttctgcttctgtttggcactggcagggggtgtggggcggcgaaatgccagtcaccccaacttttttgt

SEQ ID NO: 480428 - DNA, 872 bp, Homo Sapiens
ggcatccacagtttgtgagacgttgacttcagcaaccagggtcacggaactgccaccagcaccctggactttcttgacatccacggaaacgctccccggcccaccctgcccctctctggtgagggcggacagctcctccctcatgcgctcgggaagggtttcctccagctgcccgatgacctccaccagctgctgccggggctccttggaggagatgcccttcatggaggtgtggaattcgtggggtattttaatttctttttcaatgactgtgggttcggcatgaaattcaccgcttctagcttgttctttccagtgagtggaacccaggtccccctccagagagggcgctgggacatccaagggcttcacaaccttctcgcccactgcaccgtccttctgtgtcctccttcgagtcccctgcacgatttcatcctgccaagagtacctgatggtggattcctcctcgatgtggatctgcccgtacaccgagccgtcatctctgtcgtgccccccggggtgttcatctggagtggacacaaaataactctgctcgccctctgaatcacctgcctctgtcacttcttccacgtgagtcgtgttctcctggggctgcttggtccttcgatgctgattaactgagaatgtgacatcgctttctccataaccttcctcctccttaaccaacccccaggggcctggcgacacatcttcgacctcctccactttgaatgggacggaaaactcctccggcttctccccgctgacataactcacgggctcctccacgatcatccacgttgacgacctttgctctcccctccctccctttcaggccgaggttgatgatgtctcctctgtcgggctcgggg

SEQ ID NO: 480429 - DNA, 728 bp, Homo Sapiens
ccccgtccgtgaaatttccccgggtcgagcagggcgcgcacctcgtcgccaatctgctgtccggtctcctggccgaggaagtcgtccaccacacagatccagtgcttgttcatgcacggcaagatgtactcgagcgccagcttcagcgccggcaggggtttcgtctgcccgttgggccgcaggccgccgccggggctcagcgcatccccgggcgtgttgcttggggggtacagtttcgccttctcctggaacagcgatgagcgggccggcggctcctccttgccgggctcggcttcggcagccaccgccgaaccctggccgccggcggccgcacgacacggcgacgcggccgccgctgggtcggccgggggcttggcctttacttttccgggggccgcgtccccggaggcgttgtcccggcgcgccgctgccataaaaggatcccgggccccggccctgggcggcggcactgcagccggcggcgcggggccggaatgctggtgtgggcccactccgtggccgagggcgccctcgctgccctggcacacgagcttgtgcttcttccagtcctgacgctggtgctccttgcagcagtagaaggagctgcggcagcggctgcagcgcaccaggttctccatcttcccgcacagctcgcagtactgccggaaaaagctcgctcgggctcggcccgccgggcccgccgctgtcattggccatggcggcggcgg

SEQ ID NO: 480430 - DNA, 581 bp, Homo Sapiens
  misc_feature (376)..(406): n is a, c, g, or t
  misc_feature (444)..(457): n is a, c, g, or t
cgcaatatgacgtttccatttactttggattatatgtcattataaatattaacaaataagacttaaaaaggacaccttcgggtaggtcagaccaaaatacaaaacttgtctgtgggactgcagtttgaggacagtgtctgcagccgtcacatggcagcaaaacggggttaagcagtgcacgagagtctgcgtcgacgacagccagagtccatgcatcgggaggttcactcggtttgcgaaggaacaacgggctcggcatgcacggcccgggctcggcgggcggacgggccggggcgcagttccccgcgctcgccactagaggtcaggaggtgaccgcttcggggctggaagacgggcccgtcggggattggcgcannnnnnnnnnnnnnnnnnnnnnnnnnnnnnnctggaggcagcgcctggttactgacacctggaatgacnnnnnnnnnnnnnnggcatcagatttcctgtctttgtggggatgatggacccgagtaaagatgcccattcggggtcaaaggcagagccgcttctgcagcttctcaaagcgttgtttgttttttttctgagacggccaa

SEQ ID NO: 480431 - DNA, 699 bp, Homo Sapiens
ggtcacaattcttcctgtgagcagagaccaggtaacagaagaaaatcacatcacctgtgtgagtggtgcaaagacaatgtcctctggtgccaggacccaggcataaaagttacatcacctggatgttggacccagcaatatgtcacaatggcccaagtaggcagagacagaagagtcagataatgtcagtgcagggcccagcaatgtcacaaagtctcctgcaggcaaaacctaaaagaagagaaaagtgctgggcatagcaatatgctacaacgttcctgtaagcagggaccaggcagaagacagtcacatcgcctagatgctgggcctagtgatatgtcaaccatcttttctgtaataaagacccaagcaggagaaacacatcacctggttgctggccacagaaatgtgccacaattttccctgtaagcagggtgctggcaaaagaggagagtcacatctcctaggtaataactgtgacatacctgtgcagaagtatgtcacaatgcccccttcaggaaggggccaggtagagaactcccgtcccttaggtgttgagcccagtgtcacatttgggtatgtcacaatacccaaatatgtggggcctgagaaaaagaggagagtcacatcaccaagatgctagtccaatggtatgtcacaatttccctgtgagcagagaccaggcaggagaagagtaac

SEQ ID NO: 480432 - DNA, 985 bp, Homo Sapiens
  misc_feature (501)..(535): n is a, c, g, or t
  misc_feature (652)..(660): n is a, c, g, or t
ttttcaggaccaacaacatggctaataaatacttccaaataaattaaaattttctcacacacagatgcaaaaccataacagaagccttgataaatcagttcaccaacaaacccatattgtttgagttacaacggtggcaactaaaaatgtcacggcctccttcattgtgttccttttcctttgctttgtcttgcaacaacccaaagtgagaaaatgaaatgatcttcagaggtgatttctaacaaagcttatgtgttaaatacaccaagatcttctcatcccaggaaagcacagctaaagcaagaatgccgtgctatggccaagaaaatgcacaggggcacttcacatttgaaatcttcccagagttatgaaatgtacagtcattttgatggtctccactaacttcagagatgaagatggagtgaacgtatgtgatattctatggattatttatttaagtttggctaccagagacttaaaactgatggtgtctgattcacnnnnnnnnnnnnnnnnnnnnnnnnnnnnnnnnnnncacaggtataatacaattttggtgaacaaagttgaaggtttccatatcgcagacagaggcaatgagttaaggattctatttccccccaaacatgcttagcaaattcaagtttctgcnnnnnnnnncttctaatttccatcatgcagccatttggcttccatccttctaagaattattaatgttctgtatatatacatccattgcaggcttgtattccacaataacaaagtcatgtatagagaatgtgaaatgatacttgaaaaccaagatatataaaatattgaagtcatttatgccttttgatgactgggttaaatatgcaaagcagctaaaggaatatttacaccacccaccccctttttaactcacacaaagcatatgtagacagaaaaactgaacatactttaagagcacacgcttttttttcggctaagaatcacactatcatcg

SEQ ID NO: 480433 - DNA, 874 bp, Homo Sapiens
  misc_feature (821)..(821): n is a, c, g, or t
  misc_feature (836)..(836): n is a, c, g, or t
ttggctgatgggctggacttgcccctccggtagccttccttggccctcccagcgaggggcacccttcctctgtgccccagtgggcatcaccgtcgatctcgctggctgaatgaagaagaccgtgttactgcagaacctgccaagtctgtcatcactgtggggtgtagcctgcctcagagggacctgcaatcacctctctgagctcagtggtattttgagaatttaatgtttaactgtacccctttccctcaggaagatttaacatttgcttgggaatgtgattttgctcccaccctaaggaatttttatcaccaaaatgaatgttaatgaatttaaaacccatggtttatcattggcaagaggcaagttgacttcatcctgtcattccagcctggggtctgccagccagccctcctccccgacccagcgcctaagctcacagagtgtcgtcgcccacctccctggtccttgctcttgttaacccaagatgctgctacacagatgccaaatggaaatcttccacagggctttttcagtaaacacgtgatgtggagtgcaagctcctccccttcccactagaacatactttaacagaaaacgagtcggaccttctagctgcactctgtactgtgtgccgagaaggcatttctagacccgtgtttttaaaggagggaactttggggattgccagcccctgctcctcctcccagggagccaactgtccctcctcccctgtccctgtgcccatggggcccggcagtggctgtgtcccctgcctgagggctctgtgcctcctgccttagatgcggcctgtgccaganaggctgcctgtacanccagggtcagtttggccccaaacagggattcagaaacc

SEQ ID NO: 480434 - DNA, 443 bp, Homo Sapiens
gagcgttttaagcagaggaagaacttgatcggattgtgttttaaaaggatcacctggctggctggctgctgcatggaggacagacgggggtaggcgaggggggacagggaagaggcccctgtggtcatggtggctaggatgcggggaccagggcacagcaatggtggtaggaacagcggtgggagtccatataggtttcagaggaagggccaacagaacttgttctgagaatggttgtgggagctaagagcctgagtttctggcaggagcacctggttgaggtggggtgtctgttactaagccagtgagggttggggtacggacctgtcggggcaatggaggctctgttttgagagtacttggtacatgcacactgtccttaatcctcacaacagccctgccaggcagacacagaccctttcacggtaacacagctaacaatg

SEQ ID NO: 480435 - DNA, 900 bp, Homo Sapiens
ttggccaaatccttactttagaagaagtagtgaaataaagatactaaagatccagactcagtgcacttcaaactttttgaaatagctattctaacagatgtgaggtgacatctcattctggttttaatttgcatttctctgatgattattgaacttgggcttttgttcatgtactttttgctcatatgcatgtcttctttgagaaatgtctatatcaagtcctttgctaatattttatagtatttgttttcttgctgttggactgtttgagtttttatacatttgtgatattaatgcattatcagacgtatagtatagaaatgttttctgtcatgcagatgcttcttagagacaaggcctcactccattgcccctaggccaggcctggtgagtgacagcagccctggtgccccagcctgctagggcaatgtgtcacccagaggcttcaaggcccttctcaccatggtacccacctcctcgaagctgcctcccaaagccctctagctgctgctgcagccacaacaagtgccaccaccaggggccttccagctgccagtgcaggctttccagagccggggactggggaacctgcagtcatcacctcagcaattctggtggcagccaggccagccagggcagcgatgatgaccgtaatgaaaagtgggatgacagctccacactggtggatgagttgagaacaccaggcagaggcatgtacctggtctttgatggttcagtggacctgcactacccttgcagtgcaaagtgcaagagttgaagcttggaaaccttcacctagatttaggaagattcagggaaaagtctggatgtccacgcagaagcctgctgcacgagtgaaccctcatggagaatctctaccagccagtgtgatagaggacg

SEQ ID NO: 480436 - DNA, 859 bp, Homo Sapiens
gccagccctttcccagctatgccttggggcaggactattcccagctgtggctgcagaacctccaggtatcccagagattccaacatgccccccgcaccctgccctccttgatctgttcacaccaccctatctcatgtcccagtggagtccccaccgtagagccgctcacgggtgcccaggcgctccgtgggcacccgcacccttcatggagcctctgatattgcctgtctcctcgccacggtgggataggaaggtcaggaactgttgggccgtgctgccgatcatggatttgagtgcaaccacacactcccctgaggagcagatgggacaaaccagcaaattaccaagctaatctagggccctgtctggcttcctgttcccctcagcacccctcacccctcaccataggattcatagccatccatggactctgactgtgagccggaggtgctggtcctgcaggtactcgatatcagccagaattggtttgagctgggaagcagggaggcccagtgaggaacaaagccccgccacttcctcctgcccctcctacgcgctgccccctgacaccactcaatccccaccctcaggtcatctgtgctcactcacactcaactcttcagagaagagccaaatccttaatgcagaagacacagccctatacaggccttttacagcacctagcatcactgtaactaattaattttctcaatagctaacacaggacctgacatctagcaaaagctcaagaagcatctcctgaatgaatgaacaaactgcaacaaggttccacactcccaaaataaagcaaacgcctttatcctcactcatgcccatgcccatacacacacacacccaa

SEQ ID NO: 480437 - DNA, 942 bp, Homo Sapiens
  misc_feature (57)..(66): n is a, c, g, or t
tgtacaagaaaagtgggcgtctctatgtgtgtcgacatttccttttaacttgtatcnnnnnnnnnngcgcattaatgctgttagtttaatgtggacagagacatcccacggcgtgactgttagttaggatgagtcagcttgggggagtttgtgcttcctgcttggtgtggccagccacatgccaaggtcccctgccttctagcccagaatgacgggactgggcagaacacccccaacttttagctgccacttggctcattacagcagtaccagtatgggggtgggaggggtgaggctgtggagtgaaggcggcgtatagggcagagactaagaggtcctgtgagattcttagaggagccatcctgctccaaggggcctgagctgagtgtggtctgtgagcatctgctgctcctctcagagagggagatctcactctctgccagtctgtctagccccaaagagcctggttttctcagtatcagtgtagctcctggggacttcataggcataaagtcagtccatttccatgaagataaggggattaggaaagaaggttctactagttggcatagcaaacacgaggccaacaccatgagaacagtaggggaggcggggggtgagggctcagcccccagcccctgactggcagtgatggcccatgctcaggaagtgggatcctctgacctcccctgaatccctcaccttcccaagtttcagagctgggccgagctgttgagtgaaatgaccgaaggcagagtttgtatgttctccccgtgtcgccccatccatggaggagttgaagtttggaggaggggagagtggtactccctgtcgtcaactcctcagcagaactgatagtcgttgggctgcagcaagggctgggcgatatccccttgctcgcagcaggtcaggtgctcactagagctctcctcctccagctca

SEQ ID NO: 480438 - DNA, 887 bp, Homo Sapiens
aaaaatgtaatttgggctaacaacatccatcagagggggggtgggcacaaaagaatgcactatcaccatcttctaattccgcaaagtatcagaattttatgactacagattagcctcatttcctttcccaaaattttttcttcaggctgttttaaaatcacgatttcatttaccctctgacctcaaaagcatacaagaattataattgaattataatggaaattattgcttgcatttattctggatgctctgaatgagcttgacactttgctcccagtctccaactgaggctcagcacagctatctccgaggacaaccctgctgactgttattgcttgtgaatactgaggattaacttgtatgtacagtaacagcgttatatattcagtgaaggcaatgttaaaatataatacgagttgaatacaaactgcttaatcttcctgaatcaagaatcccaaggagtgggatataatcatgtgtgctgattatttttgcatttggatgttgctaatgctcttcagttatacacgttgctctatagatatcctttccaatgactcaccattttaaaaaataacataatttgatttttaagtgcaaaaatacagtatgagtcacaagtctctgtgctaaaaaataaccaatttatatgtttgtttttagtaataaaaacggtaaagacaggtgaccataaagtatgggcacctttttcaatgttatgatctaggaaagaaatagattactatttacatgtagaaactctctgatcatactttatctatacagaaatacaacgatgtttgactgattcatacaacataaaaggggggtcccgactgaaatgaatgtaagtcgtcagtgcaggtgggggtttaaggtagggccaa

SEQ ID NO: 480439 - DNA, 900 bp, Homo Sapiens
ccggactgtactctttcaccagctgctgcgtggtcccacctggtcagtccctggggaccacttcgaaacacgctcagctgggctacgggtctcccgcatgtacctctccttctcaggacacatatccaggcaggtgccaacaaaaagtcctcgctttgtccagatcggttctcttcacccgagcttgccgcatgatcctgtctctctggtcaagcaggcggtacttctccttggatgtctcagccacagtgcctatcagggtactgagggagagcacacatggcccgaggccctcggagccctcggaggctgagtcaaaagagtctccctcgaattggtgggcctttagaagacttggcttcttcactggagagcttttattcaggaggctgctagcaccagtcctccctgcggccttgccaagaggagagtgctgaaagggtgcatcctctgtgctcgggctgacttcaccgtcacctggtttcttctccttcagggaaaagggtttcttattggggcgtattttcttcctgtgccaaaagatagccatgtctttatgcaaacttttccccttctttctagccagggctgcagatgcatgatcaaagaaatgtaccactgcaagctttttgctgcgcctggtaaagatgcgctgcactttagcaattttgccgaaatggttctccagaatggtcctgtcgttgaggtagtcagggatgttcttgcactggatggctgtgacttcagagggagacaagcccccaagactgtctgtgctctcgcttctgttactctgacgcgccggagttcctcttagagaatcttctattcttctctctagctttcagtttcttcctcttattcacacgtggaatccgggaggtgcccaggacagattga

SEQ ID NO: 480440 - DNA, 957 bp, Homo Sapiens
cgagttactctgccctggctgcaggtataaaaacggcatcttttccacaactaaggcaggtgtggtgaagtggaaaccgtatgttttatgaacaatatacttatacaacaagtcgaggtttttctcttctttcactgatgtgtaaatcaaggcagctccatactgaaggcagaacctccgcaggtgtgactggataaagtccaaatgctcatcttgtaatcgtgctcttctccaggacactcaccgcatcacactttgtgcacaccaccaacaccgggatccccaggttatgagtcagcacattgtcacccagaggcagggcaacattttcttcatcggagcctgaggtcagagggcctcttctctgtggggaaccttgacaaccttcttcaggttccatatagtcttgaaaatctttcacaaacttccgttccagctccctcattttttctggtggaattttcattttatcaatgtgctcacgtaaaacactagcccatttctgcagagattccatcacagtccaaggtctagacatgtctgcaacaaaaatgacgagggtctctggcaaggattcagcagaaactgcaaatttcagcaggcctttgtggtacaagtctccatccagaatccacacgttgcagcgcgtgtgatcatctcggtcctcatcatggacactgaggtagagatattctaggcctcttccttttttgccatgctcagctccttgtagtttagtcatgagggttgttttaccagaaccatcttcaccgaagaccaggatgttcttgccggacggcagcttggacctggcgcgggtggacacttcgctcagaatggaggaccataggctctggccttcctcctcctcactggtcaggtcgccggcggccgccaccgcgggcccgttgggacctagcagcagcttcttctccacccccaccggcgccatcccaa

SEQ ID NO: 480441 - DNA, 817 bp, Homo Sapiens
ttggggcaatgccatcgctgactagatggagtttgtggagggcaccgagcacgacgtggacctggtgttgtttggtgggcggttgctggctgcctttgtctccgacaatggccctacgaggctgcctggcttcactgagacggcggcctgcatgcccaccgggctggcaccagagcaggaggcacagatggttcaggcagccttccgctgttgcctgggctgcgggttgctcgatggagtcttcaacgtggagctcaagctgaccggggctgggcctcggcttatcgagatcaacccccgcatgggtggcttctacctgcgtgattggatcctggagctctatggtgttgacctgctgctggctgctgttatggtggcctgtggcttgcgtcctgccctgcccacccgcccacgtgctcgtggccatctggtgggcgtcatgtgccttgtgtcccagcacctgcaggccctgagttccaccgccagccgtgagaccctgcaggccctgcacgaccgtggactgctacgcctcaatctgctggaggaggccctggtgcctggcgagtatgaggagccctactgcagtgtggcctgtgccggacccagccccaccgaggcccgtctccgcctgctgggcctctgccagggcctgggcatcgatgggcccagctaccctgttgcccacttcctgtctcacttcaaatagcactggggtcagggggcagggaagcagtgctgggtggaggcactgtggtgccctctgctccctggagctcttcctgcttctctccccatcaccatgccccaatcccagcca

SEQ ID NO: 480442 - DNA, 706 bp, Homo Sapiens
  misc_feature (593)..(606): n is a, c, g, or t
aatagaatattctaactattctgtacaaattgaaaacactgtattcagttacaaatgtgttctaaggttaggccgagcactctccacaggcctggtcagtgcggacacggccatccccggctgccggagagcgccgtcacccacttgaaaaccccacccaccagccgccaagcggtcacaccaaacccaggaccttcagacaggatgaatggtggggccccgcaatggggctactgagaaagcaggacttgacgctcatacgctccactgaaacgcaggacttcccagcccagtccctcagtggagaagactgccgaagcccggctccggcagcagggtggcgcctgcgtcatgaggacgggctcgcatcttcagccctggtggcagggagcggcgtttcttccgcacaggccttgcgcctgctaggaagtggcacatcttcctgctcagggcaccaaggtggttcagaaacgttaaggacgagccacagcgaaaagccgcagtcctcacaggccagaagggataaataaatatgaggtgccccgcagcagctctcccctgggctggtgtgtcacaaccctgacccccccctnnnnnnnnnnnnnntgaagaagcaacatcctaaggagaacagggccctactctacacagccctttctgagatgatcggcatacagcaggtgatgcaggctgcacactcagcaga

SEQ ID NO: 480443 - DNA, 655 bp, Homo Sapiens
ggatgtaggtgagggggctccccagtaggggatgctttcctcgtccagactcacaccgtcgcaggatgagtcctgtggcgttgcggggacaccggacagcagccacctatcccgctgggggtctccttccagatcacagcaccaaagttgtcctcatcacagatttgatggggctcgggacaccggtgggtgccgcactgccggtactcatcctgggggccctggcaggctgcatcccgcgaagaagggcccagagcatacacgctcctgtcgctgggtgccagccccacacgtgacgctgcaactgccccatgacgcccaggcctgccacttgccatgcactgggcagctgctgcgggaagcagtctggggtcttcacccagtggccctgggactccgcacccccgtaggaaggcccgttgcattcacgcgtgcgctggtgtcggccctgggagcagctggcggagcaggcgctccagctcgaccactcatttcagtttccatccactgcccgggcatggcacagggcaatgttgcagaacttggtttgcttctcagggccctcacaggggttgcccgcaaactgggggggccggcaggtgcgcgtgcgatcccgaaagccacggccacaggtgctggagcagaggctccaggg

SEQ ID NO: 480444 - DNA, 872 bp, Homo Sapiens
ggttctcgtataatgtctctgtccgtctcatcagtagctttcttaaacatcagttcaccctggtgataagcttctccatctcaatttgctgttagtaaacttctactttgaactccttcatttcatttaactgatctttaacagtattgaggtcagtgccaacagggggcatggtgcagagttttaatcacagtgttatctagccagtcaaacatagcatgaagagtgtcctgatactgcacagcagcttgcatagcatcctcaagtttttctagcctctctttccatgttttgtttaagttctcccaagcattattcatctcatcaatgctcttcctcacttcaggcttctcagtttctccacaggcaaaaatcaaatctgctccaaggatccgaataaactccagctcttcatgcagaccatctgtctcttccttaatagtctcagcagcttcaacctgttgtttgatgatggaaggatcaatgcctgggctttccaagtcatggacaatatcctgggtgtctttgatggtggtcaggaaaaaagccatgtcataccagaacttctctgctaattcaaggacatcaagaaatttgatttctcgttcttcagcccgagctttgatgtcctcccagaagaataccatttgatccaatttatcctggatttcttttgcagccaagatccttgtctgctccctgagatcgtccaataagctcctctccacggcgcttcaaggcctcaaaggatggctgcagtttttctagctccacggtggcactcttattgtcactgatgcactctctgatcttgtctacttcagcagggatcagtggtggcatacgccggcgagaggaaagattctccagtg

SEQ ID NO: 480445 - DNA, 919 bp, Homo Sapiens
cctttaatgccccctttgtacaaaaaagttggcgcgacggggctagggacgacacactgcattcactggaagggacaacgcagcgccagtacatagcctgaaacgctccccagaaggtcccacgctcgccgcgcggtcgacaaccgcatcctgcgctcgcccgcggtgtctcggcaagcgctaggcttgtcgggaagagctggagggcgcaagtgcggcgctggccggtcgtgccgcaccgtcagcgcagggctcgccgggaaatgtggtttctccagccggcccggggcggtggccgcaagttgggcttacagcgcggccgatccggcgtggacccgggatggctggaccgggcagcacgggggggcagatcggggctgcggccctggcaggcggcgcgcggtccaaggtagccccgagcgtggacttcgaccatagctgctcggacagtgtcgagtacctagacgctcaacttcgggcccttcgaaacagtgcatcgctggcggcgcctcccgccctgcgacgagttcgtgggtgcccggcgcagcaagcacacagtggtggcctataaagatgccatttatgtatttggtggagacactgggaagaccatgctcaattttctcctgcggttcgatgtgaaagactgctcctggtgcagggcctttaccactgggaccccaccggccccccgttaccaccactcggccgtcgtctatgggagcagcatgtttgtctttgggggttacactggggacatttattccaattctaacttgaagaataaaaacgacctctttgaatacaagtttgcaactggccagtggacggagtggaaaattgaaggacggttgccagtcgctaggtcagcccatggggccacggtgtacagtgacaagctgtggatctttgctggcta

SEQ ID NO: 480446 - DNA, 485 bp, Homo Sapiens
ggacaccgggtgcagtcggggcgtgtgagtgtgtaatgagtgtgtccgtccgcgtccatgtgagcatgcagacggggtggggcaggggggagtggccccggggaagcatgacagatatggttgttggatacagcggggagcaagagcaggtaaacaatgcctggagcaccaacaggaaagaccagaggggcataaggagaagcacaaggacatgaggatgcggcccccctcgctcccagcaccccgcaccactcgtgcatgagacagggggcagagcatgggaaaggctgcagagtaggggggggcctgcagttggggtcacgggaactgggcgttaggtgtcccaggggtgcctggtgttcatgctgattgcagtgatgatgcacgtcctcctgggccagtccacggggtgcgcctgtacacactggttttttgaaacggatacaagggcccaacttttttgtacaaagcctccctttttatgt

SEQ ID NO: 480447 - DNA, 468 bp, Homo Sapiens
  misc_feature (357)..(415): n is a, c, g, or t
tccccacccctcaccccaggaggggacagaatggccgcggggaggaggagccggcgagctcacctccttctgccccccggacgccggcgccgggcctgcttgtgcggcatgcggtgtggtgtgcgtgtgtctttcatgcaaaccctccctccccaaaccgaccccccaacagtttgccattccatacaaatttggaaacaggtttttaaaaaacagcatgacgcacaacggggacggggcgggggagggcagtggcactggggccccaaatctccgagtcactgattgtaagaacctggggagggggagggggcggcgcgggcccccacttcaccaaagtgcacagatccgcgctcnnnnnnnnnnnnnnnnnnnnnnnnnnnnnnnnnnnnnnnnnnnnnnnnnnnnnnnnnnncagtggagcctccttgcatagatatttgtgtctttgattattggtagtagtgg

SEQ ID NO: 480448 - DNA, 1052 bp, Homo Sapiens
  misc_feature (979)..(979): n is a, c, g, or t
  misc_feature (1013)..(1013): n is a, c, g, or t
ttgggtccgagacgcgctggacaagcagtattactttactgttctttttggccatgaaggtcagaagccactggagctgcgctgtgaggaggagcaggatggtaaagagtggatggaggccattcaccaagccagttatgcagacattttgattgagagggaagtattaatgcagaagtacattcatctagttcagatcgtagagacagaaaaaattgcagctaaccaactccgacatcaacttgaagatcaagacacagaaatcgaaaggcttaaatcagagattattgctcttaataaaaccaaagaacgaatgcgaccttaccaaagcaaccaagaagacgaagatccagacatcaagaagattaaaaaggttcagagcttcatgcgaggatggttgtgcagaaggaaatggaagaccatcgtgcaggattacatttgttctcctcatgctgaaagtatgaggaagagaaaccagattgtgttcaccatggtggaggcagagtcagagtacgttcaccagctctacatcctggtcaatggctttctccggcccctgtgtatggccgccagctccaagaagccccccatcagccacgacgacgtcagcagtatttttcttaacagtgaaacaatcatgtttcttcatgaaatatttcatcaaggactaaaggcaaggatagcaaactggcccactttaattttagctgatctgtttgatattttgctccccatgctgaacatttatcaagaatttgtgcgtaatcaccagtacagcctgcaagttctcgccaattgtaagcaaaacagagattttgacaaactcttaaaacagtatgaagccaatccagcctgtgaggggaggatgctggagacattcttgacctatcccatgtttcatccccagatatatcatcacactccatgagctccttgctcacacaccccatgaggcatgtgggaaagggaaagcctgggngtttgccaaattcaaagcttgggggacttttccnggggtaattgcacggtggaaggtccggcggccactggga

SEQ ID NO: 480449 - DNA, 917 bp, Homo Sapiens
  misc_feature (60)..(80): n is a, c, g, or t
  misc_feature (602)..(602): n is a, c, g, or t
  misc_feature (662)..(662): n is a, c, g, or t
cactcacatataaatacaccagctattatatacacatattgtcaactacaaactatactnnnnnnnnnnnnnnnnnnnnngcaggtcgtgaggctctaagtggacacagacacattacgagatatgggctacagcatttgtggattcacaactctgcctccacgcgccagaaatcaacagtcatggggggagagcttggaaggggaaggtgactggcttgggcggccccatggtcccctgaagtacaggagacctggccagccaggctggggccaaagggagcacagaaaactgcctttggccccagcagggccacaaagcccttcctgccggcctcctgtccctgccataccgcgtcttccagctagccaggctctaggatgggcccatcatgactatcctgcagtcttcagacctaggccagatttggggtaaggggccactctaaccagaagatttctagggttaatgggatgaagaggcaacatgttgccctaaacctttccccaggtgtgagggagatgcctggtttcagcacgacccgcctgccaaggtctggggtcaacaggaaagtgggccctggcctgccctgaatgatgccnatctccctgtcctacctttaaacctaagtgtctacctaacagccccaggttagccctttncccacaggaccccaaccggccagctgcccattttctggtcatgaagaggaattgggaaaaatagactcacttctgcagggcactctctgtcaccaggtcaggaggcctggggacaatggaatggaaactgcaaggcatcatgtcccagggcccccagaggagcccagaggtctggcctgagctgttcagaagaacccctggctagtctgattcttagtccagctgaaacgtgttctgtgtgatctagaacaccca

SEQ ID NO: 480450 - DNA, 864 bp, Homo Sapiens
  misc_feature (51)..(51): n is a, c, g, or t
  misc_feature (410)..(418): n is a, c, g, or t
  misc_feature (541)..(586): n is a, c, g, or t
catttttaagaaaaacctggctatgtaattgaagaacctcttacaagtctngaacaattaaatcctttttggttaatgtattatttctggaacatttagataaaattctacgcagtaagcataataaaaatcgtgcatgtttcgcacagcacagaattttagagtcaaggtttctgggcacaaaagcagtaacaaaacagtccttacaaaactgagtaactctgaataacacaagaaataatttttgttaatttaaaattttagaaactgaaatgtgtaaagtttttaaagtaaaatgtaattaaattatgggtactgtacataccagttgtttctacaattgaaactttacaatatggaaaatacattggctttgtacagtttttacgggtgggtgggatgagttttgnnnnnnnnngattcttttatttttcagggtcatactctgtttaagtcaaaaaatactgcacaacttagctaattacaaagtgtagacttaaaacaattcatgtcttctttatttcatgaatcaatcttggannnnnnnnnnnnnnnnnnnnnnnnnnnnnnnnnnnnnnnnnnnnnnagagtccacaatgaacacatcttcctcattttgtccttgaggttacaaagtttggtagcaacccctggctaccaatgatctcagttaagctagctgctgtttatggtcactgattcggccagctgttgtgattgtgctcaggtccagctcagtctctaggtgtgtttccatcgtatcttcctgtgcattcgtttcaaaggacttatgggagagaagttcatgatgcaccccacagtaacttattgtgggctggtcgtatgccagaaaggttgacccaa

SEQ ID NO: 480451 - DNA, 891 bp, Homo Sapiens
  misc_feature (382)..(382): n is a, c, g, or t
ccgtgggtgggtgggccagcggtgggaaatgcttgccatcaagctcgggagcacccaggctgggcgagtcgcagtggaagcttggccaaaggtgccatcggaaggcgtggacgggttcatggagtagggtcctatgaagtcacaggggtctcgctctcccacgccgaaggccctcgactgtgagggcagtggtgacatgctgctgtccccgctatagtagtccaggccgaggtcaggactgtcctggaacagtgggttgactggctgtggcttggggatgaacttggctttggccgctgcgccaccccgctccttcttggctgagcaggccccaccgccccgtccacctcgcggctgccggggcccaagtgctccgtttggnatgggtagcctgaggcagcggcaagaggcggatgtcgggaaagcccagatgtgaggcctcgaaacaggtccaccttcttccgccgtccacggcccggcttggagctactctgaaagaggacactctggttccagttgtagccgggggcagatgatgcctcgttccagtccatcatcagtttctccaggctggacaggctcgactggccctcactacttgaggcctcgctgttggcacgccgaaaccccccgccaccaaccggctgattgaactgggtgctgtcggaggatgactcaagagaaggtctccgacacagccgtctgctgcttcaccttctgcggtgtgtagttggagatgtccaggatcacgttgggctcgctgacgtggcagtcaaaactgggattgtagagctgactaaaggcctctgaggcccagtccaggcctccatagccctgccggaaaggccactgagaagcccccgcaaactgccgacagttctcgggcgccaa

SEQ ID NO: 480452 - DNA, 740 bp, Homo Sapiens
  misc_feature (530)..(546): n is a, c, g, or t
  misc_feature (606)..(606): n is a, c, g, or t
ttgggcccggtggccaggcgagttcttctccagcacgttcagccgggcctccagcttggagatgacctgctgcagctcctgtaccacactgcgcaggctctggttctccactttcagactggtgatccggacgacgagctcgctgtggtctccgctggggccgctggaggccccggggcctgagtttccggccagggatttctggatgttctctctggctctcgcgatgtcacggaggatcacgctggcgtcgttctcttggcgggaggcaccggccacaggcccattcatctgctcgtagaatctcctttctgcgtcgtcatatttgaacttgtcgaaccagatcttctcatgtactaggaagtttgtagccatttttctgacgcctgccaaggacgcgacgaccagggaggaggaatcggcggacgcgggacacctgaggaaagggtactaccttaaaaatcttttcctatagtcttggtaaattttaaatgatagctctataaatgatatttataagttatggttannnnnnnnnnnnnnnnncattaattttgatcaattgtatcttactaggagatcacccatttactgtaggtagtattnctcttcctactatatttcatatctacctactacatttcatatcattcctactacatttcatatctacctacatttacatgtaggtagatatgaaatgattcaatatccatgtctccttttactcattacaaatc

SEQ ID NO: 480453 - DNA, 966 bp, Homo Sapiens
  misc_feature (156)..(363): n is a, c, g, or t
cacacaagcagtttctaaaagagaaagactgcacacccaactcagagggcaataattcttgacacctacttttctctgggtgcaataacgaaaaacagggataggcgacctcaggaagaaaacgagtctttggatgcgaagcattaagtaatcagnnnnnnnnnnnnnnnnnnnnnnnnnnnnnnnnnnnnnnnnnnnnnnnnnnnnnnnnnnnnnnnnnnnnnnnnnnnnnnnnnnnnnnnnnnnnnnnnnnnnnnnnnnnnnnnnnnnnnnnnnnnnnnnnnnnnnnnnnnnnnnnnnnnnnnnnnnnnnnnnnnnnnnnnnnnnnnnnnnnnnnnnnnnnnnnnnnnnnnnnnnnnnnnntggcctaaattcaaggcccaggtgcccaaacaccaacagtaatgctgcttgtgggttgcttctgtcctggtcacaatggattaatgaactaatgatgcaagaagcccaaggagatggttctgtccttgcaatttcaagagccctgacaccacccacaggccagttctggatccttgccatccgctccagacaccccaacttgggcagcatctaggcctggggctccagcccacatggtcccaggccctgcagttagctggcttctcattctggacatttctggacactggaggcgagcgggcggccctgaaacactgggcccggctatctggagaccagggagctgctatgagactggccggaggaggaggacgaggtagcggcgctgagctgggagaagccgctggtgcaggattccagtcctcccgaaggcaagaagaatgaccttgataatgcttccacgtgggtccccgagacctccacatgggaggagagccggccgtagcagatgccaccatggatacctgctggttctgtggtccagcttctcttgtccattgggggaatggccctccccaatcctgctgcggcttctgcagccaa

SEQ ID NO: 480454 - DNA, 327 bp, Homo Sapiens
aaagaaaaatgttataatttataagattgtaaaattttattactgggctgtttacatgatactttctttcttattaaatataacctgacaatctttattaaatgaaaatatttttgtatcatcaacaacaacaaaagaactaggatgaagaatttcccacattcttaatatttatagggtttctctccagtatacattctcatgtgtgctcaaaaggctgtgtgaaggctttcccaaatgtcttacatttatagactttcaccccactctgactcctttcatatattcacactctagaggacagttggaagattttcccacttttat

SEQ ID NO: 480455 - DNA, 306 bp, Homo Sapiens
tgttgactcatttcgcttttttatttctttcgtttccacgcgtttactaatatgtattaatgtaaacgtttctgtacgcttatatgcaaacaacgacaacgtgtatctctgcattgaatactcttgcgtatggtaaatacgtatcggttgtatggaaatagacttctgtatgatagatgtaggtgtctgtgttactacaaataaatacacatcgctctataaagaagggatcgtcgataaagacgtttattttacgtatgaaaagcgtcgtatttatgtgtgtaaatgaacgagcgtacgtagtaa

SEQ ID NO: 480456 - DNA, 1031 bp, Homo Sapiens
attcataattatcctcttcttcctcctcatcaacttcatcactgcttgggcaagattccttttcggagtcctcaaaatctctaccactactgcgtctctgacgagatctttgttttgagagttctttgagcttctgaagtttttctcgcttttgtgcagctaatgttttttcaggagtcttttgctccatttccactgaagaaccttcatcttcaaaccactctacggggacgtttaacacctacttttctaactaggatatcgctgtcatcactctcatcactgtcacacatcacagaggatagcctttttctttttcctcgcttgatgtcttcttcttctaaatcatcctctattatttgtccagtttgtttgttgagatcattatcctcttgacttaaatgtttttcctgatcatcctctattatttgtccagtttgtttgttgagatcattatcctcttgacttaaatgtttttcctgatcttgtaagtcaatattcctatgtttgattttgttcgtttcttcttcatatgttgaaccgttgccagagttaatgagacacttactgtcatttccttcactttgaattttacttaagttgagctctctttcacttcctggtgttttattacaatcaggtcccttgttactatcaagctcttcatcattttcaaaactttcatcactatcaagctcttcatcactatcaaattcttcactatcaagctcttcatcactatcaagtaattgtgagatactacttcttttagttcgcctccaatcaactcgagatttctgctcaggcacgtgactcttagaatttctccttgtttcatgtcttctaacatgtatcattttcacttaagcttcggactatgtttccagctttccaagaggattactttttttccgaagatcacgcagcttgttagtgacagagcagggattagaaaccgggtctcttgattccccgtccagtgccacacaatgacggctttcaaagcgcctccacctctgcctccgccccaa

SEQ ID NO: 480457 - DNA, 962 bp, Homo Sapiens
gattacccaatactcatctgcagttctctatccattttagaagatattcttatgactctgttgtgggttcaacagaaaaatatggctggccttgaagtaagctgtagaggagacgagcattattaccacttgagggatcgtcagcatcacttgctgtcacctggataactaatgttcgttctggagacatctctggtacaatggcctcataaggttcatctaggaattttggttcattgtcattgatatccgaaactttgatgacaaactcagactcaggttccacagcccttccagtagcgatgtctattacctgggctcttaagatgtagagggatcgctcctctctatcaagcttctgtatggcatatatgtcacctgttctttcatcaatgataaaagtacttccagctccagctcccaaaagcttgtactggaaagaattgtttccattgtctaaatcagatcttagctggccgatgtgatgactagtcgtattcatttcctctggtacaaaaaattggttccacacccagccacgcttcactctcaaatgagatcgcactggctgcttgactttctttgtttgagagttttctgttgctccaagacaaggccataggagaggaattcccaacataaaacgcagcagtaaataacagttcattgcgttgactcttttgattccaactattactcttcagaggaaacaggacgtcactaacaaaaatcttgctttcttttataatcttttctgattctgtgtaccttctatatacctttgtaacttcaacttctagaagttctgtgaaaactgaacagcgaacttcgtgttggacacataaggaagagtaggaaaaactttcttctttttgcttcacagtcttctcagcaaactctcgatgtgctcctctattgacgccagagttacccaacttttttgtacaaagttggcctttacg

SEQ ID NO: 480458 - DNA, 1925 bp, Homo Sapiens
  misc_feature (1130)..(1138): n is a, c, g, or t
taaaaggtttattgttttatttcaatatttcaggaacagtgtacactttccgttcagccatcgtcacagcacgtgctgtgtgggtgcggccacgtatggatcgcagagccgacctcagctcagcgacgcagagtgcttctgctgaaaaatttggaggtttgtgtctggagtttgttctttgtaactctctcatcatcgaggctatatattaatagacatggtattaagcccacacgaaacattcagaattagaattggattaagaagacgcgttttggcatcacgctgactactcctcatctccgtcctcagggagggtgatgccagcgtgggactctttggaaggcctatcaatcacaggtgcgctaaaatcaaaaggtgggtcattaggttggggaagggaggcgcgaaaagtagatgccagcgggtgttaagaagggatatggtcagaaggagctctttgtctcccatccacggggccgtctgctcagcccgtgtgtctcggtgagtaattcgggagcaggtgcacgcctgtgcctactcgctaccacgcgtcttctgggaggaagtgaatgagccggttatcttctcagggagggttagtgctggccactgtgcactgccgctgccagcacgcccggtcacagccagtgtctatgggcgactggcgcggctgcgaggctgtctagaggactcctacccttctgctctgagtgcgcaagtcttcctggactctccggctgtgggctgtggtttggaaacgaggttgttcatagaggctgctctggggccaccatgcagggcaacggtgacgtccagaggccacctgcttgacatctccatcaccaaatctccaggaagaccctgtttcctatgtgaggccattgcccagcccacgtttgcctccttttcctccctctgccacacgcgaattcagctaattggggtgtgtgggcagccacggcctggggaggtggccccctctctgtgctgccccacgttggactctaacagctgcccagcccgcatgtcacataccaaaagctcccacatgtagtaagccactccttgactgtctaatcctgttaggaaaaatgaagtctactttaggaggtgagagaaggacaggnnnnnnnnncaaaggaagcttggatgtcaacagtcctctctgccgcccacgtcctctctgtctctgcagctgtgtgcctccatggcagtgaccagcaaaagcgcaagggtgccgcagccacggcgaaaagaaagtccaagggtggaggggtgaacgtggagggacgtctgtgcacctggccccctgaagacccacgtgcgtctgggggcacattgcgggggaaggaacgtgatcttcacacagaaagggacagttttaaccgttttctgttttcatgttctcatttaactgttggccggaaattgccggtaggctgccgtggcctgaccctactacgtgcacaactccgcaggcattaggggaggggtcatctgctctaattaggtaacaggggcaagtgggattaaagttttaaggcggttatattaagaagctgaggacaggattccggaaccaggtgggttttcagcgtctagccatgggtgatccagagcgactatctcttcctcccagcttaaaaattttggaaagcgtgccctgggcatcgactcccttgaatcccttgtgagccgatttatagtcggacgctctgcctccgtagccaaatcctggtctctggccttcggccccccagctaaatctgctcagggacagtcctctcccctttccctgcgacgggggtggtgtgcgaggtctcgttcttataaagtttcttgaagccaacttttttgtacaaaggggagccattaggagagaaagcattgctcatcaatttgtgcaagcgaacaggtcacta

SEQ ID NO: 480459 - DNA, 445 bp, Homo Sapiens
gcaatttaataactttatttgatctgtcgatcagcgattagttctcatccacattgactgtctgtagatttttgaaagtggtaacaggtacataggtaaccaaagtatatagcttatttggtgaatcttcatcctcattacgttttctggacagccgcacacggatttggtatggcacattccttattcctttggcccagacagttttgttgagcttggtgtcaatgcgcacatctggagttcccatctccttcatggcaaatttccgaatctctttgagtgcccgaggtgcacgcttcttgaagcccactccatggatgcgcttgtgaatgttgatggtgtattctcgggttaccacttcgttgatggcagaacggccctttttcttctcgccacccttctttgcgggagccccaacttttttgtacaaagttgcctttattgt

SEQ ID NO: 480460 - DNA, 844 bp, Homo Sapiens
  misc_feature (223)..(244): n is a, c, g, or t
gaaaaactggccagcccaaacagtgtattaatcattagcaaatggaactttaaggagtccttatcattaaggtagtacaagtatttatattgtaaaactgatgtgtagcttgatctttaggggacaggaccaccaaccaatacatgcagattttgtgtgtgtggacagaaggtacttttgacattcagttttgctatatagaaacagaatgaataaatgaacnnnnnnnnnnnnnnnnnnnnnngcaagaggtaagtaaaagattcaatttgattcttctagaggggggaaaaaggagttgaaagtaggtcttcattttgcagtcatcatctgtacgaattcttcatagttgacttgtccgtctccatcaatatctgcttctctgatcatttcatctacttcttcatctgttagtttttctcctaagtttgtcatgacgtgacgtagttctgctgcactgatataaccattgccatccttgtcaaagactcggaatgcctcacggatttcttcttcactatctgtatctttcatttttctagccatcatagtcaaaaattcggggaagtcaatggtgccattaccatcagcatccacttcattgatcatatcctgcaattcagcttctgttgggttctgacccagtgacctcatgacagttccaagttcctttgttgtgatggtgccatcgccatctttatcaaatagggagaaggcttccttgaattcagcaatctgttcttcggtcagctgatcagccatggtgcgagcgaagggaggaagagcagagggagcgagggtggctgcaccagcgcgggggctgcgacggcgggggtacctccga

SEQ ID NO: 480461 - DNA, 966 bp, Homo Sapiens
  misc_feature (794)..(839): n is a, c, g, or t
ctgggtacccaaatttctttatttgaaggaatggtacaaatcaaagaacttaagtggatgttttggtacaacttatagaaaaggtaaaggaaaccccaacatgcatgcactgctttggtgaccagggaagtcaccccacggctatggggaaattagcccgaggcttagctttcattatcactgtctcccagggtgtgcttgtcaaagagatattccgccaagccagattcgggcgctcccatcttgcgcaagttggtcacgtggtcacccaattctttgatggctttcacctgctcattcaggtaatgtgtctcaatgaagtcacacaaatgggggtcatttttgtcagtggccagtttgtgcagttccagtagtgactgattcacatttttttccaaatgtaatgcacactccattgcattcagcccgctctcccagtcatcacagtctggtttcttgatatcctgaaggaagattcggccacctcgttggttctgcagcttcatcagtttctcagcatgttccctctcctcatgagattggtgaagaaagtatttggcaaagttcttcaaagccacatcatcgcggtcaaagtagtaagacatggacaggtaaacgtaggaggcgtagagctccaggttgatctggcggttgatggcggcctctgagtcctggtggtagttctggcgcacctgcgaggtggacgcggtcgtcatggcggcgactaaggagaggtggtagttctggcgcacctgcgaggtggacgcggtcgtcatggcggcgactaaggagannnnnnnnnnnnnnnnnnnnnnnnnnnnnnnnnnnnnnnnnnnnnnggccttggggcagtccgagggtgcggtgaagaggtgacggagggctggctatgggcggccggccggggtggggaacgagcgccgggttccgtccaagcactgttgaagcaggaaaccccgacgccaa

SEQ ID NO: 480462 - DNA, 1075 bp, Homo Sapiens
ccctcgtagagcgagtcgatctcgatgctcgcctgcgtggacgagctcagggtgcgcttggcgcgctcgcaagcggtgcgcagccgcctcacggcgcgcttgttgggcccaatgtccttcttgtgcttgcgcttgaactcctccgccaggtggctcaccatgcggttgtcgaagtcctccccgcccaggtgggtgtcgccggccgtggccttcacctcgaagatgccgtcgtcgatggtcaggatggacacgtcgaaggtgcccccgcccaggtcaaagatgagcacgttcttctctccgcccttgcagccgttcttgtccaggccgtaggcgatggcggcggccgtgggctcgttgatgatgcgcagcacgttgagccccgtgatggtgcctgcgtccttggtggcctggcgctgcgagtcgttgaagtaggccgggacggttatgaccgcgttgttcaccttgtcgcccaggtaggcttcggcgatctccttcatcttggtgaggaccatggaggatatctcctctgggtagaatgtcttggtctcccccttgtagctctacttgcactttgggcttgtctccgtcgttgatcacctggaacggccagtgtttcatgtccgactgcactgtggggtcgtcgaatttgcgtccgatcagcctcttggcgtcgaagatggtgttggtgcgggttcatggccacctggttcttggcggcgtcgccgatgaggcgctcggtgtccgtgaaggccacgtagctgggggtggtgcggttgccctggtcgttggcgatgatctccaccttgccgtgttggaacacccccacgcaggagtaggtggtgcccaggtcgatgccgatcgccgcggctttggccatgccggttccctgctctctgtgggctcggctctgagattgggggctggaaacggcggactggatccgcgagaagagctcggtccttcgggacgccggaaactcgacgcgccggtgcctgcagccgcacaggttcgctctgggaagccttgggaccgcgggaagtcactctcgaaagacgaagcggaccctcgcagccaa

SEQ ID NO: 480463 - DNA, 830 bp, Homo Sapiens
ttggctttcatagttttttcccccagtcagcgtggtagcggtattctccgcggcattgacagtaattgtttttgtctctttagccaagacttccgccctcgatcaagatggtggttggacggccttcctaacctttacggggcctggcggtgctgacgcctgagctggtaggggtggagcaggtaggaaacagcaaatgtggaagctgctgcgcgggagtcggccatggactggaaagaagttcttcgtcggcgcctagcgacgcccaacacctgtccaaacagtgagttttgggaggggcagcccgttgggatggcccggccctaaactcctagaggtaggggggaggtggggaggaggagcaagggggagccgccttttccgcttctgtgaaacctcccgacaaaggaggcggagtggaatgtggtttaaggatcccgataggtttgacccaaactttcctggggcagaatctagaggaacgaaaaacttagctttagtcactgacttccatggtcttaatctaaacttgtgaagaataacttggaaccccggctccaacaacgcctcaaccccaccaggacctataattgtcctcctgcctttttactgtcacgctttttgcttccctcgtaatccattttatatttcataatccatttttccttttatttttctccttcacattgcttattaactaacctcgttaaatctacctttcctattccacacccgcactaagggctgttgaaagtggctggagaaaaacagaaccttggtgagttgtctcactttctttttttgagacggagtctcttgctctgtcgccc

SEQ ID NO: 480464 - DNA, 881 bp, Homo Sapiens
aaagatcacctctgctgatcaagagggatgcatcctttgtctgggatctttgccttgacattctcaatggtgtcactcggctccacctcgagagtgatggtcttaccagtcagggtcttcacgaagatctgcatcccacgtctgagacggagcaccaggtgcaaggtggactctttctggatgttgtagtcagacagggtacgaccatcttccagctgttttccggcaaagatcaacctctgctggtcaggagggatgccttccttgtcttggatctttgccttgacattctcgatggtgtcactgggctccacttcgagggtgatggtcttaccagtcagggtcttcacgaagatctgcatcccacctctgagacggagcaccaggtgcagggtagactctttctggatgttgtagtcagacagggtgcgcccatcttccagctgctttccggcaaagatcaacctctgctggtcaggaggaatgccttccttgtcttggatctttgctttgacgttctcgatggtgtcactgggctcgacctcaagggtgatggtcttgccagtgagtgtcttcacgaagatttgcatcccacctctgagacggagcaccaggtgcagggtggactctttctggatgttgtagtcagacagggtgcgcccatcttccagctgttttccggcaaagatcagcctctgctggtcaggagggatgccttccttatcttggatctttgccttgacattctcgatggtgtcactgggctccacctcgagggtgatggtcttaccagtcagggtcttcacgaagatctgcattgtcaagtgacgatcacagcaatccacaaacaagaactgcgacccaaatcccggctgcgccaa

SEQ ID NO: 480465 - DNA, 1584 bp, Homo Sapiens
  misc_feature (154)..(194): n is a, c, g, or t
gaaaatgctttaatggtggtgtctgtacagcatggatgtggacagggaaaacagcaagtgcacacagtgggacaggccacaggacaggctgggagtgaataaagagttcacactgcttccctgctttccccagtgactgaaggctctaggccannnnnnnnnnnnnnnnnnnnnnnnnnnnnnnnnnnnnnnnngctgtggcatcctggtactgctggtactcggacaccaggtcattcatgttgctctcggcctcggtgaactccatctcgtccatgccctcgcccgtgtaccagtgcaggaaggccttgcgccggaacatggcccgtgaactgctcggagatgcgcttgaacagctcctggatggccgtgctgttgccgatgaaggtggaggacatcttgaggccgcggggcgggatgtcgcacacgggccgtcttcacgttgttggggatccactccacgaagtagctgctgttcttgttctggatggtgagcatctgctcgtccacctcctttcatggacatgcggccccggaagatggtggccaccgtcaggtagcggccgtggcgcgggtcgcaggcggccatcatgttcttggcgtcgaacatctgctgggtgagctcgggcacggtgagggcccggtactgctggctgccccgggctggtgaggggggcgaagccgggcatgaagaagtgcaggcgcgggaagggcaccatgttgacggccagcttgcgcaggtctgcgttcagctggcccgggaagcgcaggcaggtggtgaccccgctcatggtggccgacaccaggtggttgaggtccccgtaggtgggggtggtcagcttgagggtgcggaagcagatgtcgtagagggcctcgttgtcgatgcagtaggtttcatctgtgttttccaccagctggtggaccgagagggtggcgttgtagggctccaccaccgtgtctgacaccttgggtgagggcatgacgctgaaggtgttcatgatgcggtctgggtactcttcccggatcttgctgatgagcagggtgcccatcccggaccccgtgccgccccccagagagtgggtcagctggaagccctggagacagtcacagctctctgactccttcctcaccacatccaggaccgagtcgaccagctcggctccctctgtgtagtggcccttggcccagttattcccggctccagtctggccaaacacgaagttgtctggtctgaagatctggccgaatggtccagacctgaccgagtccatggtgcctggttccaggtccacgaggatggctctggggacataatttgttacctgtggcttcgttgtagtacacgttgattctctccagttgcaggtcactgtctccatggtatgtgcctgtggggtcgatgccatgttcgtcactgatgacctcccaaaacttggcgccgatctggttgccgcactggccggcctggatgtgcacgatctcccgcatggtgcctcgtcagcgtcctcctggtccggcggcgtctgggtctgtccgtcctcccctcacacacccactgcggggtcaccgggaaggcgctcccaa

SEQ ID NO: 480466 - DNA, 882 bp, Homo Sapiens
tgggcacggagaacatccgcgcgaggtttacgttcacctcggtgtctgcagcaccctccgcttcctctcctaggcgacgagacccagtggctagaagttcaccatgtctattctcaagatccatgccagggagatctttgactctcgcgggaatcccactgttgaggttgatctcttcacctcaaaaggtctcttcagagctgctgtgcccagtggtgcttcaactggtatctatgaggccctagagctccgggacaatgataagactcgctatatggggaagggtgtctcaaaggctgttgagcacatcaataaaactattgcgcctgccctggttagcaagaaactgaacgtcacagaacaagagaagattgacaaactgatgatcgagatggatggaacagaaaataaatctaagtttggtgcgaacgccattctgggggtgtcccttgccgtctgcaaagctggtgccgttgagaagggggtccccctgtaccgccacatcgctgacttggctggcaactctgaagtcatcctgccagtcccggcgttcaatgtcatcaatggcggttctcatgctggcaacaagctggccatgcaggagttcatgatcctcccagtcggtgcagcaaacttcagggaagccatgcgcattggagcagaggtttaccacaacctgaagaatgtcatcaaggagaaatatgggaaagatgccaccaatgtgggggatgaaggcgggtttgctcccaacatcctggagaataaagaagcctggagctgctgaagactgctattgggaaagctggctacactgataaggtggtcatcggcatggacgtagcggcctccgagttcttcagtctgggaagtatgacctggact

SEQ ID NO: 480467 - DNA, 923 bp, Homo Sapiens
  misc_feature (318)..(353): n is a, c, g, or t
ccctataaagccaactttgtacaaaaaagttgggcgaggaggctgcgagcgagccgcgaaccgagcgggcggcgggcgcgcgcaccatgggggagaaacccgggaccagctcaccgtgtacttgggcaagcgggacttcgtagatcacctggacaaagtggaccctgtagatggcgtggtgcttgtggaccctgactacctgaaggaccgcaaagtgtttgtgaccctcacctgcgccttccgctatggccgtgaagacctggatgtgctgggcttgtccttccgcaaagacctgttcatcgccacctaccaggcctnnnnnnnnnnnnnnnnnnnnnnnnnnnnnnnnnnnngcctgcaggaccggctgctgaggaagctgggccagcatgcccaccccttcttcttcaccataccccagaatcttccatgctccgtcacactgcagccaggcccagaggatacaggaaaggcctgcggcgtagactttgagattcgagccttctgtgctaaatcactagaagagaaaagccacaaaaggaactctgtgcggctggtgatccgaaaggtgcagttcgccccggagaaacccggcccccagccttcagccgaaaccacacgccacttcctcatgtctgaccggtccctgcacctcgaggcttccctggacaaggagctgtactaccatggggagcccctcaatgtaaatgtccacgtcaccaacaactccaccaagaccgtcaagaagatcaaagtctctgtgagacagtacgccgacatctgcctcttcagcaccgcccagtacaagtgtcctgtggctcaactcgaacaagatgaccaggtatctcccagctccacattctgtaaatgtacaccataaccccactgctcagtgacaccgggaggaggcggggtctcgccct

SEQ ID NO: 480468 - DNA, 891 bp, Homo Sapiens
  misc_feature (806)..(818): n is a, c, g, or t
cattttatttttagacaacctacatgacatgttttttctaaaaacaatgcctccactccaaataaatcacagtcaaaataaatgaagagctcaagatgacatcagtcccatttgtcttaagtcctggtgttgtgtggatgacaagcagaagccagttatgatgacagggtgatagatccaaaataattgccacatttgttgacattttttccatttctaaaccatccttaaagaaaatcatatatggggtcacaccatcctcacggtagtccaatagagcaaccatgccatctggattcatgttttcaccaataaagaactggtagtttttgaaattagcaaggatgtgcttgatttgttctgcagcccctgtcataaaaggttttactctttctggtctctgttcttcaagtttccctttgattgatttcatgtaatctttgatgtacttcttgtaggcttcttttgtgaaacttgtttcctgcaggtgatggttcatgacaatatcgacaccagtgattactgtgctttcggtaccttcgccctcggggccttcagcggaggcatttccaacaatgagcgagtcatcaatgttaccttctgtcctactgaccatcttcccctccacctccaggcacaacccgtccgcgatctcccggatcttgtagatgtcggagaacatctcatcgtggctgatgaggtcccggtagataatcatgatggcgactgaagggagacgacgacggcgctagcttagcacgagcctgaaactcggagcgagcgcggtgcagccggagcggcgctcnnnnnnnnnnnnnagcgggcggaaaaggccgactcagccgctccccaacctcatatagagggcacgtcactctacgtcatcgccaa

SEQ ID NO: 480469 - DNA, 1253 bp, Homo Sapiens
  misc_feature (361)..(400): n is a, c, g, or t
tggcaatggcctggttttttgccagagcgctgtccgtagcgacagtagcaggtccacaggtgagcagcgggaccacgtggttgagggcaggggtcagaggtggcccccactgacgttgaggctgctccataggtggccactggccctctcgcaatggcagaaggaactctgctgcccatctgctttcccagggagtgaggcatgcatggctctgcaggcatggaagatggccttcaccagggggctctctgtcacttccagggccttggggatgcgttccactttgttaaaatgagagagaaacagctgcatcgtctccctggaaaagcccaccttttttaaaaaaagaatacaacactannnnnnnnnnnnnnnnnnnnnnnnnnnnnnnnnnnnnnnncccggagagtggggggctcataacccccacagagtccacaaaagaatgaagtaatttcaagtactccagagcactggagaattcacagctctcttcttcctggtctccagcgttcttcttggcgtgaggtttcaccaaggactctatagctcgctccagcaggttcttgcagaaggcctggtggacctgcgcaatggggtcagctgggttcctctgggcacagtctcgactctccttggcagctgacttcacagcccctttccgctccttgaaaaacttctggcccagggggtggcagagccagcgcagggagtcaggaacagcactgtgctcggggccacacaggctctgggctcggctgaggaagtagctggccaggaagcccagcttgcctccacaccgggtcttgagccccatggcagcagtcagatggatctcaaccagtgtgctcggtgggatcttctcctctgcacattcagccaggttcacggcacacaacgccatgtgtacatcggaacaggcggatcctgcaggaagcttccctgtgatgtgcagctggtgcagccggtgataggccagagccgcatcccgggcgctggtcttagcttcgtcttcaaagcctgcctcagtggctggcgtggcccgccggcactggaagactttcttgagcagccagcgcaccaggcgtagcttctgcaggctgtagcggatcacgttccaggagaggctgcaggccaggtccaggcgggaggtgggcagtgcccggcccaaaactgccaggcaggtttgtaggttgccggcagcagctgcaaaatctcctctggcgagatccagatctgcctgtttccgccaa

SEQ ID NO: 480470 - DNA, 1032 bp, Homo Sapiens
aactttggtacaaaaaagttggcgcgaagatgcattttcaagccgatggagatcaaccccgagatgctgaacaaagtgctgtcccggctgggggtcgccggccagtggcgcttcgtggacgtgctggggctggaagaggagtctctgggctcggtgccagcgcctgcctgcgcgctgctgctgctgtttcccctcacggcccagcatgagaacttcaggaaaaagcagattgaagagctgaagggacaagaagttagtcctaaagtgtacttcatgaagcagaccattgggaattcctgtggcacaatcggacttattcacgcagtggccaataatcaagacaaactgggatttgaggatggatcagttctgaaacagtttctttctgaaacagagaaaatgtcccctgaagacagagcaaaatgctttgaaaagaatgaggccatacaggcagcccatgatgccgtggcacaggaaggccaatgtcgggtagatgacaaggtgaatttccattttattctgtttaacaacgtggatggccacctctatgaacttgaatggacgaaatgccttttccggtgaaccatggcgccagttcagaggacaccctgctgaaggacgctgcccaggtctgcagagaattcaccgagcgtgagcaaggagaagtccgcttctctgccgtggctctctgcaaggcagcctaatgctctgtgggagggactttgctgatttccccctcttcccttcaacatgaaaatatatacccccccatgcagtctaaaccgcttcaatacttgtgaaacacagccgttcttctgttctgcagacacgccttcccctcagccacacccaggcacttaagcacaagcagagttgcacagctgcccactgggccattgtggagtgagcataagatggagaaccattctccccagtgtatgtcttgtatccgatatataacgctttaaatggctactttggtttctgtcagaaagttcagaccatggatgtggttaattgtttgtcctcaaa

SEQ ID NO: 480471 - DNA, 1004 bp, Homo Sapiens
  misc_feature (432)..(446): n is a, c, g, or t
aaaatggcagaatttatcggaggatccacaatctagaaatgggaaccactgctcttttgacaggtgccatctcagggcatcactgaaaagtccagaattgcctgacacactggtaacccatgactaggggtcaggtctcaacagatgtctgggcttaagggagttaagtctatgctgaacgatggaaagggagaagaggacataaaaacaaatttgtttttctataccacaaggcttttgtgccaaggtggccatgtgtgtcaaagtcagggaatccctcctcctgggagccaagaggaagtctctcaaaactagaagggaaaggtgttttctccacatcaatccagctttggagacattctattagtgacatatgccccttcccccaaaaacaacaatgaagtgttctgtgtgctaacaacatagcttttnnnnnnnnnnnnnnngtaaaacaaaattctgcatttttataaaacttgataaaaaatagtatttcaaactgtacagtcaccagaagtacacagttatcaaaaatgcacacacttcacttggcatctccagcaccttcagctttctgtgcctggtctgttttggcatctccattttctgcagggttattcccctccttgccagcatcagcttttccctttttccctttgggtaccttctctcccttctttgcaggggcctttttaggcttgggctctggctttggaggagcaggtttagcagacaacctcgcggatcttctctgtggttcgtccttcacctttgctttatctcccttagcatccccttcagcctttctcttgggcatggtggcggcggcgacggcagcgggacgtaggtgctggacgcgggatgcagcggcgcgcgggctttggtcggtccgggggtcgttctcgcctcttcttcacactgctcgggctccggggggtttataaagtttttatagcgctgggagccccggaccggttagaaccggatttcacctcccgccccaa

SEQ ID NO: 480472 - DNA, 1036 bp, Homo Sapiens
  misc_feature (465)..(479): n is a, c, g, or t
agcactgacacattgaaaggaagcagagcaacaatgacacagcacggatgtgggaaaggggatcccccacgggggcaggatggtccatctcaccggggtctcaccaggactccccgctcccacccagggccagcacgagcacctcccgttttctccccagtgcagagcgtggggtgacaggagtgggactggagcaggggacatttggtgggaggcatgtcctcaggcctgggagaccaggctggccccagcctccctgtgcggtcaggggcctgtggaaccttagaggatggagcaggtggacagcaggggtgggcaaccctgccagctgggtactagggctattggggctggagggtctaccccactgtactctagccacaaggctgtggggtggctgctttgcccaccagctgtccccctgataggggatctgggctgcaatacttctgtatcctccctgtnnnnnnnnnnnnnnntacacacacctgggatggtgtctcgacttcctgattccatctggaggagtaccctgcacagctttgcagttaaggacaccttctgggagcttctggatttggaggggaggacgtccatgtttggagatcctgacctgtcactggtgcccagcccagggcgatccacagccgcctttttgcttctctctggcagctcctcccaggcatgggatcctgggcccttccctgagagcacacacgctcacctcacctggtgcacgctcccttgaacctcattcttttttcacccatctacaaatgattgctccttcctattttctcatctgggggttctctcccttgtgtgttgtgtgcgtgctgaattctggggccactcctcccctaagtgtgttgcatgcacactgccccatttgtatgtgcacactcattgccctcccatccagtgggtcacacacacctcacctcccaggcgatcctgtgaggattctgcccctgccagagcaactctcacgtattctgtgcactacgtgctccacacagacaggctctctggccaa

SEQ ID NO: 480473 - DNA, 795 bp, Homo Sapiens
cttcttcatcatctgtttctggaaattcatatattttaactttatgttcttggatttctttatctgttttttaaactgttggcattcctctggcatgagtgtgtctgctttggcaataagtgggatgatattcactttttcatgcaaatgctttgtaaactcaatatccaatggtttaagtctcaacaaaaggcaatgccaggtagttacaaacatgtactacccaatcctgcctgaaggtgggagtcttcagttatgtaacggtccatgtcctgaaggagcaatgaagtataaacaacagtgcaccctgttatcaggcatctgacgtctgttcacttgtgattctgcatttaggtagtcctcaaatttactatcaatgtagttgataacaggctgccagcaattactattatccactgcatctccaaatcctggggtatcaactattgtgagcagcaactgaataccaccttctttgattaaaactttggattgttccacccaggctcaggtgaggcgagtgggcagccggggctgcagctggcgctggccattgaggagcttctgcgcgacagtgcgatcggttgcaccttctgcgacaggggccggccggttggcgcgcagcgcctgctagcgcagagtctggcccttgctgcgcccggccccgaagaccgagaagtcgtaaagctcctcctcgcagtttatgtgcggcggcggccgggccgaagcctggggacacagaactgccagctcagcagccggttacatcccgcccggccacccgtagccagccaa

SEQ ID NO: 480474 - DNA, 289 bp, Homo Sapiens
gacatataaaggcaactttgtacaaaaaagttggccaagcacctgcgcctgtccctgaacggccacggccagtgtcacgtacagcatctgtggttccagtctgtgcttgacatgctccgccacttccacacacaccccatcccactggagtcagggggctcggccgacatcacccttcgcagctatgtgcgggcccaggaccccccaccagagccgggccccacgccccctgccgcgcccgcgtccccggcctgctggagcgactcgcccggacagcactacttctcca

SEQ ID NO: 480475 - DNA, 1013 bp, Homo Sapiens
gctgtaacttttggtggtgtttagaacgttcttttctttgtctctttcttttgtctctgtttttgatgtgctccttgacttctacctctttctctggaatgagatcttctccgcttgggcttttggatcgtcgccgactcctagacttagaatgtgaccgccgtctcgatctgcttcttgaccgcctgtgtctagaagatgagggagtcctcctcctcctagaacgtgatcttgatcttgaatgccttcttttttcttctttcttatctggttctatagcagcagaaattagggactgtgcttctcgtactcttttcatagcttcctctatttctttactagaggtatccgatttcagacttggtgaaacgagaccagcagctacatgattcaacttgggatcaacagtactcataagcttcagcaactgatctgcagcaagagactgagagttcaagtttgctccaggaagcccaagtgcagcaagggcaggatcaagagtaggagcccccaaagcagccagtggaacagcgccaatctgggtaagtgggttaggagtaggcaggagtccaccaccaggcagaagacctgccactgcattagctggtgccaacagagacaaagctttagcttcatcaggaataactccttctgcatatggtacgactatcaaagctctgtcaacgaatacagtgtttgtcagatgctgtgccacaactgctgagtctggatcatggaacttaacaaagcagacacgagatgagactggcaaaggcgaatcatccggcgggaagaggcgcagttcgtcgatcttgcctaggaaaccgaagagagtccgcatctgctcagagctagcgctcggggagacattagtcacctggattacctcggtgccgccgcctccgccgccaccaccacctccgccaccgggcccgccgctggggcccggacctgcagtgctggggacgacggtagtgttgctcatggcgctgctcgggttctcgctcttccaa

SEQ ID NO: 480476 - DNA, 1371 bp, Homo Sapiens
ctgggcagggaagctagagccagaatcaggaaaatctgcttccttgtccccagactccctggccaagcccagctccactaactcatcttgactcgatcaagttcctcatcaagacttgcatctgtaccctggacatctctgctgctcccactggagagtgagtctggagtccctggcactggggctttggtgagggctccatatacacccatggcctgagccaccatgctggtgacatcgccagggttggagggcagtaggatagtgttggagtccttggccagtttggagaacgcgctgacatactgctcggccacagtcagtgaagctgctgcatctccattatgttgtgtcagagctgcagccaggattcgaatagcttcagctttagccttggccttcgccagaactgcactggcctctcctgctgcctgatttatctgttcagccttttctgcttcggaggccaggatctgggcctgtttcttcccttctgccacattgatggccgactctcgggtcccctcagactctagaactgtggcccgtttccgccgctctgcctccacctgcatctgcatagactctttcacccggggtggcacatggatatccttgatctcataacggaggcagcggataccccagcagtcagcagcttggttgatggcatccacaatgctggcattcagggactcccgttcccggaagactttgtccagagagagtttgccgagctctgatctcatggttgtttgagctagctgggtgacggcatactcagggtcctccacaccgtagcttgccttgtaagggtccatgatgcgcaggtaaaggactccatcgatttgcagagttacattgtcgagagtcacagccgactgctcaggcacgttgatgacaatttccttgagactctgcacatatcggatccggtctaacacagggatgaggatgttcaaaccaggctccaggatccggtggaatcggcccattcgctccaccacccaggcctcctgctgcggcacgaacagtaccacggtgtttcggggcaatccagaggaggcgcggcgcggagcgcggccagaagccagtagagagccctgaaggaaagaagagggtgagcagagatcccatctggccagacacgccgcccctcggtcctgaaggcatctccataaaccacgaccctcaggatcctcggagaatcacatggggaccatgacctctgaccccagtcctctccaaaagttggaatttcgctcttttccagcggagaacccaggtaatctctgtcctgaccctctggaaaggttgcctcgctctcaccctcagcaaaagggccccagtgccccgcgccgcgcgcgccaa

SEQ ID NO: 480477 - DNA, 1525 bp, Homo Sapiens
  misc_feature (207)..(237): n is a, c, g, or t
  misc_feature (727)..(741): n is a, c, g, or t
ttggagttaattctagaaaggcaatactaaaggtatatatttttttcaaaatgctattttttactgcacttgataattatcctgacagctctgatctctgtaatagattcactcttcagctctgggcagaaccagaggcagggttcacaccaaatttgtaaataccatatgtgggtctggtgtccaggaacttttttctttctgttnnnnnnnnnnnnnnnnnnnnnnnnnnnnnnngaagtagaggtggaagaaagacaagacttagaggaacaaaagaatgttttcttttgagatactcttctcaaagaaatagcaacaattgtataaacaggaaaaccagccagctttcatgataaaaggaaggcgtgtctcttgccctggtatgagattaacagaaatacagatgcatttttattttgattgaaagatggtgagaatgtagaaatgcttaggactagatttttaattttttaaaataactattatcatttattatgaaatatttgttcagttgttttgagtgggtttcttgttccttttttcatttaaaaccttctttgttgactggctccaggcttgtttgcctaaattcttaggtagtttacacaagttctagaatcttttagaactttaactccattggaagcaaacctaactaatcggagtttgagatcctggttggtttcaataggtattctggaattctggcagaacacctaaagannnnnnnnnnnnnnnagaaggttttagatacattatcttacacaaactgtgacctaatggcaataattacctcaaatgtgggcattcatcctgggttttagccttttttgaaatcatgtagccagcttgatcttggaatttaaagactatgaattctctgtgggctgaaaataatgattacttcatacccccggtcatcgttgcttaagtgaattctgaaaatagctcatctttacaacaaaaattaaaccaaggaagagattattctttgtgtgttgtactcaaatgcgatgttcaaatgcacatgttaagtatatatgtttttagctactgtaaaatgctgttagccttctaagctatcaaaacagtcacattttaaatgagtaaactaaacaattgactgtggatacttaagcatatttctggctacgttttatagttaaagtgttttatagtttacatttagactggtactttttaaagaaaagttctgtttataactgacatccgcaaaccccagtgaatgcctcttagttggaggttgtgtctcccccaaggcaagtgtgttgtcccagactcttctgtagtccagcatgcgcacttccctctggattattactttccacgtgaactcaagagaacatgaaaggcaatccagatggagggaaaaggtgtgagtccgcagcccgggccagatgcgaaggtctcatgcgtgtcgtctaaacacttgtcttcaaagccttctctctgacatcttggaagagtcattgagaacagataacctgggttcattgatttt

SEQ ID NO: 480478 - DNA, 1001 bp, Homo Sapiens
  misc_feature (422)..(460): n is a, c, g, or t
gcacgtggaatcacagggctggttgcatgcaacggcaaagggcatgctcttctgcctgggggagggctcttgtccctcccagcaggtctcgggacagggctggcagccaccccagcacccaaaataagatgacaaacaagaggaaacaaaccaaaatggaggagagccatccgggctggaggagggcagaggctccccaaggggatctggggagggcttcaacttatgaatgcatcaggccttggaagacatggatggaagaggcgagggcaaaaggaagagatgaggggcatggagagagactcagggaagaaggagaaagagcaatcatgcagcttgggacaaatcttttgttgctttatcagattctcagtcaatcaattggtgtttgctagaaccggggtacgcaggggagtgttgannnnnnnnnnnnnnnnnnnnnnnnnnnnnnnnnnnnnnncgggcatcgccagctgcccggggggccttcactttgcagtcatcatctgtacaaactcttcataattgacctggccatctccatcgatgtcagcctccctgatcatctcatccacctcctcatcggtcagcttctcccccaggttcgtcattacgtgacgcagctctgcggcgctgatgtagccattcccatccttgtcaaagacacggaacgcctctcggatctcctcctcactgtctgtgtccttcatctttctggccatcatggtcaggaactccgggaagtcaatggtcccgttcccatctgcatccacctcattgatcatatcctgcagctctgcttcagtggggttctgtcccagggatctcatcactgtccccaactccttggtggtgatagtgccatctccatccttgtcaaagagggagaaggcctccttgaactctgcaatctgctcctcagtcagctggtcagccatggcgaggcccggggtgtccggagcacggggatcaaggttcctccggcggcggcagcagcccaa

SEQ ID NO: 480479 - DNA, 1194 bp, Homo Sapiens
  misc_feature (1027)..(1039): n is a, c, g, or t
aatatcttgtcattctcggcactgtctctaaagaaaaactccattatcccaagcaaaaagcacagaaggtggagtttggcttcaagagatgttaactcaaaatcttaggcctagcagagaatcaccaaatttatggagagttaacaggggtttaacaggaaggaagtgcctttagtaagttctcaagccagaggctggaggcagcagctaaatcagaggacagcatcctcagtgaaagtgagccattggggggggcatgtcactccaggaataaacacaacttagaaacaaatgatttcgtaggatagcacagtgacatggtgcactgtgaacgtgaggccactgtgtcaaactgtgcactggttgtgaatagggagagccaaaaattatgtcctactggtaatgagctttcaatggctcgatcctctcacactgaagctctgtagagcagctcagagccacaaccactcccaacattgacccttctgggggtagctgtctgtggcagcccacaggaaggagctggagatccccattaggactgtccacccacacttgaagccacaaaactgcagggattggggctctcatttgtttgggtcgcctaactcccgcctaaaaggccacaaatttctggaaaacaggtaacagaccaaaaactaaagtgcatcagtaaaatgaacatttatctactgccccgaatctctggcttgacactacctactggtgtccagttggagacagactaaaatgcactgaaggactattaggattgctgcctcctaagttatcacagcctcgctctgttgatgtgaatgaggaactgcttggttgttaaaggagattttgctccctgctgccccaaacaggtccttatctaggtttgctccccactgccccaaacaggtctggcaggattggttacaatgatctccagaggctcaaccattccccttccctatccttgcttgggacatttaatcacagccacctagtagaggccgctcagtaaggggataacaaactnnnnnnnnnnnnncagggcaagtttaggggaaccctacgatgctgtaccttgatacacataatcagccttttcaaaaatgcctgacaagaattagtctttcctttgtgctgaagtcttcccacccatggatggaagcaggctgactccctgagggtcaggcaagccaa

SEQ ID NO: 480480 - DNA, 558 bp, Homo Sapiens
aaaggacataactttattggaaacaaagagtggggtgcagaagatggctaggagtcaggctctgtgggaggtggtggcttctcatcatcagggggacaatcgatgaagtcggccagcatggcagttgtgtcatcctgctcgggttttcctggagagcttcggcctctgtctctgtctccatctcttctatctgcaggtgtctctggtgggggctgcaccttgtcactcccatcctcagtctcctcttccaacagggttgggggagcagagggctcttcttcaacaagctcctggggagggggccctgccgcagggctttccccttccctctccacctctccctgggaggggagcgcttcaggggccagggtgggagctgtgtcagccccacgctcctcctccgtccctggctcctccacttccaaaagcagcccgggttcgggttcgggttctggctgcacctttgggggagactcagggggaggcagagctggaggcagggttgggggtggaggtgcaccttcttctacctcccctcctgctgtgccaaactccagg

SEQ ID NO: 480481 - DNA, 909 bp, Homo Sapiens
  misc_feature (120)..(143): n is a, c, g, or t
gttgttgttgttttttaaatcaccctccattactcaacattctcgttcccagatgaattttaaactggagttgcaccaactgtgagacagcctcaaccccaatgttaaatactaccagtnnnnnnnnnnnnnnnnnnnnnnnnaaagactgaaaacagttctctctggaaaacgatccaccaacctttttatgggaagaaggtcttctctaacactttaacttaagggaagaagtgatggagaggaagaaggaaagtacactggccaatactctgaaactgactgacttgggtatctgtggtccaaagaggatcccgaaagacagtgactctgtctcaatgattattcccatcccaattaaaagtcataatgacagcatttacattcacacagggtctctttccaagaagtttgtgagtcacctacatgtcttcaattctcaaggcaacagtgggggcaacaaggaggttgacagccaggtcctgtgagagctgtttgtcaaagcccactctcagtgagtcagtccctggaagttgggttcagtgcacggaggcagggccactgactggcttagcaacgtgtccatcatgctgattttagcatcttgcttctcaatgtcctcatacggagtccaggacaagtcatgctgtagtttgtaggcaccaaggaagtcatgtggacaacttgtcccccattcctttggagaaatgatggaaaaatactgctgaccactctcccgtttatagagatagtaaatgttgccaggttttttcactatattacaagctacatggtgcaggttggcatctctgtgagcatcttccagtacctccctggcctgcagctggcggcgctccttgcctttcaaggaccccctcggtccgccccggcgcggcggcgtcctcccaa

SEQ ID NO: 480482 - DNA, 1089 bp, Homo Sapiens
  misc_feature (842)..(900): n is a, c, g, or t
  misc_feature (986)..(1044): n is a, c, g, or t
cgataaaagccccctttgtacaaaaaagttggagatgaacaagccagaagacttcagggaaccaggatgagattctggtcatccgcaagggctggctgactatcaataatattggcatcatgaaagggggctccaaggagtactggtttgtgctgactgctgagaatctgtcctggtacaaggatgatgaggagaaagagaagaaatacatgctgtctgtggacaacctcaagctgcgggacgtggagaagggctttatgtcgagcaagcatatctttgccctctttaacacggagcagaggaatgtctacaaggattatcggcagctggagctagcctgtgagacacaggaggaggtggacagctggaaggcctccttcctgagggctggcgtgtaccctgagcgtgttggggacaaagagaaagccagcgagaccgaggagaatggctccgacagcttcatgcattccatggacccacagctggaacggcaagtggagaccatccggaatcttgtggactcatacatggccattgtcaacaagaccgtgagggacctcatgcccaagaccatcatgcacctcatgattaacaataccaaggagttcatcttctcggagctgctggccaacctgtactcgtgtggggaccagaacacgctgatggaggagtcggcggagcaggcacagcggcgcgacgagatgctgcgcatgtaccacgcactgaaggaggcgctcagcatcatcggcgacatcaacacgaccaccgtcagcacgcccaatgcccccgcccgtggacgactcctggctgcaggtgcagagcgtaccggccggacgcaggtnnnnnnnnnnnnnnnnnnnnnnnnnnnnnnnnnnnnnnnnnnnnnnnnnnnnnnnnnnngggtcgcggagccctgctcctgggcctccgcctgctgggtccgccctggggggggcgccccccgtgccctccaggccgggggcttnnnnnnnnnnnnnnnnnnnnnnnnnnnnnnnnnnnnnnnnnnnnnnnnnnnnnnnnnnncggggtccccaccgatcgggtcaggctagttccatccgtccctga

SEQ ID NO: 480483 - DNA, 874 bp, Homo Sapiens
  misc_feature (618)..(646): n is a, c, g, or t
caggaaggctttgcctgccattgatgttcactgcctccagatccagctgaatatcctcccagtgcctgcagggatgctctccatcctctcggcatttctctctctgctttccctcttcacgttcgtctgcttcctcctccgccgccgccgccgcctcgtgctgctcgtcatactctcccgctcatcctcatcctcatcctccactatgatgatcgcctcttccttgctcttcgggtcaactaacctctggggcgcccaccccactgcgctacaggtttctagggccccctctccaccaaaactgctcgactgtacaacctgaaaatcgatttccaggctcccccccgaggcctcaggagtggggagtgcttccaggctctccgtgggcgggggcgcctccccataccccgactcgatggtagaatcccagccgggacactcagcaccgagcgtgaagtatgcgcggatccccccctcctcgagaatgacatagggaggcggcgggggcagcgcggggcccagtcccacccccctcatatcggccagcacctgtgccgcctccgtttcctcctggagcctcgggcgctgctggggtggaggcagcggcagtcggaggannnnnnnnnnnnnnnnnnnnnnnnnnnnntcgcgctgtggagactcggagctgctcaggcggcgggtcttggccggaggcccctcatctgggcggtccatggcgaccgcgttcgtacagctcaggggactcgcactcgccccttcgcttttagccgcgtcgctgccgctagtcgcaccggtaagcagagctgaggagactcacgctattccaggtctcctcaccccaacttttttgtacaaagttggctattacgag

SEQ ID NO: 480484 - DNA, 1318 bp, Homo Sapiens
  misc_feature (680)..(711): n is a, c, g, or t
gagccgaggaggaggttccggacgctgcttaggaaccggggactcaggagtgcccgcgccctgagcgctcagctccagaggcgtcatggctgagtacgggaccctcctgcaagacctgaccaacaacatcacccttgaagatctagaacagctcaagtcggcctgcaaggaagacatccccagcgaaaagagtgaggagatcactactggcagtgcctggtttagcttcctggagagccacaacaagctggacaaagacaacctctcctacattgagcacatctttgagatctcccgccgtcctgacctactcactatggtggttgactacagaacccgtgtgctgaagatctctgaggaggatgagctggacaccaagctaacccgtatccccagtgccaagaagtacaaagacattatccggcagccctctgaggaagagatcatcaaattggctcccccaccgaagaaggcctgagcaagggggaggaagaggaggaaggttggaccttcatcagaccactcccttcccccatcctccaggagagggggcaagggcaacccaccatctacccacttactaacctggtcctaacccccttactgtgcgcgtgtgtgtgcgtgtgcgcacgctctggctgtttgtctatatgtctagctcatctagttcctcttcttannnnnnnnnnnnnnnnnnnnnnnnnnnnnnnnctgagtttccccactttaggaggaggtgggggctatttctatgcaaatagaaatcagcacattcctcctactttccctttcctccactccccccatatctttaaagtgtggaagcagaaaggacctgcattttcctacattgaggagctgacataggggtaaggtatgggagaggtaggtggatccagggaaaagcagtggggacggaaggcaaagagaccactcaacccccacctggaaggggcaaagaaaagccagagttccatgtttgtactcctgtgctggactgtttcctgagtaccagcaggtccctttttgtctctcatgggcctagcataggtatgagccagggatcctttcctggtccctaagatcaaaccccatggagcagccagcgttagatgcccccacccacctgtactctggagagactgtgctgggaacatgtaccactgagcctgagatggggatgagggcagagagagaggagccccctcttccactcagttgttcctactcagactgttgcactctaaacctacggaggttgaagaatgagacccttacgttttaacacgaatcctgacaccaccatctatagggtccc

SEQ ID NO: 480485 - DNA, 854 bp, Homo Sapiens
taagaagccgtgacaagcagggcagagtcgggggagaagtcacaagagacaacactgctttgatggccctctagcttccgaattaacgtgtaggacctcatgctccatagaaagaccgacttctctccagctgcagagcacagcatgctgcagtctggggagatggaacagcagtaaacccactgcaggtggcccgataacacttgaatctgtttaccgtgtttattcaggtcccagatgcgaagagtcttatcccgtgacgcggagaccaaaatcaaactgccactgggtgtgaagctcagatctctcacgacatcttggtggccggaaagattcaaaagcaggagccctgtctgcacctcccagatcttgatttgcccatcgttgagttccgtagcaagaaccaggcaagatacatcgggcacttgggggtggtggcgttcccagagtttcctggtgggtggggaaggccacgggctgaaggccagcccccagacaatctagaccacagtccggggtcttgtcttttgggttgccccgccctttcgtctcatttttggtgcttcggcttttggcttcaaaccctttagggatgaactgctcctccaacggccaggggatcagtttgacgatgcagtgtccttgagaccaagcaaaccaggagccatctggggagaaggcgacgctccaggtttcacagctggacttccaatcaaactggtgggggcgcccgggcttgagttcggccagcagcagcggttcctctccggcctccatggaggacgcgagcggcccaaaaggctttataaggggcacctcacccaacttttttgtacaaagttggctttttacgc

SEQ ID NO: 480486 - DNA, 894 bp, Homo Sapiens
ccttgttccttctgaggttgcatctcgcacaaatccacaggtgaatggggcgggctgggccacaggaagcctcaccccaggacgggagaacgtgggtggaggccacttgccttggggagtccagaggagcagggggccgtgagagctgtgggggccggattctggcagggcaggggcgtttgtcctgcagggatgggggtcgctgtgtgtccgcctctaggggctgtcaggcggtagctactgcaccagccggtaggtgatgtacctgccagccgtctcactgggccggatgatcttcaccacctgcccacgctttatcccaaagtagcgcgccacagggtcccccgcctggatcctgggcagctggttctctcggagcttactgtatcgggccagcagctctgtcacctcctccttggtcatgacgacgtgctcagggactagctcgtgctccgtgatgttgatgagcagctcctgctgcagaaactgctccaggatgtacttgggggccatgtcgaccagggactgcttggcggagggtgtcatgccctgctgcaccacgatgagagcccgtgtgatgttctcctcctgcatgcgctggcagtacaccttgatggtcttgatgcccaccttgggctcctctggaaagaacacaaacatctggtcggtggggtcatcgttgtgggccaccagcacggtgaggtccgtgcgccgcggccgcccctcactcggcttgtccccaaattgggctttgaactcctccagggtctggtcaagctcgtcctgggtcaccagatagccacggtcgtggcacagctgcatgatggtcttgcggattttccagagccggtacgtctcctcctcgtcgtccatggcagcctccgccgccgccaa

SEQ ID NO: 480487 - DNA, 950 bp, Homo Sapiens
ttttatttaaaaaagcacatttaatacaagtatagtttggcaggatacaagtttcactttgtatgctacaaaagtctttgaatattattctctttacaaaaatgaaccttacaaaaattactgacaatttaatgtttttatacagttttctctagttgcagtttttttcattataaaaacaatgttctaccacagaaattatgatattttagtttgatatttaaaaaaaattaactcaatgcttttttaagcagctaaatgtatataacacaggtcgagacacagtttataatcatagtggatatagctaaattgttttcagaaataatatcttacatagttaactttttaatgttttatacattatttatataatatttatatataaaaatcatagcttgctataagttgaaatgaaaggacggattctgtagtaaggatgtgcatgtggttgatccatatggttacatttaaccctttgaaaggtctgcatccaagatctaaacgcatttcttccttcctcctttcctcaaaggttcagtagaaggggtccctgtctatcacctagagtgggaccttgcatggaaggacacttacggatagaggatgaggaaaactctctaccgagatttaacccatatgttctgcccagcagaacctaccaagaactgccctagggctcaaccccaagacaatagtgctttacacagcaagagcaactcctacaaagaccctcagctctgtcatcctgaagggtaacctctcatgcatgagactgcctgcttctctggctccttctgatttgcaacagctaaaaggttggttcgattttcattctgcccccttcaccctcccatctgttgtacagaaggctgctttccgtcagctggtggcagaccattctctggctcattcccccaacttttttgtacaaagggggcccttaaaag

SEQ ID NO: 480488 - DNA, 1201 bp, Homo Sapiens
tgccctggaaagggaccgggccaggcgtgaggggaggaatgtcgcgttggtcaggtggaggagggagggcgcagccaccgggccgggcaggtgcaacgcatgccccaggcccggggcccgggagagcaggaacgattgcggggcatccactctgcaagcaaagcttaaacggcacgacaagcctgtgtttctctgcaactgtccaggggccgctcgctcagaactgactggcactgctggggtcgcactgcagcaggcggacgatggaggggtcgctcttggcacctctgatgaattcttccaaggacagtttgccgtcattgttggtgtccatctgcctgaagatcttgtctgtgcgcttctccggggtggactcatcctccggcatcttcatcacagacgacaccatcttgtagatggcctgcacgatctccagcatctcgctgcggctgatgtagccgttgccgtccaggtcgtacatgctgaaggcccacttgagcttctgctccagcttgccccgcgaggtcacgctcagcgcaatgatgaactcccggaagtcgatggtgccgtcgccgttggtgtcgaaggtgcggaagacgtgctcggcgaacttggaagcgtcgccgtaggggaagaagttggcgtagatcttcttgaactcgtccacggtcaggtggccggtggggcagtccttgaggaagcccttgtaccactcctgcagctcgtggtcggtgaactccgtgttctcccgcaggtcctgcagcacctcgggccgcagcttgctgttctgtttgcccatggcggctggcggcggcgactacaccagagaccaggcggaggctgagagggagtgggtcagaacctccagggagtgtttccgcgtcctgactgggccactagaccatgcccatggcaggactcagtggccctctgctccccacatcacagagctggaggggaatccttgtgttgctgcagccaccccggcacagggttttcagcctgagagggctccttgatgtgatgggcaggttccagtgcgaaggtggccagcctgaggcgaccgtgagtcctcaggcttcccccagtcacagggcaacgccatcggctgccgccagcttgggagatgtgcttttgggaaaatcaagtcaccacagcattctcctgctgtccctccccactcggtttagatgttggccaa

SEQ ID NO: 480489 - DNA, 820 bp, Homo Sapiens
ggatggtaggggtgacagctgccgcaggaccagggcttgttgatgagaagcagcccccaggcagggcaggaaaacaaccccaatcacaacacagaggggaaggacagcacgcgggcaaactccttgggttctggctccgccagggagccgggccggaaggcaggtgggtggggacggccatcagggcccaggcggagatcagcagagcgccctcaggtggaggtgagtttaatggcggagcagctcacagccctttcccctgggggccaactccccacaacagagcagggctgggccagcagaagacgttaaaacccaaatcccgacaggaggcacagacctgcacatgcgccacacccacacacatactcaggggactgacaggacacatgggacacagacccgccctgcctgtggccagagtcctgtccaaggcaatggcgtaggctgcgcctcagttcatccgagtccctccccagctcactggtccaggccaagggatgggagaggctttgagtctagaccttgtacagcgtctgcagcagactgtggcgggcgaaggagcaggattccagggcgctgttgggcttggtcacgaacgccagcagcaggggtgcaagggccttggggaaatagtcctgctgcaccatgtggttcagcgccatcagggggccgtacaggttggcaatggccttgaccttgtcttcactcttgagcagacccatgtgcacgaggagcctggtgaggaaggtgttggagttgaaggacgaggagttgaaagccttcccaacttttttgtacaaagttggcctttataagg

SEQ ID NO: 480490 - DNA, 882 bp, Homo Sapiens
  misc_feature (648)..(657): n is a, c, g, or t
ttggtggagcgatttgtagtaacagcaccacctgctcgaaaccgttctaagactgctttgtatgtgactcccctggatcgagtcactgagtttggaggtgagctgcatgaagatggaggaaaactcttctgcacttcttgcaatgtggttctgaatcatgttcgcaagtctgccattagtgaccacctcaagtcaaagactcataccaagaggaaggcagaatttgaagagcagaatgtgagaaagaagcagaggcccctaactgcatctcttcagtgcaacagtactgcgcaaacagagaaagtcagtgttatccaggactttgtgaaaatgtgcctggaagccaacatcccacttgagaaggctgatcacccagcagtccgtgccttcctatctcgccatgtgaagaatggaggctccatacctaagtcagaccagctacggagggcatatcttcctgatggatatgagaatgagaatcaactcctcaactcacaagattgttgactaggaggttaccaccattgtgatcaagataaatgtggagtattaaagttatgtgttgattgtgtggttcatttttgtatttatttcatttaaaatcatgtgacgcagaatagttttgcaatgtgtatatagttgcaggcnnnnnnnnnnccacctcactgcaaaacttattgttaattttagtcaccaatggtataaagcaaaacctagggttagagtgtgctaggatacctgaaacctgatggttatctttaaaattaatggtttttctcctgaaaatgtttgtgcatggaagagctgccctgcttttttaccctgttgccatgtatgattattcctttgtgagattacttaattacttgggattgaagacta

SEQ ID NO: 480491 - DNA, 1419 bp, Homo Sapiens
ttgggggccttgccgagactcaccccttcagcgtcgctgcccccagctcagctcttactgcgggccgctccgacggcggtccatcctgtcagggactatgcggcgcaaacatctccttcgccaaaagcaggcgccgccaccgggcgcatcgtggcggtcattggcgcagtggtggacgtccagtttgatgagggactaccaccaattctaaatgccctggaagtgcaaggcagggagaccagactggttttggaggtggcccagcatttgggtgagagcacagtaaggactattgctatggatggtacagaaggcttggttagaggccagaaagtactggattctggtgcaccaatcaaaattcctgttggtcctgagactttgggcagaatcatgaatgtcattggagaacctattgatgaaagaggtcccatcaaaaccaaacaatttgctcccattcatgctgaggctccagagttcatggaaatgagtgttgagcaggaaattctggtgactggtatcaaggttgtcgatctgctagctccctatgccaagggtggcaaaattgggctttttggtggtgctggagttggcaagactgtactgatcatggagttaatcaacaatgtcgccaaagcccatggtggttactctgtgtttgctggtgttggtgagaggacccgtgaaggcaatgatttataccatgaaatgattgaatctggtgttatcaacttaaaagatgccacctctaaggtagcgctggtatatggtcaaatgaatgaaccacctggtgctcgtgcccgggtagctctgactgggctgactgtgggctgaatacttcagagaccaagaatgtcaagatgtactgctattttattgataacatctttcgcttccacccaggctggttcagaggtgtctgcattattgggccgaatcccttctgctgtgggctatcagcctaccctggccactgacatgggtactatgcaggaaagaattaccactaccaagaagggatctatcacctctgtacaggctatctatgtgcctgctgatgacttgactgaccctgcccctgctactacgtttgcccatttggatgctaccactgtactgtcgcgtgccattgctgagctgggcatctatccagctgtggatcctctagactccacctctcgtatcatggatcccaacattgttggcagtgagcattacgatgttgcccgtggggtgcaaaagatcctgcaggactacaaatccctccaggatatcattgccatccttgggtatggatgagtttctgatgaagacagttgacccgtgtcccgtgcacggaaaatacagcgtttcttgtcctcagccattccaggttgctgaggtcttcacaggtcaaatggggaagctggtacccctgaa

SEQ ID NO: 480492 - DNA, 882 bp, Homo Sapiens
  misc_feature (354)..(390): n is a, c, g, or t
ttggcagctgcgtcgaagcttctctggttacggattacatttcccagagggccttggggcacagtccaatgaggagcgagcggggtggccggctgaggggcgtgcttcatgctcgcgggatttttaaaaatggtttctcctggatcttatcccaactgcgcctgagaccttgtttcacctcctgatgtgctgggtgtggttaggcctcgagccgggagctatttgcctcccaggaggaagccagggcagggttccgcggggaatggcggtgagggagccactcgggacgcggaggccctaaaatgaagaagcttcggcctgaggcttcgggagcggcgagcagggaagtgggannnnnnnnnnnnnnnnnnnnnnnnnnnnnnnnnnnnnaataagccagaggctgcctggtggggccccgccgtggcccagtgactgagataattgtcttcgtctgtggggtaatgcgaacaagccccgttcccctaagccgtgatgcatgcggggttgacgcggccgggctctgtccccataaactgtgacacaggtgtgtgtagacgtctatgagggccatagcgccgggctgtaagggcatctgtaggggtgacgcagccgggctgtgtctctgcacctccgttctgtgcgaggtcaatgctggtggggtctgcagaggtggcacggccaggacgggtctccgtgtctctgaaatgtgcctttgcacttctgtcatgttgacagggacaggcagtgtctctctggtgtgagcgtctgtgggtgtgaaagggcccagcgagtgtgcggctgtgactgggtcgggatcgggcctggatgcatggccttttgagtgagcacaggtgtgtgcgaccatgtcacctgtctttc

SEQ ID NO: 480493 - DNA, 895 bp, Homo Sapiens
accgataaggcccactttgtacaaaaaagttggctccaaccacctctaaaagcaaaggcatcctggccatcttccgggccctcctccagaacaacacgctgaccgagctccgcttccacaaccagcgacacatctgtggaggcaagacggagatggagatcgccaagctgctgaaggagaatactaccctgctcaagctgggctaccattttgagctggccgggccccgaatgactgtcaccaatctgctcagccgcaacatggacaagcagagacaaaagcggctgcaggagcaaaggcaggcacaggaagccaagggagagaagaaggatctgctggaggtacccaaggccggggccgtggctaagggctccccaaaaccttcacctcaaccatctccaaagccctctccaaagaactcacccaaaaaagggggtgctccagctgccccaccaccccctccccctcccttggctccaccccttatcatggagaacctgaagaattcactctcaccagctacccagaggaagatgggagacaaagtcctccctgcccaggagaagaactcccgtgaccagctattggctgccatccgctccagcaacctcaagcagctcaagaaggtggaagtgcccaaactgcttcagtaggaccaggctgccaggcaccatctgccaatgccatgactgctcaggcctcacctcccagggctacacagaccctgcccaccccatccctggctgacctgctgtggatgtccctattctgccatgggagagtccaggcctgggtcacgctcaagaaaggatgccttatctcttctcactttccttttcttgtctctggaggctctccaattttggctttagtacatggagctcaggtttctgga

SEQ ID NO: 480494 - DNA, 865 bp, Homo Sapiens
agctcttcccttggagaacaccttgcccaggggtttgttgggggtgttgaggaccagggctttggtgcgtgatgtgaatttgcccgggccagctccatggggtccagctgccagttgctgctggaacccagttctccattctggatgggacccggcttcagggacacaaacacaggacgaccccctgccatcattgtcatgggctcgtagcagtcaaaaaagggttcgatgatgatgacctcgtctccttcgtccaccagggcctggaaggctgtgaacagggccccatagccaccaacagtcaccagcacattcctgagcgggtctatctcctgacccagcagctccccaaagaaacttgccaggatcttcgtcagtggtgggtaaccaaatgtcttggtgtactggttaagcatgaagtctccactgacagcgtgctgaaaggcttccacggcaaagtctggtggtgggaaatccgggaagccctggcccaagttcacgacgtcatgctcactggccagtttcacaaactccacccaggggttgtagtcgatcccgtctagccttcgggcctgcagctgtttggccatggcgagagtctggtgcaagaaccaagtgagtggggctccagccttccttccctgaaggggccccaccaggtgcacagagatggctgctgcagtcctgaacatgcctcccagagccttggggcactgcagacttttccagaggcaggggagaagggaggaaacagccctggccagaaaatgcctccgagctcaggacttgggtcccccacacacagctcctcatcttgagggcgcttcaccccaacttttttgtacaaagtgggcccttataaggt

SEQ ID NO: 480495 - DNA, 899 bp, Homo Sapiens
tccctgtagccgggctgtcaactgcagcagcaaaggaatgagcttgtcatggttgtaaccggccagcagaacccagcagcgtcaatggcagggcaatgtaggatccttgtgcgatgtcctgttcaggcagcttcctcgtgggatttaaaatcaaggtgatgtgtttatggtagcccactgcggtgaaagaaacttgaggcaagatgtagtcatactgggatctggggagtgtggagtccagaagcacaacatagttctcgccgtctctgagcagtggggggaaatggaagaacagggactggccaagggaaactgtctggattggattgtcgaggttttcgcttttgtaaagcttgacccataatgtaggaaggtattcagaggaagtgatcacatttccacttaaatcaaattgattaatctgccggaaaactatgatgtttacatcatcgatgtcattattcccaacctcaatcaccctatggtgggggagcgcccgctcaatgtggtcgttgccttctgccttgagctgaacgtggtacacacatcccggcagcaatccacgtaatctgaacttgccctcttcgtctgtcacggtgtcttctccgtaaatgctgcagtcgttctggcccaccgcttccatggcaaccccttgttcgggctctccgtttaaggaagacactgtgccatagcaactgtaagcggttcggtaccccgtgatggtgatcttcaggttctggccttcctgcacctcgatcatctgtgaggatggctcaaaccggaactccttcatcatgggtttgaagtaatactggccagggctcaggtttgagaatgtcagaattctctgtgttcctgggtcccaacttttttgtacaaagggagagccattatggaag

SEQ ID NO: 480496 - DNA, 1000 bp, Homo Sapiens
gccctatgttggcttagctagctctggtgctgaagaataagcaccagattgacctcgagtggtgccctaggaggccagttgaagtggagctccttgaccaaggcctggctaagtggcatcagatgaccacgctgacggtcatattctggccatggggggctatcttgcggggccaagcgaccaacagtttgcgcagctcctcgcggaagctgtcgtgcagccaggcgtagatgaaggggttgtagcaggccgaactcatggcgagccagtggcagagcagctgcaccagcccaaaggcgtaagggtcgatggcgtgggggtcgaggtcccgcagcaggttgaagacgtgcagcggcagccagcagacggcgaacaccaccacgaccaccaccagcaagcagaaggtgcgccggcgccgagcgcggtcccagtcggcctggctctgggtcacgcagcccggcaccacgcggttgcggagcttcactgacacccggacgtaagacaggaggatgaccagcagagggagcaggtaggtgaccagcagcagcccccaggcgtagagctggcgctggcgctcctgggagccccagaactcctcgcagaggcgcacgtcgtgcggcttgagctccacgtgataggtgtgcacggcgggcggcagcgccagcaccgcggacagcgcccagatggccagcacagcgtaggctgaggcgcagcgagatgcgcgcctcagcgggtgcaccagcacgacgtagcggtccactgcgatggtggtgagcgtgaacaccgacacatagacggtgaccggctgcaggaagaagaccaggtggcacaggccgccgccgaacacccagccgcgtggctcgaaggcataggccagcgtgagcggcacgcaggcggtgcacatgagcacgtcggacaaggccaggttgccgatgaggaagttcgtcacgttgtgcagccgcggcacccgcgcgatcaccagcaccagcaggcagttgcc

SEQ ID NO: 480497 - DNA, 723 bp, Homo Sapiens
gatcacaaggaaaatttaacttcccagaagcggtaacgtgaagaagaaccagcctaaagccaactggaataaatgtttaaaggccagggagactgagacttggcaagaggtggcatctctctctttgcgggttctcagttgtggtgagggtccccaggaccaccctcaggttcagtgattcactagaaggactcacaaaactcagaaaagctgttatattcatggctatggtttattacactgtaaggattcagattcaaaatctgcaaaaataaaataaaaatggcatagggtggcgtacaagagaaaccagacatgagcttccagttgtcctctctcagtggaaaaacacagacagggcttaattgtctctgcaatgatacgtgcctatgcacaaaatattaccagccatggaagctcacccaagccttgatgtccaggatttctatgagggtcagtcatatagacgtggggcacccacgtggtatacaaagacattcttatcaggcagagtattccaagcatttcaatcacttacattctgataatgcctcttgagcagagaagaaagtaaatggttcccttacacctagcattctaggccatggacaacactcagcttgtcttctccatgctgcagtccagtctaatattcgtgagtgcctcctgttttacaattctcaatgagtaactcttttgtagagggatattctattagagatc

SEQ ID NO: 480498 - DNA, 1000 bp, Homo Sapiens
gatccattatctctatgttaattttgaaacgcaaagtccattggcttttgtattttgaaatggtttggtttgacatagatgtgtccaattctttgcacattttctacagtgtggacttgtataaagttgagattaattcaagaaagatttttagaaggtacagctttttgctttgactttttctaattaaggaggagtgcattttgtagtggaagttgtttttggcttatagattaccttaataaggtcattgacttcaaggaccatgttataccttcttcaaaatttatgaagtaatgttccataaggttgtgtcctgtaccttattaagagggatgtgcccattcttacctaatagcttccttcttacccttatcaagtgatgtttattatagaattgataagtgtactcttttaagattttcagttaataagaaaaatgagttggatttaaataaaacctttgggtaataatcacaatcacaagatttcagaaactatgcaatttaaataatctgtcaaatggaaccaaagacactgagaagattaaaagtaaaaaataagcaggttagtatttgtgccgtataaaaagaaatttaataatcatcagctaaatatgtcagcaatataatgctgttagtttcaaagctaacatgaaattgtagtgtttactgaactttccaaatataaaagcccaattaatatacagtgttgggctaaatttctatactttagaaagatgaaaatattggggaatcctcaaataagcaataaaaacaggacttataacatgagctgattagactgtttcttagatggctggatgatacctggctagatggccacctcttaaaagaccatatgagacatcttctgttacattgatttctatttctattctagatgcctgttacaaaacatagaaattatcttcctcccaaaattttattttctactgtttcatatctcagatacatacattgtatattaataatgaatt

SEQ ID NO: 480499 - DNA, 1000 bp, Homo Sapiens
gatccacctgcctcagcctcccaaagtgctgggattacaggtgtgagccaccacacctggcctagaagaaatatttaaataagttaaatatttattatggaatacaaaatcatagaagaaaacatgaaagaattaatttatagcctcagtttagaaacaaaaactttctcattatgatataatattcagaggctgtagggagaaaaaaatgaatacatttgactacataaaaattaaatttttgcatggcaacacataaaataaacattatcaatgtagtcaaaaaggcaaatggcaaactaaatttaaaaatatattcccaatttttgtcacaaaagcttaatcttcctggcatataaagaccctaccaccttgataagaaaatcatcaaccccccaaaagaaaaaaagtgggcaaagaatatgcaaagacagttcacagaaatgcaaatatagttttttaaaaatattttaaaagatatttaaccttattcacaacacagaaatacagatttaaacaacactgaaaaaacatgtttccctcttcccattcagattggtaaaaatccaaaagttcatgacatattcaactggaagaattttgggatagattttaatctatggctgatgagagtataaattggtacagcatctttggtgagcattttggtaatatttatcaaagtgacacctaggaattatcttgagatataattaatatgtgtgaagtgatgcatgtatgaggttatttattgcaactcttcttaacagcagaaggttgaataccaatctgttgttgaataaaacgtgtataatatgttattacttgtagttttaaaagaggaaatgaaatttcctgttttattggtttgtatttatataaaaattctttataagtgaaaaaagaaacaagtgatagtgattacccgagtaatgaaggaggcaagatatatactgagaaagtagagagctagtggggaagcaatgtttcattaaataac

SEQ ID NO: 480500 - DNA, 1000 bp, Homo Sapiens
gatctttcacagttacatctccctcagcctgagagggtcatcaccgaagttacctctttggcttagacggtaagcacatggtctctacacatgcgtgttaaaagtacctttgatatgtgtacctggagctcatttcagtcattcatatatttactcatttattcaacaaatatttattaaacgattatgcacacaaagaaacagtgataggttttagggataccagcgagactccatctcaaaaaaaaaattacagtctcattggtaataaagaaaaaacaaattaaaaccacaatatacaattttacaccaatcagactgacaaatatttcaaagtctggcaaaatcaactgttgatgacaacgtgcctaggggtctctaaatggctacaaaattacctaccaaccttctaaactaccattcaaagggcatcacaattctccagactaattgccccctcttattacctgccataaaatatatgtcaacactacagaggataacttggtattcttcagaacacgcttcatttcaagttgtgccttttccccaccctctgtcaatcataatccaacccacagttcaaatctattcaatgtcatattgtcaatcaagaccccccacttttttcagtttccaacattctattattagtactgtaataatgatggcaactaatatatactgagaatttactaggcaacaggaactgtaaagctttatgtcattaatattcacaaaatatctatgacttggtactattattcctatgtactgagaaagaaaaccaaagtatagaaaggttcagtaacataataaagattatagagctggtaagcagtggtggcagattgggggttggaaatattcagactctaagatgttttgttgacaacccattgaagcttcattttatagatgaagcaactgaggtttagatatgtaaaattgttatccaacataattttttttcttcaacatttattttaagttctgaggt

SEQ ID NO: 480501 - DNA, 817 bp, Homo Sapiens
gatctaatttgtggttatgattggttgtaggaaaaatttcactagcacccttgtgatagcaatttctttttcttaaactaaatttgttttattggcttcaatatttttgtcagttgtggtccagagtggtgattactgttaaatatgaatttagattttttgcttgtttgtttttaaaataccttggttttcttttatggtaacttatattgggtttgaaagagcccccagttttcctttagcatcatggcctcttatgttgcttgaaaggaactttaacataaatagtaacaagtcttatccagtggtgaatacctaacttggttacatctgtgcaaagagtagttagttctagtggaaaaacactaactataagggatagtgctgtacttgacctatttgaaatgttgaattccatctgtttggggtacaaacaatacaagtctccttatgccaagtaaagtcatggctattaattttcctttaatttttctcaacaagaatagaaaatggaatgttacatctggaatgtaatcggaaattcactgtagtcccttaagtacttgttgacttgacttactgacttgaaattcccttgaccactgccttcctctgtttcttgctattgaaaagaattgggtaggtagcagcatttttcttcatgttattcagtccccacctgctgtgtggtatgtgtatagtgtggtgaagggagagggagggaagataggaatctattggatatctactgtgtattcagctctgtactaagtctagaagtatcaaacatttgaatttgattaaacagtatgagatc

SEQ ID NO: 480502 - DNA, 997 bp, Homo Sapiens
gatccatagagtctgagttcagttctgtctcctctgtggcccccacagaacagaatatgctcaataagtgggtactgagtgcatgaaggagtccacagacagcgcagctatacaagggccatggctgactagatataaacatacttagccacgcattacctgttcacttcaggaatctccttacttcctatcctccttgggctccctgaccattcctgccctaagtatttttagaacaaaatacaacaaatgataggagaagactgttggcaggaagaaggtggtagtattaacactccaaattaaggctgcaagaaatttagaagttggacacttcccactcccgcagaaaaccatttgtttcctgcccataaatagggacaccatgcagggtttgcctatttttaggaaaaccaaaatcttatttttagaaaaaatctatgagattttttttttaaagccctgtagctcggtaggctaacatttctaccctcaaacggcaagccaggtcttgaacactggtgtccttcctgttgggcacctacctgagctgggaagacccagaggaagaggttgctgttgtaagtctaattcacggtgaggaagccggcataactcttcatgttcagtcctgggaaagggccgaccaaactcaattctcttccctagtggggaaaaaaaatttacccaaggattacagaaaacaataacaacaaaatgtgagccatctatctcagtctggatgaaatggagtgattagataagctaaaagggaactggtatgacaggtagttccttcagcaaattccagcctgcccctggccaatcccacatagtccacgttcacaatttagccaaggatatgtgaaagttttaagcctttggggaggggtgcccaaatatattttataagctgtaataaggttttttttaagttcttttaaaaagaagaaaagaaaatctcctatcattacaccttgcataaaccaaggtgatc

SEQ ID NO: 480503 - DNA, 1000 bp, Homo Sapiens; identical to SEQ ID NO: 307696

SEQ ID NO: 480504 - DNA, 1000 bp, Homo Sapiens
actaaaagaaccaaatttacttcagtttaaggcaaattccacacagagactgtctcagagacgggcacagaaccagacaccgtagaaacaccaccaccatgcatgacggggaagcagaggcaggcggaagacgggggcctggcctgcaccaggcacggagaggtcagtgggctgaggagctccatgcggcaacagggattggcatgcatgatctgctccccgagtgggcaaaggctgggcagctgggtgggcccgggagggagatccccttcttccccacctttcccacagcaggggcaggagctcgggctcagatgccagagccccaggctgaaggactagggtatgtttggggtgatgggatgagacagggtgacccaaaagccaaggcggcctcaagtagggtcacatctgttaggagtaggatgggggggactgggcatgggatgaatgaccctcaggatgtcagacctaaaggaaaacctggggccatctggtcaaccctcttgtggtacagacatggaaactgaggcccaaaaggtagaagggccttgcttgggttcccacattaggcagtggggggaggcagggctcaaacccaggactcctgtctcctagcctcatgggatacagggcaaagagcaggagcagtgtgggaacgtggggctgagccactccttactcaggcctccagatgggcagaggcgtgggcaccgagggccctgggaagcctctggagggaggaagggattcctgaagccaggagtcaaccatggaagtacctgtgggcccacaccagggagaggcctccacaggccatctgtgtgtctagaacttgcatcgtactgagttcgagaggcaccagaaagggctctgtgctgagcagcctccacttcaggcccatcacatggcctacggtccatgattacagcaccccatggggtccccggggctcccagcgcatccagtgtccctgggagggtgcacatgttcaggcctt

SEQ ID NO: 480505 - DNA, 1000 bp, Homo Sapiens
cacagttaaacattcctttattcaccctatggctcccaagaaaagcattcttcctctggagtactggtgtactaaggggacaatacaccaaatttgttgagtttacaatcaagtctactaaggttggacttccttatcagtttggcgagtcccagggcagaataatcatccatctacaggtctctgtttcctctccctccacagcagtggagagcatcccagtgtttggggcactgtgttcctcttcgtccctgcaccagaccctggaagccttggccagagacctcaccaaactcgacttgcggcgctgggccagcttcatggatgctggagtggagcacgatgacgtagcagagctgctgcaggagctacaaagcctggcccagtgctaccagggtggtgacagcctcgtggactaaagttcccagtgtgggagaaaggagctagtttgcaataaaaacagctggatgcaggagcccagtgtcttcatgcagaggagctcaatgtcgcgggactagctacaccaacatatgcactttttacatttagaaacactgtgattagaccacagaacaataaatatgtgccatcagaccaaaaaaaaagtagagaaaggagctgaactccactctcgatgctatttacagaggacatctgtaaagtcttcataaaagaccttgaatgatgcctaggatggcagagcccctgggtcctactccatcctccagcctttgtccttgtcctggcctcctgctctccagatctgtaaactgggctcaaggactgtacaagcagagtacaactaccccctccccggtgccagggcgcctgttgggtttggtcctgtgtagatgattcccagagtctcattcatccagctcctcttcagacagaaggtccccatggtcagacagctggtctgcattgctggtactggttgcatcatcctcatcctcagagctggcttcacaggcagtgtggaagagctgcatgagttctc

SEQ ID NO: 480506 - DNA, 1000 bp, Homo Sapiens
gccatccactataaaattttaataacattaattatcataaaaatacaaaagaaagccatccactaaaattagtaccccaaaacactttatattagttaactagctacagattaacagttgttggtgtgcaaagttgcatacatacttgacttctcatctggtctaatttcttccttgaatcctgcatcccattttctaaataggtgcagtgacgcgatgaagcatccagcagagcttttgttgctgatcctttgtttaagacatcatctcgtttttgttgaagctgtctcacagctacttctctttctgctttctctttttcatattggcattctttttctttcgaatgagtcagttcattgaccaacattttattgtcttcttctagtaaaagacggtgctttctgcactcagcttgaaggttttgtactctagcatcacatctggcttgaatattaagtattgctttttcttgattgtcagctttgttgcgagcatcatccagttgctgttgaagcaacatattttgtttttttagttgacaaaatctttcctgtttttctatgcatttttccattgtattgtatccacttttgtacattttttcaatgtccttcatttgactctgtttttgctttagctcactttgcacgtgttcaaaaaccaaagccttttctttcagagcctctcctgtgtaatggagctcagttttgaggactctggacttactctcagctttagaaagttgcagagaaagaatcagaacatgagaattcaaattttcctgtaagtgacgacatttatctactgtgccctggaaagcaagctcttggtctctttttgatgagtgactttgatcatgatcacatcgagcagcattcagtctacaatggtatgattgcatttctgtttccagtctttgcctgctctctctttgcttctccagtttggaacggagcgttgtgttttcatctgtcagagcagcaagctgtccactata

SEQ ID NO: 480507 - DNA, 1000 bp, Homo Sapiens
acacacatctcaagggatttcaaatccctcagactgaaattggttcttggttggtaagaaggtggggttctaggggcaaagctcttgcggggaagggccatagccggcaggaccccggtgggcttaaggctactgaccagatggagttctttctgaaactcctctttgtgatttttctttttgagttccaggcagttgttcttcagacccctatacttctccttgccatcccccttgtctgttttcacgatgtccttagttccgctgagctccacggagtaaatttctggggttttctgaaagagaagcccaggtgcaatattggccccaaatggggtttccgaagaggtgctgagcgcccctctgcggggtcaggacctgcaggagtcaggagccccttctccctttccttccctcctctggggaggccggagggagtcggacagtggagtctctcccccacctcccgccgaccttggcttcctctccgtccgtgtagaggggaggcggggtgggcacaggccagccagcagctcctcagggtgacccttctctgggtggagcaggtgggaagttacccccccaactcctgactgatgcctccaaggagctgtgaggtttccttagaacctcgaggttycttaggcacctcgaggtttcctctgaggtgtccttcccaggggacacaacagctgtgcgtcctgtttcttggggaggaggcacccactaagcttacgaccctcagtcctgatcagggggccctaaccggaagtcttttcagaccgcaacgaatccatgtcaccccatcctccgagtcggagcccgcaggtgccatggagctggcctaggaccccttggccccttctcgctcctctggactggcttctttccccagccagccccggcggccgcacggagccgtggcggggagtcagagaagcggtgcccaggccggggggcgctcagaggaaaggcggcctccccttgccccgggacgggg

SEQ ID NO: 480508 - DNA, 1000 bp, Homo Sapiens
aaaaaaaaaaaaaactatgaccctacytccacttataccagcagaaactgggtggggagcctagacttccaccctcaccaccatcccaaagcccctgctagggtggtctgagagagagccaagtgggagcagggactttcatccctatctagtggtaacaagacccccaatacacacaatgccagtagagatcacacggggagcctagacgtcacgtctcacccagcaggaatgagacaayctcttcctcttactcaatggagcaagccctagtggaaagtcaggacttctactgctaccyggaggtgataaggtctatctccactgtgtcaaggccagccagctggggaacagtaacaagatactcctatctctcccagtcaggccggtatgaatggaagcctagtggggagctaaaactcccagcccagcctagcagtaatgagtaatccttctcccctagaatgtcagtggaactcaagtgaagaatccatacttctattcccatctgtcaataatggggcaactctctacaacccctgtaatatggtttggtgtgtccccacccaaatctcacctcaaattgtaatccctataatccccacgtgtcaagggagagaccagatggaggtaattggatcatgggggtggtttcccctatgctgttctcgtgatagtgagtctcacgagataggatggtcttattaagtgtcttgcgctcactctgtcctgccaccctgtgaagaaggtgcctgcttctcctttgcctaccgccatgattttaagtttcctgaggcctcctcagcaatgtgaaactatgagtcaattaaacctctttcctttataaattacctggtctcaggtatttcttcatagcagtgtgagaaaggactaatatgccccactacttgctggcgtggcatcacagtagacaagctaaaactgaagatgtaaataagacttagggctcataacacaataccactgagagtctaggttt

SEQ ID NO: 480509 - DNA, 1000 bp, Homo Sapiens
ggactctcagagacttgatggtattgatgtctttccctttggatcctctagaagggagaagccacagatgcagacaggcaggaggcatgggtgtgcccagctcccacgtggccccccagggtctgagtcctgctcccctgtgcattttgtctcagactccagggtggaggacccaggagcagagaggccttgccctgcaggtgccacaggccaccatgactcttcccaggggctgcctggcccgggcctcatctaaggacaggagctggggctagggcagcagcatctggtgcacaaggagaagaaccatcacccctgacacccctcccaccccagattccaggattaagaggacagaagagacccgcacgaggactgcagacccagaagtgggagcccacaagcacgtttctagggcgagaatcttctggaagggcttttttccttgctttttgggctggctagagggaggtaaaggggacctgtctggcctctgccctacagatctcctcagccgtcctaacattcctcccgctgacgtgaaaccgacagcgggaagacagaagaggggaaggagagtaagaaagagaaaaagtcggacgaatacagaggcaatgcaagaggcatggtggactaagacaaacaaggggagagggagggaaggagggagggagggagggagggagagccatagagacagacatatcaatgctacccagaaagcagcagacaggaaaactcatgcagagcagggacggcaaggcaggaagtcggggaaagaaaattccaggcacagaagcaagcagaagtacagaaccagagggcctcaatcagggcccctccaagaaaaagccaggacagacccaggcagctgcctctacctgtcagggacgcaggaattagcaggttctggggactggacctcccacgaccctactgaggccgggccagcagtgtctaggagagatttcctcctaaggcggcccccgttctcagaagc

SEQ ID NO: 480510 - DNA, 1000 bp, Homo Sapiens
aaggcgatgaccacgagaatgaccacctcgaagtacctcatggtcacgatgtagtggcagaagcggcggagcctgtgagggaaggcacggatcaccacaaggccccccagccgggcgcgccaccccttgccacagggcaggctcagcccgtcccgcagaaagggctctgggctgcctcaggaagctgtggccccagagcttcgctttgctaatggtccctgtggttggtggtggcagccaggtgacggacagtggctgagattcctgagagggcctcccgggacggggggtggggaaggctgcagaacctcatggcaggggtcaacaaaccaaagctcacaggccagayagggagacctgtttgtgtgaataaaacttcactggagtacagctacatccattcactaccaactgtccatgcagccaacagcagtccaaagccaacagcatcaactacccagccctttcacagaagaggtcagctgtgggcagcagggagggagttgctcagagaggaagaatttcagcgtcaacattctcacggagagcaggcctctcttgccctaggaaagttctctggggcctgtgcggggtgtgtgccctgtccaggctcccagggtgcatgtgaacacgctccacgtgaacacgctgcacggggacacactccacacactgccacgtgctcgccttttgctccagtcccatttgcccgactcgcttgttcaacattactgagcacctaccctgccaggcatgtgctggacactgggggacacaggggtgaccagaacaggcctgatgaagctccattcagcagtcaaaacaccaggaagcagcgaggaaatcaacaagcaggggcctccctgctactggcagagccacaacgtgagagtgcacagtaaccaggaggctgggaagcccatctacgggtgggggaccagaagaggcagccgtggacggagcaggtggggcagacggcccccatcacgagggctgtgct

SEQ ID NO: 480511 - DNA, 867 bp, Homo Sapiens
ggcagtctgaaaaagtaaagtttaatttaaaaatcatatacataaagcttctgattcattttcagctctcccactgtgtctttcacaggcgagtcagtttcccattgagtggaggccagttaaagatgccgccacggtggacagtgagccagcccttcctcaacaggtgagcaagagcggctgccactcaggcttgaacaatgcccatgacctgagtgacttggcagagaggctggcttcaggcgaggttcagaaggctagcttcttcatcaggagataaactctggagtccacctcgaatccatgcaggttgttggcatccccctgcagcctcatgagcaggcccccataggacacgtacgcagagaggcgtgttgctgcttcagtagaagtttcatctccctcaatcctgtacacttttccatacattacatactcaaactggtcagccctggaaggcctatcatcagtggggttgtattcaccatcatccagggtaccatcttcatacaaggtactagctatgaccaaccgaaacttgtcacccaagtctacagggtaaatttgaatgtttacatctaagattagatccatcttgaaagattcactctcacaatgcagtcgagacactcggtcaaacttcttggcctccgggtcaatatccttcacatcgaaaatatcctcaaacaggatgcccgccatcgcgagggggccacgagagcagcagaaggggtgagagcgcgaccacagttgggagtacgtgcaccccctagcgtggacaagaccggacctgcagcccgggggatccactagttctagagcggccgcaccgcggtggagctccagcttttgtccctttagtgaggg

SEQ ID NO: 480512 - DNA, 1000 bp, Homo Sapiens
  misc_feature (371)..(371): n is a, c, g, or t
ctgtcagaggagccacgggagacacaggcctcagcagcagctccctggagagaagcccccagccctgccgtccctggggagccacccaggaaacgtttgagggagggttagtaaacaagggccaggcggcctcggcctcctccccattctctgctcaggaagagaatgggagcactgtcactgtggggtcagcagggcagccattggtgtggggtgggggtggggaccaggagcctggattccagcctcagcttggtaactttggccatatccctcctccctggccctctgtcctggtctcagtttctagatctgtagaagtgtgtctgtgaggcaggcagaggctggagggaggagctcttgaaacattngaatatgcctgactagctcagtcggtggagcatgagactcttaaagtattagaaaccttgggattctgtaatgtggaagtgcagaatattagaatcacggcaatggatgagggaaaagctccctcctatttggaccccactagagctgtttacaaagtgcttcaaagagcagttcaacagcagctgtgatggaccgagcactctgtccgggtaccccctatcagtgctttcatccattatctcatttaagcctccctgcagtccttattattcctatttcagagatggggaaacgggggccggaaaggtccagtcagttgcacggggccacttgattagtaagcaatggagcccagactcacacccagcagtcctggcttcaaaccgttatgccggcaggagctttgagaacttccgataccaggccacactccgtaacaattaaatcagaatgtctgagggcaggaggcaagccctgatactcttcaaagatcctcagatgattccaatgtacagctaagtttggacgtcaccgcacattctactccctcaccttgtccccactctaaccctgttaggaagggaatctttactcctgttttacagatggacaaactgagggttagcaa

SEQ ID NO: 480513 - DNA, 1000 bp, Homo Sapiens; identical to SEQ ID NO: 307700

SEQ ID NO: 480514 - DNA, 1000 bp, Homo Sapiens; identical to SEQ ID NO: 307701
  misc_feature (13)..(13): n is a, c, g, or t
  misc_feature (15)..(15): n is a, c, g, or t
  misc_feature (26)..(26): n is a, c, g, or t
  misc_feature (30)..(30): n is a, c, g, or t
  misc_feature (32)..(33): n is a, c, g, or t
  misc_feature (64)..(65): n is a, c, g, or t
  misc_feature (102)..(102): n is a, c, g, or t
  misc_feature (195)..(195): n is a, c, g, or t
  misc_feature (217)..(217): n is a, c, g, or t

SEQ ID NO: 480515 - DNA, 1000 bp, Homo Sapiens
tttttttttttttttttttttttttaacttcttattcctttattttcattttttcttttttgtatttttttaattcttaaatttaagtaaaaaatttttaatttataggggttttctggtaaaaactggaaagtctgctagacaaattctaaaagagcagtgatactcctttattttctgaataaacttccttccactttactctgttggcttgctcttgtagatcttcctgtacaaagccaagaatccacgtggcctcccacgctgaaccccaattttggggctcaccctgtgacacagccagaggcaaatggttccatgtccctcctattcctctttgcgcctggatgggatccggagggctctaggcttggctgctgtggccaccagatgaggctctatgaggtctgcaggggtcttgccagctccagatggacattccctgagatgctgttaggccacctggactggggccccctgtggcatccctggcatggacacataatgcccagcaaaggcatcatcaaagttccattactttagtgctggaaggcaaaccagatggcaacttgtttgcagagaaagaaactgagacccaaggaagggtcagccaaagccaggactcaagggtcaagggctggtgttcatacttcagctgctgagtggcaggagtccctttttgctgcccttctcccagagttccataatgaggtgaggatgggtctccttcagggcttggtagagtccatctttgcacttccggtcccaggactggctcaagctgaacagcttccgcatctggctgggcctcgtgttctcagccagcaccctctcgtactgctcctggctcagcacctgtccatgcagtttgtccaagacaacctccaccgatgtcactcgggctatcagctgctctcgatactggtccacaaagtgcagcaactgcggggcatccagaggtgaaggtacggctatgcaggctggagggatcagagtagtt

SEQ ID NO: 480516 - DNA, 1000 bp, Homo Sapiens
aagccctgtctgtgttagggaagccacatagttttctcctgacctccagaggcagcgtggagagtaggagagggctgcctgaaatatcagaagaccctcacacaccacatactctcaggcaaacagatgactatctcacggtctgtttgcatggagagtgagatgtaacggtaaggccttgccctcctctgggagaggaccttcagagtccagctcacaagggagcgactgaatgggggactctttgtgtccggggtgttgacctagggacagcaggtaaaagtggcacgaagaggctgggcctctcctcacctcagggccttccccacgtgaaactcgtaatgaggacatgttacattccatggcagccagagtatttctgatgatttttttggtaaaactaagtaccttaatcaaggctaagggtaactagtcgggcaaaactagaccactacgaagtgcctatttgagcctggggccctgtttgctgcctcctgcttcacatagccgttctgatcagcagggcctggctgggaggtggatgggagctcagaccatgtatgaaggcattggaaaggcgcttgctttgagggtggagctctcatcacttaatcacttctcaaaagaccccacctcttaatgctacggcagtgaggattaaattccaacacatgaagtttgaagggcactcagaccatagcaccaagtgattctcaggctcatggacagttattccccacttggttttgtgccccgagactcaagaatctccatgcctaggagattcttgctctctagtcacctggtgtgtcctgctttactaggcgctacgatgactacttgtcttaaaatctgttgtttagatgatctggtactctctgcgaccaagttggaaagaggggtggagctagaaaaggcaaacacatttttttcaagataatgggtttgatcacagatttgatctacaagcttgctgtcttcaaacttaggaaagtcagga

SEQ ID NO: 480517 - DNA, 841 bp, Homo Sapiens
ggaggggaggagaagacaagggcagaggaagggcgggggaggaggagaagggggagagggagtggaaaactgcagtcaggaagaatggttttattactacctgcaagcagggcctgcatgaggtggtaggtgtgctggccccagggtatgtgtgggctgtgagcagatggtgaatggtgaggttggaaggaaagggggtggcttggaaaccaggcccaggggatcctcagatctgcttcttggaatgggcagccttgagaaaagagtcatggtaagccacagtcatgccatccatcagatgcagaaattcttggaaatctagctgcccatcactagtgaggtccagtttcttcatcatgtggtcaaggacactggggccttctggttcttcgtgaaggcatccagttctgtattcatgaagcttgggaactccatcttggagtgaatgctatcgtaaccatcctttccagtctatttctggaaaacagcaatcggactctctgtagggctggagatttttgccatgttggagttgaatgagacaccaagagcaggtttttactggacctgtgtaaataaccatactgccgtaagaatatttcccaaatagtttccaaattctggaggaatcgagcagaaagaaaaagcaaatctttccatcttagtttacaaaagtacactttaccaaattgttataaactatagacagtttaacagaggaaattttctcttttttttttcattttttgagaaaggtttgtgccctgttgcacaggctggagtgcagtggtgcaaacatggctccctgcaacctctgcatcctgactcaagtgatctcgag

SEQ ID NO: 480518 - DNA, 1000 bp, Homo Sapiens; identical to SEQ ID NO: 307703

SEQ ID NO: 480519 - DNA, 1000 bp, Homo Sapiens
ctcctgcctcagcctcctgagtagctggaattacaggcgcctgccaccacggcaggctaattttttttttttttttgaatttgtagtagagatggggtttcgccattttgcccaggctggttttgaactcccgagctcaggcaatctgcccgcctcggcctcccaaagtgctgggattacaggtgtgagccactgcacccggccccttcctttcctctttattctgcctaagttcaggtcttcatcctccatgtttgggaccacgcctgtggtctcccaatagggtcttgtatccttgtacgcctaatttagcttccaacgtgcagctgccaggtttcagcacagctcactcctgctcagggttcctcaaaggcaccctctgcctgcaagaaaaaggctactcccagccaggcgcggtggctcacacctgcaatcccaggactttcagaggctgaggtgggaggatcgcttgagcctagaagttccagaccagcctggacaacatagtaagaacccatctccacaaaaaaaaatttaaaaattagccaggcgtggtggtgcatgcctgtagtcccaaatactcctacaggctgaagcgggaggatggcctgagcccaggaggttgaggctgcagtgagccatgatcatgcctttgcacattagcctgggagacagagacctcgtctcaaaaaaaaaaaaaaaaaaaaaaagaaaagaaaaaaaagaaaaaaagaaaggccactcccttggtctggccatagatatgcataatctaccccctcctgcattctgcggcctcatttcctcatttccaaactcctctgagcctcgctactgcagggagtgttttccaatcctccagggctgcccaagtagggctaggtgtcccctgtcctcacccgccttccatggttctcccgtgctgcatttgcagaattgcagtgaccatctgttcacgtttctttctctccaccctaggatgtgagttccctgagagcag

SEQ ID NO: 480520 - DNA, 1000 bp, Homo Sapiens
ccaccccccccaaccccccgcccccgcccaattcatagacgctcaaaggctggacagttttagtgtgaaagggagctttcaggactcaccatttttgcagtaattcccggggcagcacatagcgtgacgcatgcagcgttttcggcgcttcctgcaggcgagacagatttgcacgcctgcgtcccctccgcgggtgggactagcgcagtactcatcagtgccgcactcctcgtcctctgcgcacgggtacggctgtgggaagggttcggggagagggtgaggcacccagacgtccaggtacccgccctcttggacccgggcgctgatcacagtccttatctgtccacctctccaaaacctgttactgcccactgctcccaaatgcagggttaccaaatgctccctgaaccgcacacattcagcacgttctactccctcgtctccagataggaccctttcaaggtcagagcatcctctgagtgcccgacccctctcacctggtagttgtcaatggtctggtacttattcccgcccgggtacaggattcccggcgcggcgctgactgcagagcctgggtgccccgcagcgccgcccagcggtgggggcaggttcttgatagcgttggaattgagaaccgagttcaaggtggcgctcactcccagcagagggtggccgccgagagccgccgctaccatcgcgacaaagacccgggtagctcccgctgcgcccagagccatcatctcagaaggactcaagagggagaaagaaagagaaaatgaccgtcactttgcaagcctgggtccccacgaaaccgtgccggttcggctgcagagtcagggtccgggagccccctgcggtcccagagtcctgactgcagggagcacagagctctgcgccgccaccgccaccgcggctgcctttataccgcgggcccggagcattccggccccttgggagggagacaacaaagccgggatgggatttcaaagcgctgggaggg

SEQ ID NO: 480521 - DNA, 1000 bp, Homo Sapiens
ccagggtgaccttgacgagctcaagaagggctttggcagcagctgagagtgaggtgccaggcaccccaagggcatcaaacccccagagagatggcaggtggcaggcactagggtggaaccacgtcccccacaaatcatccacagactgcagttgtaaccccaggaccttacctggaaatagggtctctgcagatgtaatcagttaacacgaggtcattcgggagtacagtggatcctgatccaatatgcctggtttctttataaagatgggaaatttggccgggcgtggtggctcatacctgtaatgccagcactttgggaggccaaggtgggcggatcacctgaggtcaggagtttgagaccagcctggccaacatgtgaaaccacatttctactaaaaatactaaagttaggcgtggtggtgggcacctataatcccagctactcgggaggctgaggcagtagaattgcttgaacctggggagcggaggtagcagtgagcccagattgcaccactgcactctagcttgggtggcagagcaagactccgtctcctaaataaataaataaataaataaggggtgatttgggccagccatggtggtggctcacacctgtggtcctggcactctgggaggctgaggtgggaggatcacttcagcccagggggtggaggctgcagtgagccacgactgtaccactgcacccaagtctgggtgacagagcgagaccttgccctgcagactgtgagatggtgactgtgtgccgttgcaagctaccaggtttgtggtctttgttacagcagcttggccagaggcccccaccacacggagccccaggaaaccagcctaggaatcacaacagtacccagggcctccaggatggcaattccaaacaccacacaaacaaagctgattgtagaaagggcccatgtttgaactcaaatggaggagacgctggagagatgctgggggccctgggtgggtggctgagaacacgg

SEQ ID NO: 480522 - DNA, 1000 bp, Homo Sapiens
ttcgggctggactgcaggggcggtctgtgcgcggtcccaacttcagccctgcgacccccaggcagccccatcgggcaccccgaggatgcgccccctcagccaagggaccctcgagccccagagggctcaccatgagctgcgcgggctgcggaggcggggacttctcttgcctcctgaagcgcctctggctccatggccgtggtgcgcccctccagtctcggcgatggggacaggaagcggctggtgctcgctgacagccagggctgttctcgggagtctgtagcgcgccggacggcagcggcagcggctgtgtctggttcggagcgagagaagagagcaagccgccactgaggggctggggcaggcagtcgcgggcgccaggctggcactgaggcgctgccgcggtccctggccgctcccaggcccgcgtcccgccccccgagcctccgcgctcgactcccgccccacctgtgccttggcgccctcgctcaccgccctcagcgcgccagagtgtaggggcgatcccgcaggtccgaggggcgccccagcgccagaccctagtccccgggccgggggaaattctccccgggaaaaccgaaggtgcttggcgcatccctggagccttagccctggccacgcttggggaacaagaggtggggtaaggatgaggacgcgagggcttccggagggggaaagagcatttgaagggtaagcggggcagccttggattacccacagacccgagtcccaatccggactttattcctggctctgcgactttaagggccctacataactttacccggccttggtttccttctccacagcgtgggataatgtattcctactcctgggacagtgtcagaactcatggaagccgtctaggatgaggtgtccagtagacagtgtctcctaggaacagcgtcccgcttcccccagcccctctctcaacaccctgaggctggggcttcagctgacctcttgggagattgtccttttc

SEQ ID NO: 480523 - DNA, 1000 bp, Homo Sapiens
ggacctggtgttctgcgtcttaaatgtcccccgctgaaggctgtgcatcatcatcaggagataaaaacgccatcactcactgtgcaaaggaaggggtcaaggatagagcgattgcctcacactgctgctttggccgtttgtggggagcttggggcgggggagggtgcaggggagagtagggaggacagggccaggcgagggatggaggggagagaagcaggggcagcttagatgaaggcacacagtggttttcaagactttaaagtgcagatttctagcccttgtcttcagaaactccaggctcagctgatctggaattgaggctcagaaacctgtgttaaaaaaaaaaaaaaaaaaaaaaaaaaaaaggagggaaaggaaaggaaaaaggaaaaaaggaaaggaaaaaacctccccttggccaggggcggtggtttacgcctgtaaccccagaacttggggaggccgaggtgggaagatcacttgaggtcaggcgtccgagaccagaatggccaacatggtgaaacctcatctctactaaaaatacaaaaaattagccgggtgatgtggcaggcacctgtagtcccagctactcgggaggctgaggcatgagaatcacttgaacccaggaggcagaggttgcagtaagccaagatcgtgccactgcactccatcctgggcgacagagtgagactccatcataaattaaataaataaattaaataaataaataaatacccagtggttgcaatgcaggtgttgtgtggactacacactacacttggagaaccaccatctcgcgagagtgagccagggtgtttaccaggcagtagagaccatatggctgctcttcttctgggtgaggaccctgaagtccacagagtggaacttgattgttcaaggtcaaacagctggccagtggaagggccagtacaacaacccaagcctctggccttcaagccatctgtacacagttcctcctgcggccccaggacgcttg

SEQ ID NO: 480524 - DNA, 1000 bp, Homo Sapiens
gagagagagagacaaggatcttgctctgttgcctggactggagtgcagtggcatgatcatggctcactgcaacctcgacttctggggctcaaggatcctcccatctcagcctcccaagtagccgagggactacaggcacgtaccaccacgcccagctcctaaggacatcagctttaagtacaatgctccaatttcttcttttcacaagagtgtatccatgtattacttatgaaattgaaagtttaaaaaagctttgagaaatacaaatctagggggaatgtcttgagtgagtgggattctgacgactcaacggattaaatgtcatgagggctgatcccagctgcctggaatgggtctgggctgtggaattgcaccgacaggtgtgccagcacagcgctggccctggccaaggtgtggaacacactgactcccagcactgctccgaggtgctgggagccccaggtgcaagacatcacaagacgccacgctgcctgccaacactgtataccgagaacagaacagcgaggtgtgtgattagcacctggcctcccgcagggctctgcggctagaaccggttatgcaacaggaataggaatgtgcctatcaaccagctaaatacacaaaacccagctgagcctctgctgggggctggccccctggctcagaggtgttccaagtctgtggggacccctaggtgaggcagaggctgctgggatacacatcccactctaatgcagctgccagagcacaccccttcctgaaatgcacttagggcggtaccccttgtcattggaccccgtgaaccttccttcaggagacaaatcccatgagtgtatctggaaaaccaaatcttgcccttcagccctgtccccacctaatgcctagggcccactcaggtggccctgctgacaacacctagaggatctgggcgagtttctatggccctggccaccccgctgtttgttcccagtccacaagcactacatggcccaggcagtca

SEQ ID NO: 480525 - DNA, 1000 bp, Homo Sapiens
agaactgggacttcatgtcagagttgtagaagcaacaatagtaactcaatgccaaatactggaaaattaaagctgagctacagaaatgtctccagctaaagtcaggcatactggacacgctttttctaggactaactccccagttagaacacacccctcacagttactttccccacatgttcccaccccagtagctcccatggctactacagaatcatcagctattttgggcccaaggtgattggcccaagggtgacttgtgacgaaagataggccaaatcagggccctttccagagatgtttagacttggggctcaagtctttgagacagcttctccctggtgactatagcagaccctgtcaatgtccaacacctgtcccctcatcattgctgactcaatgtgacatccatctgttctgacgtcacatgatacattccctttactggattctctgcacactctatggaccaacacgttcttcaaatagttaatgtgccattaataatctgatattcctgcttcctttccacttacattttgctctgttaaatgccaaaagatcaagaataatttagtcatttttttcccactgggtttcacatagcttctttcagagcagtcaaaaaattcttacttaattttgaagcaaaagaatccctgaaactctatagcccctccccagtatctagaacctttcctgggatttggagcttctgagtggccctttttaataccagacacctgagccagaccttagttagtttcagtaaaagctcctcaagcttgaagttaggtgaacttccaataagctgtcttcccaaagaaacagatttagctatttttgtgctacgcacttgcttcatctagtagattataaacttttggaggagaagaaatgagtgttagctttctttgtattccttggctcagtaccttacactgagtaaatatttaataagtacaactttgctacataaatgaatcattcaatcacattc

SEQ ID NO: 480526 - DNA, 1000 bp, Homo Sapiens; identical to SEQ ID NO: 307709

SEQ ID NO: 480527 - DNA, 1000 bp, Homo Sapiens; identical to SEQ ID NO: 307710

SEQ ID NO: 480528 - DNA, 1000 bp, Homo Sapiens
caaagtcaaatgaatttattcagaaaaggccttgcttggcatcagactaagaaaagcagccctgcccgccgccccccactccagaagggtcaatttacaaagacaggggcgcaggggagagctgggtggggaagacacagccaggccaggaggcttctgcaggccttgggcttccctgagggcctcgcggcttctggtggctgctatagtggccccacaggaggccagcactgtgggtcatgggtcacgggtcacgaagcagagcctgaggggagcccgcagcagctccggaggccccagcccctgcagcagggacaggaggaccaagacgccgacgggcactcctttccttaaggcttcccagacttggcagaagactccacctctgcgtcctgcaactctgctgcctcccccgccttggctggctcatcccttgtaggtcctgccgggctggggcctggggtctccgatgggctctcggctggctcgtcccctgcaggtcctgccgggcgggggcctggggtctccgatgggctctcggctggctcgtcccctgcaggtcctgctgggcgggggcctggggtctccgatgggctctcggctggctcatcccttgtaggtcctgccgggctggggcctggggtctccgatggggtcttggctggctcgtcccctgcaggtcctgctgggcgggggcctggggtctccgatgggctctcggctggctcgtcccctgcaggtcctgctgggcgggggcctggggtctccgatgggctctcggctggctcgtcccctgcaggtcctgctgggctggggcctggggtctccgatgggctcccaggggtaccttctttgggccccgttcgaccttctgtgtcctcctcaaccccgttctcactgtgtccagccttggggtgccccgatggggcaggggacccggcaagggccaaggtctgggcaccaccactggccaccgcagcactgtccccagcaccctcat

SEQ ID NO: 480529 - DNA, 1000 bp, Homo Sapiens
gcgtggtattgcaaaataaatttatttgaagataaactgtcttataaaaggtcagaggcaatttgagatcccagattcagcttgtctcataaaaagattcaacttcaagtagcacaatttcttgtctgcttttaatcctgaacattcttgaagcacgaaacagccaactgtttacacaacacatctgtgacatctgactctggcaccagtggcgccgcagctttcagctctgaggccccacgggctgcagccctcagctttgggagggcccagatcaggccactgtgacctctggctttgccagcaacaacaggtcccagcatcccagcccttccctcccctggcacctcccaaaagcacaagaatgcaaaccgagactggcccaccactgaggcaggggtggactcccgcttgagtgtgccaacagggcgggtggactgtcctggtgacttcctggtgggcctggccaaccaagaggccaagtggcctcaccaggccttacctggctgcctggcagcccggagaggaaggaggaaggacgctcacggtgcgacagctctggccacgctggcgggagctacgtgatgatcctggcgatggcttgcagggaggggaagtcgtcgtcccgggcagcatgcagcgcctggtggctgctggcatcgccatgcgcgagcacctgctggcaggtggggcacacacggcagtccaggcccgcctgctgggtggtggcctgccacgcgctcttcttgttcttcttggacttggtgctcagaggcttctcgcggttgcagaagtccgtgtgtgcagacaggagctcctgctgcttggccgtgtcgggcagcaggaccagcagctcattaaagaccttctggaaattctcccccagcaggtcccggcaactcttgtaatactgggctgcggagatcaggccctgccaccggagagccggactcagtcatcccctctggcccgggccctggatgaagacgggctggcaccc

SEQ ID NO: 480530 - DNA, 1000 bp, Homo Sapiens; identical to SEQ ID NO: 119853

SEQ ID NO: 480531 - DNA, 1000 bp, Homo Sapiens
gtgagcaacagagatagtctttattcaaacgcagagagatccataacatggaaacactgacgcttccgaaaccgccccatttattcacttctcaagtggcccccgcttggatgcgccctcgggagagtgggctcagcacagcctagagcaccaggtctgaggtatctgcaaccacgtgggagccaggcccctggacgatgaaggacaatctcctggagcagcaataacttataaggagacataatttagagtagctggagccttggggatgactttatcctgcaggaggaggaggctgagagcagacgggacacgggggcccctaagaagcaaggttgggaaaggaggaggctgtttcccaatgcccgtgccggccaccagagggcccttcagtgcagagatggtcggcgcggcctcaccgcggtcaggagcagcgcgaaaccccctgtgccctcggccgcctgcagcatgagcctgcacaggagcccccgacaccccatggctccggggggccccaggggctgcggggctctggtcttagacgcagttatcagggacgcactcagcctcttcttcgagctcggggcaggggctcccgttgttggcgggctggacccggacgtagcgagtcctgctcttggtcccgagcctcccacagtggcctccgcacagtccccaggacgaccacagggagacctcgcagtccagcggcgtttctggaactggaccaagcaaaggggagaccgaggtgaacgcttgcgtgaagaggcgcttcgtacaaacggaagccacctcccaccaacgtgtgcattcatcagaggccacgcccacccttcgggggcacttgcgtttctccgcacagtcgcagagtgagcggcaagatgggatggcaccatagcaacctcggacacaacctagggactggagttgcgcgtttctacgtaagagccggagctgccgctcaagtccctgtggtggtggaactcccacatcgtggcag

SEQ ID NO: 480532 - DNA, 1000 bp, Homo Sapiens; identical to SEQ ID NO: 307712

SEQ ID NO: 480533 - DNA, 1000 bp, Homo Sapiens
atttttgcctgcccaaagtctaatgggcctggggccacttgctgtatttaacatacagcaagggggtatcagtaagattatgtgtttgaagtcacgttatatccagatggacactttgctttttggcttaatcaaaaggactgaatgagaagtgaaaagggaattaagattatttcattcctagactatttaagtcttaaaataattacttcttctgtcctgttttagaaaacagactgctctcaccttttagaaatatttctttccaattactttgcttaatcatttctaaagaaaactcaataataccctgaactcccacagtatgtactcttgggtatcccagaagtggtgaataaattctgtatgtaactggcagaatttattacgttccattccaggagtttaatagtgagggagatgttcttaagtcctgatatgacttcaaagcccgttcccaggtaaatctttctatttgataccttatccctgactctgcttcctgttagccaagtcatattatcttagcaacttctgtacatttgtaccaactttgtctttccatgacagcagggccctcaaaactgtgtttaatgaggtgaaacaccactagttggttactggtgttcaaaacaaggtcctaaaacaaaatggtgactctttaggactctctcaatgtcatcaatgttcatcaaaatacactgaatggactgagacaaaatatgcgtcaggacagatttctaaagagggaagcacttgttataaaatatttgtatttactgcttttgtaaattctagaataaaggaatagaacattcaaatcattttctggaagttaagtatgaaaagcctgagacctcaaacctgtaaaagtttttgagtcttatgggtttgaaatctttttcattaaaatgaaaaaaaaaaaaaacactgctgtttaagtttgcacactgatggtatgatggcaatcttatgttgactgcaggaatataagaatgaa

SEQ ID NO: 480534 - DNA, 1000 bp, Homo Sapiens
caccaacacccacctatccacctacccacatgcatgctttggaggattttggaagagtgctgaatggcatgttataatttttcaattcgtttaaatatttaaaaagtgatagtcttttatgactgggtgcggtggctcacgcctgtaaacccagcactttggaaggctgaggcaggtggatcatttgaggccaggagtttgagaccagcctgagcaacgtggcaaaacaccattctactaaaattagaaaaattagccagatgtggtggcacaggcctgtgatcccagctactcgggaggctgaggcaggagtatcacttgaacccgggaggcagaggttgcagtgagccaagatcgtgtcactgcactccagcctgggtgacagagtgagactctgtcttcaaaaaaaaaaaaaaaaaagtgatagtcttttaaaatgggtttagggatgtaactcttctgaagtaaaccaattaaggcatactggtttcatcccacagggagatgaaagctatgttgcagaagaactttgcccaaggaggtggcccagccactggggactcgattctctcctttctgtgttatgtagtccatgcattttgaattgtaaacgtcttatttgagaaaggcccttgttttattagagggcactcataaacctggctcatggactgaaatcgtgttcataatgctaacacagagaaatttcagaatggcaaggccttgcttctcttgagatcagcaaaatggtaataaaaggagcttttggtttgtaatcagcactgaaataaaattaaagctctgtttcaaagttctagttctgatcggaggctgactcactccaccatgacaggaaatttaatttcaatactttcttaatacttgactccattaaaacaaagattgaaagctaaagtcaactaggaaatacagcaaaagtttgtgaactgagcagattcttctggctgacactggaataaagccctccaagggcagacta

SEQ ID NO: 480535 - DNA, 1000 bp, Homo Sapiens
agcacacacaaggtggtaagtctaagtaggaatttatttacacggacactcaatcatagataaggcgctgtctaggatccacatgcgttccctggagctacttggcatcaggcttcttgtctccggcttcaagcttgagactctccgggggttggcgatagactgggaaagcctcccaggggctgttcaggtcaaatttgcggaactcttgggccaactccaccggctctgccaccacccgcttcacttcatcatcataacgtaactgcaggagcaaaaggcaggcttgagcactaaggaagtccttattatagctacacaggagcctacttttcacaaggctattggtgacttccccagcccattcctctcggttactgactcctgtcccagcctctgtcagtaagtctccatccatacctgtgttacccgtcagatcacatcccaaccagctagagtgtgtgattccaaaatgtaggatacctctcatgccctgccagcaccagtcagattcccctgctcaccactcccacatcaggagctccgaactgactgctcacccacccacacactcttacaaggtaatggtaagcatttgcccaggattagggagtagtcggtggctgaaaagagtaaacctaaactggcagatacacaacctcaggcccggtgcccttggcatattcacagtccagatctaaagcagtacatttgacacagcttttcttgttacttggggatcaaatggataaggtaaggatcatcaggtgctagagtgaagaggcaaaccaggtgaggcagatagcaggagtggggtgaaagggagaagcgagggagatagccctgcccagaagtagcccaagagggaaataggagcatgcaaagcactaacacagcaggagtgactgggaactaaaagagcagggctggagcaccacatctctgcatttctaaacagttactttgctataaaattcacgagtgataatattacacacta

SEQ ID NO: 480536 - DNA, 1000 bp, Homo Sapiens
aacactttctaggatttctagcgcaacacatgagctacgattttctttagctagacaggacatgactgggacaactggtgaaatatgagtcaggtcagtattactagtatttgttcaatgttaatttccttattttgatacttgtaccataagataatgcccttaattataggaaaacacacagcagagtattaggaaaaggataaaggaaatgctgtaagggaatctaggtgaagtatatacaggaattctttgtatttcttttgtaacgttactgaatatctggcattaagttagtctataagtcttacttgactaagttagtctgaagcctgtaggtctgcagttaaaaggaaacaaagaaacagaaaacaaccctcagagatgcacatcctcttctgcctagactggaggcctgatgattaggccctaggcttttgattgaccaagtgagctgtccttgagttgattaaattgtgaggggttgaaaaagagactgtttttttttttgtttaattttaagatgagacttttatttctttatttttttaataatcaatactcactttctgaataccttcttcatttacacacaccttcgagaaaatttgtttaaatactttgctcagggtgaaggcacaaaaccgaatggctccaagacgcagtttgtgactcatttcatctaagatctcactcacttcctctcggaggacatccacagattgaagggattccttggaaagctaaaaggaaaggaaaagcaggaataatttctaacaacaataacagaaaagtcagaaagctttactcaaaccagtatgactagttccaaatggattaatcttctataactcaaagatagtgtcttcttaattgacataacttcccaacacagtcatagtagataaatgagcctatttaaagaagtttaaaggccagaaattaaaagaaaaatggctttctaggatagcattttagagtgaagaaaacacttcacctt

SEQ ID NO: 480537 - DNA, 1000 bp, Homo Sapiens; identical to SEQ ID NO: 119855

SEQ ID NO: 480538 - DNA, 1000 bp, Homo Sapiens
  misc_feature (91)..(91): n is a, c, g, or t
atcctcccccactgtctacaggcgagctggatgtacagggaacgaastgagggtccaggcttctagggactcagtcccactcaccaccccncctactccaggtcggggcagcccgggattcctgcagcaaagaggtgcgtgcgtgcgggggacgtgggaaaccggctacctggctggcatcggccacagccggtgctgcggcgccacctcgtggtctcagggaggctagctggtagatctggtctccaacgcttccttgtaggtgtcagctctgctattcagggagcctatgactttagataaagttactccgcctttctgcacctgtttctcactgttcctatgaggggcttgggtctctaacagcaataaaattctggtctgtaacagacatttgttaagtgcctaccaggcctaggattctttcagtgtctgtgtgtgtgcctctcacccttccacacaccctcaggcgtcccacctgcagatcatccccttggtagcagcctcctgccatcacagcagccctctttccccccaaatcccccaactctcaaaattttgttgaaatctttaatttaaaaaaacagagcaagaagaagaaagatttctggatagaaattaaataatcagctcttaggaccctcctccgccccactcccatcccagggcctgcttggccttcacattaaaaacagaaacattaaagtaacagaccacacccccatcccaaggtcacccttcttgtctgtcaaaaattccagccaccttggggcacacatcctctggggaaaccatgcaggtaaggcaacctaatcattctcccaaaactaagcccagcctcttggtgccctggagaagagagagcctggagcttcattgttctctccaaaccttcactggctcttggtcttggctttgaccttgggcctgatgtaggtctggcagaagaagtgggcaaagaggatgaaataggtcatatacaagatgaaggaccagaata

SEQ ID NO: 480539 - DNA, 1000 bp, Homo Sapiens
cattttcccagttacccaaaccggcttccaaaagaattcgttttaaaagatcatgcttcacagaaatccccagcaaatgttttagaaagtcctacagcgtcccatagtctgcagcgtttctcttccactgttgtgtttttaattttgttctgctgtgacagatgcagcagagctcagactccgctgcatctaccgggaatgattctctcagaagctcaagctgcaccaagctcctccctcccaggcccctcattggctgtgagggcggtgggaccttggaatcctcgcagcttccctttgaaccttgaaaatgaggagagagcaaagcgaattacatccttccttaaacaggagttcagagagttaaaatgtctatttttggagaggtcgaatcaggccatctgctggcgaacaaaaccggctctagctactgagcatgctcagtgtcacttagaaacccacagaagtttcagaatatacatcacttcggtaagatttcagtagataccgcaaacagaagagcaagcagaaagggagatttccaagcgaacaaaaccggccctagctactgagcatgctcaatgtcacttagaaacccgcagaatttcagaatatacatcacttcggtaagatttcagcagctaccgcaaacagaagagcaagcagaaagggagatttgcaagagttttaatgagacgaggagggagaaggaaccacgaaaatgagggaggagggacaagaggatcaacataaaatgaatatgaaaaggatatggaatgaatctgaaacggatcagaaaagaaagtgacaagtgggagggacaccggagaatgccaaatatcaaatacacttggatctgtttttcacagatccccccggcttttttgggggtctgatttcacaaaaggtctcagaacctaatagacaagttgtaatcgagggtttcccttgtaaataaataggataaaagtcttccgtgttacagaaaataattatttgc

SEQ ID NO: 480540 - DNA, 1000 bp, Homo Sapiens; identical to SEQ ID NO: 307715

SEQ ID NO: 480541 - DNA, 1000 bp, Homo Sapiens
tctagaaggctatgtgcctcactaatatttagaaattcttgtactctctgaaaaggagaatagattttgggagtaaactggcaatctttgccacagacacatgccttttcacaaatcacacttttgtttagacaagtgagttcttctcaatcttctttcagagaggtgaatttggaggcaagacaatactgtcagttataattgacggtcaaaataattgcacacctgagcatttttcaatggacagccaatgtgcagtgttccagtgctgaaattttgtctaattttcaaatcagtcaggaagaacccaatgaatatttttccatttaaaggatatagtatgattatgacattcaataaaattcaattaagattaatcattttaatcttaaaccctgggcatgaattgggccttaaacaaaaagttaaacctaaaacctaatcatgtttagcagaatttgctccagaaatattcagctgctaccaaatgtacacttgccaatccaaaaagagcaaatatttggttctggcattgtttccactggcctattcatatatgacaataatgcaaaattcagcagatgcatcctccacattgcaaatcctaaccagatgtagaataattacaatataatattacattgtaataatgtaataattagggagtactacaaatataacaatataaaatataatgattatataatagcatataacattgattttttttttgcaagttgaaacaacactctgaaatcttgtgaagatatcatagccatactatgatggtgaacatagtctgtctcctcccctccatcctcctccttgtgaccctgaaaggaaatctgtctttccacaaaggaaggagaaattctgtgtttatccatagagcaggggagactatgaacacattgcttttattcccaccctctggactagtggggtcatcaggtatgcatttcttggtcagaaaccatgaatggggcccccgcagtcagct

SEQ ID NO: 480542 - DNA, 1000 bp, Homo Sapiens; identical to SEQ ID NO: 307716

SEQ ID NO: 480543 - DNA, 1000 bp, Homo Sapiens
tttttttttttttttttttttttttttttttttttttttttttttctgggacatgattttataggaagcacatttgtgttcaagtgaaggcagaggcgtccaccccaagtcaccagagcgcaggtgcagagaggaaaagctgtcagctagtgccagcctccaagggccagcgctacccttcaacagctggaggcaccactgtgcgaggctttccacaccggcctccctcaggaacaagacatcctcaccaggcaggggtgaggtatgggctccaggactggcttcagcaggcaccaggctggggcaccagctggggcctgggtacgcccagaaggtcacacagacggttgcgctgctctctcaccactgcaagctctgcgtcccacgcagtgtcactgagcacagtcaccacctcgtccagcacatccgcgcccacgacgtcactgtaggtgagcaatgtctcgtacacctggctggccgtggtcttccggatcagcgggaaacggtggcagaggagcagacacagctgcaggagggcctgcctcctcacgtcgccggggaactgcaccatcccgcagaacactgcgatgcctgacaggagcttctggatatcttttgaattcttgatttctttcttacagagcgcaagcaacttcacagcaaaggggtggtcctcctccgtggtgaagatgtcgaagcagccgtgggtgagcacgtggtccagcgtcttcagcagcggcacggacaccctctcattcagaaggttgtcctcaaagatctgcagaagggtcccgctgaagctgcccagggcctgcgggtcgctctgaatgcccttcatgtactcaaagaggctctgggtggagtgccggatctgcaacacggagacacctcagaaggcagtgggacccccgagcctgccacccctcaggcttggctacagccggtcaagcatctgctgaagagcagaactgctccgagctgcagagacgcgaaggtctgg

SEQ ID NO: 480544 - DNA, 1000 bp, Homo Sapiens; identical to SEQ ID NO: 119856

SEQ ID NO: 480545 - DNA, 1000 bp, Homo Sapiens; identical to SEQ ID NO: 473164

SEQ ID NO: 480546 - DNA, 1000 bp, Homo Sapiens; identical to SEQ ID NO: 307719

SEQ ID NO: 480547 - DNA, 1000 bp, Homo Sapiens; identical to SEQ ID NO: 307722

SEQ ID NO: 480548 - DNA, 1000 bp, Homo Sapiens
tttgtgtcataaaatattttattggaaaaaaagtcaccgtcttcgcaacagggggtaggggccccagcgacatcggggacccggcctccaggcatgccgacgggttgccccggggcaatctcaggccgttgtggctgagcccaaccgctgggtccccgacgtccagaagcgggtgtgtgcctggaggctccccggccgggagggcaggctccagacggggtgggggtgcaggcgaggagcggggcgtgaatgcgcgtggagctcgtgcgcacggagctcagggtagagactgtagcttccgccgggctggatgcgagtctcccaggttagagcccagaagcgcgctgggacctgggtctggcttttgggtctgtgtccttccgtttggccccaattgtccgcattcaagatcataataaaaaggtttaggaagtaaacttcttggacgcggaagggccggctcgcgggtttccgccgagtgagggggctgcgggtggcgcgggcatcccaggccccgcaccgtataccgccctcagtcctcgcggctcctgtcgctgggctcgcccggcacctccgccggtttctctgcatccttggcgcgctcctgctcagtaagctgctcgctcgttggaattgagttcttcttgggccgccccttgggcttggtgggagactccaggccgccgccctgcagcactattttcttccacttcatcctccgattctggtaccacgtcttcacctgcaactggctcaggcccagggactcagcaagatctattctgtccggcgtggaaaggtacttctgcttctcgaagcgtttctccaggcccatcagctgcagctcggtgaacacagtgcggctccgacgccccttcttggctttggtgcctggctccccagggcctgccgcctccagcttcccgcggacgtgcaactcgagcggcaggtgtggcgcacccgcggcgccgggcagcccgggccctgccgccagcaacgc

SEQ ID NO: 480549 - DNA, 1000 bp, Homo Sapiens
ttttttttttttttttttttttttttttttttttttttttggggaggacctggcttgatttattatacagggagccgatagttttcctaacacaagtggtcagaggtacagcagttctgcttggccgagctgttgaaggagactgttctcagagctcctccctctgtgatctttttgaggaagcgaggagaggtgtaaaagtgcttttaaactgtcaactggggttcctgtgggaggagttacccctcaatgacggtccataataagctcatgaaggggcatttggagcagccacgacactcagtgcacccttgtgtggggcagccctgccctgggccagaccctttgcaagaagtccacttggaggttgggcatggtgatgtgcgcctgtaatcccagctgctcaggaggctgaggcgggaggatcccttgaacccaggcggcttgagaccagcctggcaacttagtgggactctgtttcaggaaaaaaaaaaaaagtgtatttggctgttctgaagcaggccatcatcacccttcacctcacccacaggtggctctcgggggctggtccatgggcggctgtggcgtcaggatggagtcctagctgtgacctgtgcccaggagggcgtgatccgagtgaagccccaggtctcagagagcaagctgtagccagaggtaccagcttcgcctggggcttcaagaacctcccatctatccccattcctgagacaggagttacagtcccttttggccctcacatccaataaagagactgataccactggagtggctggcttttaattcccctgggccagacctgcagccttgccttcatcccttaactccaggactccaggggcagagtccctggccttcagccaagaggccttgccagcttgggggcccaccaacaagggaacattgccccaacctgtgccacagccccccggctgtttataggctggagaggctgtgtcagacttccctgtactacacaagg

SEQ ID NO: 480550 - DNA, 1000 bp, Homo Sapiens; identical to SEQ ID NO: 307723

SEQ ID NO: 480551 - DNA, 1000 bp, Homo Sapiens
tttttttttttttttttttttttttttttttacttttttttttttttttttttttccatctttgcaggagagtttaataagcatattttatttaaataaatcctccagtaggaaatggaaaattcattgcctttacttaaaaggctatgtaaatagctatctgtcaaatttatatatgcagctcaccaatattcccttactggaaacatcagtatttccacatcacatcacagttcccaaaacgactttaaagtctcaaaattccgggtctcctttggcttgcttctctcttgattccacccaggctttattaatggttcgcttcatatcatcgctccatcttcataaattttctttaaaacattcatcaatccctcactaggatctgtttcagggtcataggagggcttttttttttctttgcactccttttcaacctgggtcaggtaatcccaccttgtgttttccactttctttctacacaatataagaactgtatcagtcttgactttttttgaactgccttccacagagatgggtttcaagagattgttcacaatcatggagtaactcttcccatttagattctttaccaaaagatcaaatgacctctctgtgaaatgcacctgcacattctcagtgggaacttgatgaactccagttaaggtaatgtagattttcacaaacttatctgactgatcccatccataattactgattttcaccgtatagcccgttgtaatgggagcaaccacagcagctggtttttcattatcaagaagttctgctttcttctgtgatttctgttgcaccttgttcttgatttctgtctcaatcttggatttttcagctgtaagggcatcacgtactcttttcctagtagccttttccagcaacacctttacctcttctagatctttctgtagctcttctgaagccatgggggctgggtcaggccgaagtcccgagctgcagccgcgcagaagaaggaacaggaaac

SEQ ID NO: 480552 - DNA, 1000 bp, Homo Sapiens
tctagacctggggttaggcaaagtccttagatgttgcatcaaaaagaatgatccaaaaaagaggaaaaaaaaagataattagatctcatcaaaattaacaactttactctgcaaaatacactgctaagagaatgaaaagacaagccacagactgggagaaaatatttggaaatcatttatctgataaaagaatcgtaatcaaactatttcctggttttgcaattttactatagttatactactgtcagtggaggctcagtgatgggtacacaggacctactatttttgtaacttcttgtgaggctacaattatttcaaggcaagaaggttgtttttttttttttttgagatggagtttcactcttgtcgccaggctggagtgcaaaggcacgatgtgggctcactgcaatctctgcctcccgggttcaagtgatattcctgcctcagcccccctgagtagctgggattacaggtgcccgccaccacacccagctaattttttttgtatttttagtagagacaggtttgaccatgttggtcaggctggtctcaacctcctgacctcaagtgatccgcctgcctcagccacccaaaatgctgggattacagacgtgagacactgtgcctggccaaaaagtttacttttttaaaaaggatcttgggagttatcaagcaaactgcctattttttcccatctttggctggtattaaatattccaacacaatattaatggagcaatcactgataacactttcctggatgacaatctgactcaactaatcaaaagctattagaatgtacaaaccttgaccaagaaattcgatatctaggagcttttcctaaagaaataatcaaagatacatacaaaaatctgcaaatgatgtaggttttcacagttgtttataacagtgaaaagttgaaaaaaacttaaaaattggaaataagtggaggactagttagtataatactgagaagacagaatacaatgcagtcataaga

SEQ ID NO: 480553 - DNA, 1000 bp, Homo Sapiens
gaggaattggaagggagtatacagtaggctgtgagggaggtggggaggatggattgggagggagtatacagtaggctgtgtaggagatggggaggatggattggaagggagtatacagtaggctgtgagggaggtggagaggatggattggaagggagtatacagtcggctgcgagggagttgggggaggatggattgggagtatacagtaggctgcgtaggagatggggaggatggattgggagtatacagtcggctgtgagggagttgggggaggatggattgaaagggagtatgcagtaggctgtgtaggagatggggaggatggattggaagggagtatacagcaggctgtgtaggagatggggaggatggattggaagggagtatacagcaggctgtgtaggagatggggaggatggattggaagggagtatacagtcggctgagggagttgggggaggatggattggaagggagtatacagtaggctgtgtaggagttgggggagcatggattggaagggagtatacagtaggctgtgagggggttgtgtggcaccccttgaggaaacgtcagactaagatggaaacataacaccaaacctcacatgaggagtttccataacgtttctcaccttgccaaaaaatgctttacgtatactgtctagaaataggaattttaaaacagcctttgttaatgaaattcagtgagatctctaaatgtcatgtgtctgtgtcaatgtagcgttaataactctgtggaaaggaatctccaatatccggttatatttgcaaccttgttgtcagagcgcagaggtaactgccccgtcatatacggagtagacactgtgcaaagtgtgttcttccataagatcaagacggtatctttccacataagcttccctctctgtaaggaccttctccaaaatagctgagccttctgtaaaactgcttgtgaaaaaagaattgcaggacgtctcaattacctggtccatgcc

SEQ ID NO: 480554 - DNA, 1000 bp, Homo Sapiens
taggttgcaagctccttaacagaatctaactaaggcctgattatctgaggtggaacagtttcatcctgaaaccatgtccccctccctggtccatggaaaaactgtcttccaaaaaactgctcgctggtgccaaaaaggttggggaccactggtttagtgtatgagtattagccctttagcagggttataagtatcctttagaatggggaccaaggatatgaacagcactcctatagagcccatagctgagccaatcatccatttggtttaccggggacacgctgcgtttatgattcagtatagttattaacagctccctctccttctcaaagtgactctggtgataaatcatatggtcacctcacctacagcacctaagcaaggctatggcacagtgggaccttgacaaatattgcccactgattaaaagtatcatggtgcacctgtaagagtgctggtgctgaggctaccgctctgaataagtgcgctcataaccattcctctaacttcaggcccaaccatgagcagtggttcaaaatcacagcttcatgctttctgtaagtattctctatttggcttaaacagagtctaatatccaagatgctacatgggatcagtaaattctaaaaaagtttcaatcgtggagtaaaaagtgcaacagaggcctctgtaggcaactgaccactagaaaggactgatctttttcgacacagctcacatggaattctgtgatactgcaggtcatgtcatgttatggtgacatgctaatgggaccatagctactgtgttctagacaaacaccctaaaacatatgacatgcagctaagaaaggcaaaaaaggggctaagttatacacttaggtctcacatatgaagaagtctgcatgatcctatctcagagaaagggtttctatccctttctctcttacattaaacctggcatcctaccagaactgtctctgctgaaggtatcgcttttttcttccagcaaacaaataaga

SEQ ID NO: 480555 - DNA, 1000 bp, Homo Sapiens; identical to SEQ ID NO: 307727

SEQ ID NO: 480556 - DNA, 1000 bp, Homo Sapiens
ctggagtagaactctttattcaggctgagccagggttggctcacgtgcaggaggttaaggcacaggaggctgggggatggaagtaggggaggaagaaggaaagttggttgctgccccagccaagtccttagtcaggagctctcaaaagcctcaaacgtcactcctagacacgatggtgttcctcgagaggtgtttcctaagaacagctaacctgaaggtgtgttttcactgagtgacagctctcatctcaagtgaaacagtgtgtgccacctacaacctcccatctccaaatgggtctgcctctgacatgatagactccatccttgccatcagcaacgttcacacctgaacaatgagtgatcatacccaaatgttgacagtgatgacggggaatccttgatgctgctcctggaagagatagcctgagtgggaatgatctctggcctatggaagtacggctggtttgaaagcttacggaagcccttatcatccctcagaaggggcaggtgacctgtgggcatctcctcagatgaaagtttcctctcctcagtgaagcctgatggtaggaacagcatccttctatgccctccctgcccacagaggacctcttgtggtatgtgacaggcaagtgtggtccccatgttctgagtggttcagaacatagccaggggaactccatggctatgccaagaacattggccttgggactcacacatccttctatcagagccaacagatagaaataccaaggccaaaagttggtcctggttgggaccctgacagccagaaccagggacaggagatgactgtggagcagtggaggtgaaccagtggcctcaggccaggaaaataccagtgatgctaagacccagatgggcagaacttcatgcatgctggaatcaggggtcttcaatctccaatcagactgctagacagcatcaagatactgtgtgaaactggagggtgtgggtaagagggccgttctgagggagcaagagac

SEQ ID NO: 480557 - DNA, 1000 bp, Homo Sapiens
ctggttcccccttttctcccttggtgccatcacgcccatctttgcctgggaagccgttgatgcctggagagctacaggcaatcactgcagggcaggtcttttgggcatcctcacaggtcacagtttctgagtaagacgctgccaccatactcaggagaaggagagggagtgatggaaacagggacatggtcctcaccttggtgtgagaaaactcagggaaggttaatctcagttaatgaacacatatttaccgagcatgccctctgtcctacaatctgggtgcaggctatatagaaatagatgacccatccctggcctctagctggggatttggaaaagtaaacattccttgtgacactgcgtgactagtactttaacaaaggtaggcactatgatgagcagtggggatcctaaggaggggttcatctgtgcctagacacctggcgttgctgctggaagactataaacatgctttcggtggcagtgagaacaaatgggaccgtgcattgccagctggcttatgcctgttagcttagggaatgagaatgagtggaaacccaggtgtctgtaggagcttcctctttctctccatgtcctcttcgggtccatctgccacctgaatcccatctttgtatctgggcagctgattcccctccaggacctgttaactatcatttactcattggcaggccctgagctgaaagctggtgatccaaagaggaaggtctcaacctcagatcaacctcaaccttagtcaccaacccagcccagaattaactggagtttgcttccccttggtgttttagacaggcttgcctgggtaagcattttctctggaaatttcttactacgttggccctggcagagtgctaaatacctctctactttctggcaggaattccccatgttctgtgagtcaaaaaccactggcaattagaaaacttgccttgaatcctcctcccatttctcagtattaacctttcatttgttcttcagagct

SEQ ID NO: 480558 - DNA, 1000 bp, Homo Sapiens; identical to SEQ ID NO: 307730

SEQ ID NO: 480559 - DNA, 826 bp, Homo Sapiens
ttgagggcggggaaaatataaacttttatttagaattaaagcaaacacttcagtatcacaaacacgacacggggccgcgggcgttcatggcgggcacagcgcgggcggcgctagccctgcagcgagtaggccaggaagcaggcgtcgggccgcgcgggcaccagcgggtgccccggcctcaccagctcgaagcccaggaagccgaaggtgcggagcagggcggctcggtcctcgcggttcttggggaagcagatgaagacgtgctcggcgcgcagctgctcctccgcgaactccagcagcaccgcgaggctgtccttgcagccctcgggcagcgcgccggccggcagctccacgtacaggcggttggcgctcagcacggccctccagctgacctgccgggcgtccgagagccgcgagcgcacgtgcaggacccgcgtctggccgctcggcgtcagctcctcggtcacgctcagccgctggtccgagtacagcggcgcggccgcgaggctgggatccctctggctatcccctcgcccacctgggatcttcaggggtgggtgagggacatcaggagcaccaccgaggccccggacccgggtgacgacagccgtggggggaggccctctcggcgctgcggccgccgctgccgccgggcaggctcaggcgcggcatggtgtggctggcgtgcgcggcgcgggctttgtccccttccttctctctggcgaagcagtggctgttgaggatccgctgcagggaggatttcaccatccggccgctcgggtccgaaaccagcaaaacccccgctgcgcctccccgcgccccgccc

SEQ ID NO: 480560 - DNA, 1000 bp, Homo Sapiens
ggcaggccgctcggagcccatgcctggaatcccagcactttgggaggccgatggcggaggatctcttgagcccaggggtttgagactagcctgggcaacatattgagaccttgtctctacaaataataataaaaagctgggtgtggtggtgctagccagtagtctcagctactcaggaggccaaggtgggagtatcgcttgagcccaggaattccacatcagcctggccaacaaagccagaccccatctccacacacaccaccccccccccaaattaatcctagtggtatgcgcctgtagtctcagctactggaaaggctgaggcgggaggatcacttatcacttgagtccaggaggtggaggctgcagtgagctgtgatggcgggtgacagggtgagacctttccctgccccctaaaaaagaaagaggggcagaggccgggcatggtggctcaggcctgtaatctcagcactttgggaggccggcgggtggatcacttggtcaggagtttgagacctgcctggccaacatggtgaaagctcgtctctactaaaaatacaaaaattagccgggtgtggtggtgtgagcctgtaatcccagctactgaggcagcagaatcgcttgaacccaagaggcagaggttgcagtgagccaagatcgtgccactgcactctagcctgggtgacagagccagactccgtctaaaaaaaaaaaaaagggcagagagaaagatacacacagacacagatggagaggagggggctgagaattgtgtggccagtatgtgggcagaaagagaaactgaggctggggcttagaggaaatcacagggggaggccagcagatgcgtgaaacttggtgaatctttattaaactagggtccaccccaggaggacggctggggcggggacagggtctcccgctgcaggctgcgcggaggcaggaggcacggggtggcgtggggtcgcatggctgcaggcttcggcgttcagtgattgtc

SEQ ID NO: 480561 - DNA, 1000 bp, Homo Sapiens; identical to SEQ ID NO: 307731

SEQ ID NO: 480562 - DNA, 805 bp, Homo Sapiens
  misc_feature (29)..(29): n is a, c, g, or t
ctccaattttccccttgctcaattccccncacataattaagtgagagggccaggcaagaaatgccttcaatattgctaccacagtcaaggtcaaagtggtatctgggcagcatgcatgctgatactcacggtaaaggattccttttccacagcatgaccctgctttcctctgcttcatggcctctctgtcgagcatcacccccattttccccaatgactggctgtactttgaaacattccattttctcatcccacgtccccagaagagcaaagtggacttttcctgatggatctgtcacttcccccgtcacctgcaagggtggagaacagggcttggctatatagaattcactgtgaattagcttacctgactatactggaagtcctaggataaataatggttaggtcctgttataacaaacaccagagggtcatccaaattattattagagatgggatcttgctctgttgcccaggctggagtacactgatgcaatcgtagctcactgtggcctccaactctagggctcaagtgatgtctcacctcagctacttgagtagctagaactacaggcatgtgccaccatatctggctaagtctttaattttttttgtagagaaggggtcttgctatgttgcccaggcaggtcttgaactccttggctcaagcaatcctcttatctccacctcccaaagtgttaggattataggcatgagccaccatgcctggcctcaaattattttgttgtatttttttctgctacttgaaataactgagccatggacttgggggatttcattatca

SEQ ID NO: 480563 - DNA, 1000 bp, Homo Sapiens
agtttgggagcaccatgctcacagctgggggtgcagaaagagccacctgtgggcacacacagcaccagtcccctgctggcatgccctacctgcttctgcagcccattgctcagcaccccaggcctgctccagtccctgggtttggggcacagggccctgactccccaaagggatgccagtcatgtggctgccaattaggtaccttggaggctgaggtgagctggtattcagacaaactcgtggacaagagagtggaagagtggccacagctagcccagtcctggtttgtgggtcagggccagcccctgaaagtgaggagaatctgcccctggaggtcagtagtaaggctgcatgcagccccgatggagtgaacgcctccagtagcacagaggtttctacggcaagaagttgccccttgccagcctgtcaggccctgtgcttgctacactgtctagcccccagctctggtgggtgtgaggggctggcaccaaatatgccggtggcagcggtgccaaagcctccctcagaccctgagggcatgggtctggcggcagtggcaggggagagatcaagctcgcagtcctgaggctggtgagtctgagcaaaatgatatatttaacatcaaatatactcaaggactattaggattaagtattcaagatgaaggggaaagtgaaaccctctgagctgcagatgaggcatctcattagaagcagcgcttttctgttttctcaaagcctgacttccctgcctagcagagaggaatatggctgcagcccgctgctccccatccctgtcaagcactggggcctcccagggcttaaagggtaagacctagcctccaggtctccttcaaaccagataatctccccccatccccctgcattgtctggagtgccacagtttacaaagcacattaacatgcattagctcatctgacccccacagcaaccatagatacaggaagagtaggtctcccacctcacagccaaggaaactg

SEQ ID NO: 480564 - DNA, 1000 bp, Homo Sapiens; identical to SEQ ID NO: 307733

SEQ ID NO: 480565 - DNA, 1000 bp, Homo Sapiens
ttctacctgcccgatccatactgccaagactgtaaactccatgtgggtcaggatcctcccatccataatttattgagcacttactatataccaggactattctcagctttttgtatatttgcttagttaaccctcccaacaaccctatgagttagatactaatattatcttcattttacagattaggaaacagaggtatagggaggttaaataacttgcccaaagttacacagctattaagggatagtcaggattctagcttcagctgttcatctccaaagtccacagtttgttgaataaataaatgttgaaataatcgagcaaatcatcttcttaactaaccaacacaaatatcaacaaaataaataagagacctggagtcatttcttaacctttgttcattatataaaaaaaagcatgtttttttttcctttgtttttgttactatggatttgaattcctaaagaattatttctagagaaagaaatggagaaacaagactggtttctgatcttgtcatatcttgtattttaaaataaagggcaggcttacaagtaatgacaataaatttataatgttacataggaggctgggtgcgggggctcacgcctgtaatcccagcaccttgggaggccgaggcaggcggatcacttgtggccagaagttcgagaccagtctggccaacatggtaaaaccccacctctgctaaaaatacaaaaattagctgggcgtggtggcacacgcctgtagtctcagctactcaggtggctgaggcgagagaatcacttgaacccaagaggcggaggttgcagtgagccaagattgtgccactgcactccagcctgggtgacagagtgaggcttcatctcaaaaaaattaaaaattaaaaaaagtcacatattaggtggaagttctatcgactataattacagcttaaatgaaaacacttcttaaaatcagccctagttaaaaaatacttgaaaccaaaccaatacaatta

SEQ ID NO: 480566 - DNA, 1000 bp, Homo Sapiens
catacgagatcgatgtgcacgtcgggagaaaccacagcacagccaggagtactggcgcacagtgaatacgcttccgtcctttcaaaagcctttcccgaacggtatcttgtaaaaaatgccaaaaataaaatgaaaaaaactgccaggaaaagagaactggctttcagtgttaacgaaatggattctccagaagcatggaaatcaggactgccacgcaggagaacgcacagacaggtccaaacgcaaacgtgccccctgagccccccatcttcagacacgctcatgcacactggaggcgcttccaccgccaggccccgctgacagcacagccggctgctccctcaccgacggcgccggttccgctcttcaaggagctggttgtcaaatatttctttttcccttcagaaaacaagagtcttcattttagtaattaatcattgtgtgttaaagaatatgagagagaggactgggtgtggtcgctcacgcctgtaatcccagcactttgggaggccgaggcaggcggatcacaaggtcaggagatcaggaccatcctggctaacacggtgaaaccctgtctctacaaaaaataccaaaaaaaaaaaaaaacaaacaaaaaaaaaaacaaacagccgggcgtggtggcgcatgtctgtaatcccagctacttaggaggctgaggtaggagaatcgcttgaaaccgggaggtggtgcttgcagtgagccaagatcatgccattgtactccagcctgggcgacagagctaaattctgtctctaaaaaaaaaaaaaaaaaaaagagtatgacagagagtccaggcactttggctcacgcctgtaatcccagcactttgggaggccgaggtgggtggatcacgagatcaggagttcaagaccagcctggccaagatggtgaaatgctgtctctactaaaaataacaaaaattagccaggcgtggtagtgggcacctgcaatcctagccactcgggaggctgagtcagaa

SEQ ID NO: 480567 - DNA, 1000 bp, Homo Sapiens; identical to SEQ ID NO: 307734

SEQ ID NO: 480568 - DNA, 859 bp, Homo Sapiens
tcttccaaatggttgggcagaattcaacgctaaaggttggaaaagggcgtctgtgggctctccctgagatacacccacgtccctctggcatggggtctcatggcaacagcagatggctccctggtgtggtgggtttgcgtggttttctctctattttccttgttttggtttttgagaatggattgttgtttgaacactctcggtctcctctagttcttgttagaaatagagaaggtgttcatgctgaaatgagccctacaaggctccctgcagatgtgggtcaaatccttgtggaggatgtggaaagctcctggaacgcctcttacctgcaatgtcacagagttctgcatctgaagcatttgccaaggcttcctccagctccggttccagcgtcacactttccagcacaggatccagtggcttctgcttaggaacccagacctttcctgcaaacacacaggggacctgttacgggagtggctgcaatggaacagcctctggtggacccacagccctgcgtggaccattgtagagccctgtgggtccctccatgctgagggtcccttcaggtttctccctctggggaccaacttctccaaagaataggaatcagggatctccaacacagcacccctcacacttgaaaagaatgattttataacttggtccaagctgactaccctctatcaaaagcattggtcatgaccaaacaatctgtaagtaggaaaaaaatatgaaagaaaaatataatagaatgccagggtatgggataccttacccaaaggttctgagaccttgggaaatgagagaaaatgtataacatttctaacaacaataaattgaaaggagaaaataatgc

SEQ ID NO: 480569 - DNA, 1000 bp, Homo Sapiens; identical to SEQ ID NO: 119858

SEQ ID NO: 480570 - DNA, 1000 bp, Homo Sapiens
tctagcctcgagggggcgagctcgatatcgcatgcggtacctctagaagaagcttgggatcagtgcagacataaacaaaatcaagagtaataaaacaatacaggagaacaaaagaaaagttgagtttttgaaaaaacaaacaaaattgataaatatttagctagagtaaataaataaaaaaaaaagagtgaagacccaaataaataaaatcagaaatgaaaggatgcataactgagactggcagaaatacaaagaactggctgggcacattggcttatgtctgtaatcccggcactcacgtctgtaaccccagcactttgggcggccgaagtgggcagatcacttgaggtcaggagtttgagaccagcctggccaacatggcccgtctctaccaaaaatacaaaaattagccgggcatggtggtgcgtgcctgtaatcccagctacttgggaggctgaggcaggagaatcgcttgaacccgggaggcagaggttgcagtgagccaagattgtgccacttcactccagcctgggcaacagtgtgagactcttgtcaccaaaataaataaataaatacaaagaattattagagttattagagttacaaacaactacatgccaacaaatttgaaaacctataggaaacagataaattcttggacatatacagactaccaagattgaacaacgaagaaatagaaaactccgatgaaccagtatcgaataatgagattgacagtaataaaaagtttcttatcaaagaaaagcccaggaccggatggattcactgctgaattctaccaaacattaaataaaagcaaataccaattctacccaaactattcaaaaaaagagatggataaggagggaatactgccaaactcatactacaaggccagcattaccctgatagaaaaaccagacaagaacacaacaaaaaaagaaaactacaggccaatatctgtgatgaacatagatgcagaaatccacaacaaaatatt

SEQ ID NO: 480571 - DNA, 1000 bp, Homo Sapiens
aagctttgaaacacaaattttattttatcttattttattttatttttattttatttttgagatgaagtcttgctctgttgcccaggctggagtgcagtggcatgatcttggcttactgcaacttctgcctcccagattcaagcgattctcctgcctcagcctcccgagtagctgggattacaggtatgcaccaccacacctggctaatttttgtatttttagtagaggcaaagtttcaccatgttgccaggctggtctccaactcctgacctcaagtgattctctcaccttggcctcccaaagtgctgggattacaggtgtgagccaccgcacccggcctgaaataggtatttacaatttcagttttgtagatggtgatacaaaagttctgagaggttaagtaacttccccaaagttacacagaatgttattaatgaaaaaaggaaatattgaaacctagatctgttcagctccagatctcatcactttcctccaatacgacgtgtacaagcagccacatgactgaaaggaagcacagtttcacagtgtgtgacctaccgtacgtaggggctccaaccagcagcacttgtttcagagtcccattcatcagtacgtggccactggaaagggaagtacccagtttccccattgcctgtgagacacaataaatcaatattgtataggtgagaaaacttccttggagtgtccactctcctgtgtggggagggcttgtcataccttgtctccagaaatggtaaaccagctttggccgtttggtgggaagtagccatacaccctcccaaggctctttttctcatctcggatgtgtaacaaatggcccagcctagaatgaagcacactgggcttagctgccagggcacaagactgacagctggccaggtactcaggagcaaggaaaggaaatgcacctccccccatccaggcctcccagcaggctctgtctctgtgaccccaggcctggaagtgtggggactattgg

SEQ ID NO: 480572 - DNA, 1000 bp, Homo Sapiens; identical to SEQ ID NO: 307740

SEQ ID NO: 480573 - DNA, 1000 bp, Homo Sapiens
cacgttcactctgtcgtatatcacatagcaagtagtagaatatacttaccttacagcatcatcttcatatgccaatatgacattcacaaaggagtctccaaacagagaacgacacactcgaccagacatcgatagagaagcatacacgtatgaactcaccaaccactgacccgctagaaaatcaagatcatatcgatactatagaacaacgcatagagagagtaacagagtcaagtgcacatagcgtgataagagcaaatgtacagcacatactcacactgcacgagacaattaacacgaaatgtctaacacaacagaggacgaaaaatattcagaatacgaccgttcacgacagcgaatgaaatcaattctaaaaaataattagcaacagtagataggggaaaacaattatcgaatccaatccccgtcaccatagacaatcaagagtaccaacgccgatccaaaatcatcataaataagaaaagacaaataggatctgcgacaacaacaaccacaaataagtaaatcatggaagttacaagaaaaagcgaaagcattgatatataaaaaaaaaataatagtccttagaattcgctagtacaacagggtaccgatcgacaaacaatactaattttttgaaacagtctcgctctgtcgcccagaatgaagtaaagtggccagtctcggctcactgcaatctccacctcccaggttcacaccattttcctgcctcagcctcccgagtagctgggactacaggcaccccccaccacgcctggctaattttttgtattttagtagagacggggtttcaccgtgttagccagggtgatctcgatctcctgacctcgtgatccgcctgcctcggcctcccaaagtgctgggattacaggcgggagccactgcacctagccaaaaataattattgtacatttagaaataactaagagcataattgggttgtttgcatcacaaaggataaatgcttaaggtgatggat

SEQ ID NO: 480574 - DNA, 1000 bp, Homo Sapiens; identical to SEQ ID NO: 307743

SEQ ID NO: 480575 - DNA, 1000 bp, Homo Sapiens
tccaaaataactaggaattaagatgtaaaaaaaaaaaagacagattgaagcataaaagagacaggacaaaagcaaaatatcaaggaataggattaaatcaataaaaagcctgagggagaaatgtatatttttttcataaccaaccatgttaaaggaaaactactagaacaacatagtgtctcgtagaatctgtttaaagtatgcccactgaatcattacatttatatgttgtcatagatatacatatgatagatatgtctatgatagtctatgtagatatatcatagactacatatgtagtcatagatgtatctagtaatcatcactacaagtagcaaatatatcaaacagatgctgaataagattttccatggcattgacatgttgcttggtcagttttctcatcaagaatttcagaaacacagatgctctagtttgtcagtagatttttctttattttttttctttttacttgttttttgtttttgtttttatttttttgtttttgtttttgtttgaggcagggtctcactctgtcaccccagctggagtgctgtggtctgatcatggctcactgcagcctctacctccctagatcaagggatcctcctgcctcagcctcccaagcagctggagctacaggcatgtgccaccatgcccagctgaatttttttttttttttttttttgtagagacatgggtccactctgttgctcaggctggtctcgaactcctgggctcaagtgatccttccgcctcagcctgtaaagtgctggaataacaggtctgagctgctgtatttgacctgccaagtgcttttttaatattgcttagtcctggttgggtataatcaagaaaaacatcagagaccaaagaaaaagagggtttcattgaaggaaatgtgataaaaatgctataatacatctctgtcctggaggcacttgctatctagataggtagcataatcatactcaaagaaaatacattatttaacaaaaat

SEQ ID NO: 480576 - DNA, 1000 bp, Homo Sapiens; identical to SEQ ID NO: 307745

SEQ ID NO: 480577 - DNA, 1000 bp, Homo Sapiens; identical to SEQ ID NO: 307746

SEQ ID NO: 480578 - DNA, 1000 bp, Homo Sapiens; identical to SEQ ID NO: 307747

SEQ ID NO: 480579 - DNA, 1000 bp, Homo Sapiens; identical to SEQ ID NO: 307748

SEQ ID NO: 480580 - DNA, 1000 bp, Homo Sapiens; identical to SEQ ID NO: 307749

SEQ ID NO: 480581 - DNA, 1000 bp, Homo Sapiens
tgagtcctctctaccctgtttatatttatactcgattttttttcctccagagagcctcaaatcagtattatcaacttcttataaagttaaacatatgcttatcgtacaatccagcagtcccactctgaggtgtcttcctaagagaaaggaaaacatgtccacacaatgatttgtacatgaatattcatagcagccttatttatcattgtcagaaactggaagcaacctaaatatacaacaaccggtgaatggaaaaacaagttgtggtatacccacacaatgctgaaattttttaatcttttttttttttaatgattactggatatattttggagtgagattgggtcctctctactctgtttatatttatacttgatttttttttttttttcctccagagagcttcaaatcagtattgtcatggttaggggccttccgcatggcaatggtggctttatggggtttaaggaccccaggggttaagtcaggtctagattaactgcttggcagcctggacaacatcgtgacatcgtgagaccgccatccaagtttatgttcactcctttcttttctttctttcttcctttctattattttatttttttttttttttttgagatggactttcactcttgttgcccaggctggagtgcaatggcacgatctcggctcatcacaacctccacctcccgggttcaagcggttctcccgcctcagcctcccgagtagctgggactacaggcaggcaccaccatgcccggctaattttgtatttttagtagagatggggtttctccatgttggtcaggctggtctcgaactcacgacctcaggtgatctgcccgcctcggcctcccaaagtgctgggattacaggtttgagccactgtgccctgccctaagttcattcctttctattgctgagcagtcttccatagtatggaatatcacaacttgtttatccattcaccagttgtatatttgggttgctttcagtttcc

SEQ ID NO: 480582 - DNA, 1000 bp, Homo Sapiens
tttttttttttttttttcacagtccaatttttatttccccaaaagatgtttttcggaaaggtccctttcccttaccatagctagcaccataccccaagaccaggatgaaataagccagggaaaggagacacatcttattcccttctgggttagtctttgagagggaagtggccaaacttttgtcaccgttccatggtctgaggcttagtgtcttcagaggtttcttcctgtccctgctgcagctgccacatgtcagcatacaccccacctcgggacaacagagcctcgtgtcgtcccctctccacgatgcagccatccttgatgacgaggatctggtcagcattgaccacagttgagagcctgtgtgccactacgatggtggtgcggttggcacagactttggccagagaagcctggatggccctctcattagatgtatccagcgctgacgttgcctcatccagcagaatgatgcccggagccttgaggatggtgcgggcaatggcgacgcgctgcttctccccgccgctcagcttcagtccccgctcgcccacctgtgtcctgtacccttcagggaaagccataatggcatcatggatgcctgcagcctgagcagcagcctccacctcatcattcccagctgtgacacggccgtaacggatattgtcggcgatggtgtcattaaagaggacagtgtcttggggcacaactccaatgtgagaccggagagaggcctgggtcacctgtgaaatgtcctgcccatctattcggatgcagccagagctgatgtcgtagaagcgaaacagcaggcgcaaaattgtgctcttccctgccccagatgggcccaccagggcaagtgtctgtccaggcatcacagtgaaagacacgtcctgcagagtctcccgcccatcggcatagctgaagtgcacgttctcaaactcaatacggcccttctgaaagcgaaggggccctgctccaggaaggtccttcacttctgtct

SEQ ID NO: 480583 - DNA, 1000 bp, Homo Sapiens
agaagacctttttgacagagacttagaaaagcatcccccctccagccccaccccaaaagggaaattctcagctctctgttgttgtaacttattccccaacacttacagaaaggaaattttacctatttctctttgatgctggtatgtgggccttatttaattatataaagtagaaataactgtacaaactaaaattagataaagccagcaagaagaagttactttcatcactagtgctttggaataccatatcctctgttacaacgttctcaaggaggtatgcaaggaaaccagagacagaagaaaaaaaactcagaatagttgtctgaactttaatatttgaatcaaggaaaatgtgaacagatgaaactgttagtaagagagaaatggtgcatgcacaaaagggatagattaataaaatgacagctgattgttggtgatgaacatatttgttttccttaacatgtcccaacttccataattattcagatgtacaacaagtggtcctaatgtcctggctgaaattgcccaggcgtgcaacaaagcaagctggttttgttcctgaattatgcagttaactgaggctgtttgggcccagatttgatgtggtaagtagtcagaatgctgacatatgattattaaaaattattaaaattactttcttcccattttaatttgataaggtgatttcacacaattttgcatttcaaatatttctaagtaaatttagtaaaccaaagatgaatatgacaaacctcaaataatatgttttagaacactttcccatttgaactgttcactatatatgactgagtttattatacctccttcaacatatacaatattgatgttaaatgtcgtggtaatatatatgaactacataaaaacagtgttgctttctaacgtgtggcttgtttaaaccctaaaagagcacagctggctttgctgagccaaccatattattgatccgtcttgactgtgattccacttgtgagataaa

SEQ ID NO: 480584 - DNA, 1000 bp, Homo Sapiens
aaagccatgtgttcaccccaagaggaacttcagctctgactactctcctctaactggaattatgcacaagattcggtataactgttttctctgggttctcaaaggcctgtgtggcccagaaaacattaagaagtattagcctggaggacccctgggagaaccccagaatctttccactgtcacccaccaccaccttgctgagcccccagcaggcccagttcagacaatggagcacacacaaagccttctgcaaggcagcacactcactcccgcctctgtgtgtctgcgacgagctcagggcagctggcggtagaggcctcttcccaccatgctgccctgggctctacccttgacagatgcttccagacttgaggataaatttgagtttattttaggaaaaaaaatgcttaaagcacaaattacagagaggaggagctgaaatccttcaaaggcctgagcttctactcctttcccttaagattcctccaaagcaccagctccataaaatccttcagctccccagacccacaccaagaaccccacatgttaattggatcagccaaatctacaagcagataagtcctaaggagaatgccgaagcgtttttcttcttcctcaagcctagcatgagtaagcccccaaattgctagtctggcagaatggcagactctgcctccagatccaaatgatcacctagacaccccctcaggctcctgggcctgggaccacagctacgcagccgcccccactcctctcagagccgagtggagtagcctgccaccgcaatgttctccccgttgacgtagctggcatctggagagcacaggaaggacacgattcctgcacagtcctctgactccccaatcctggatggaagaaggacacagtgtcaagcatcttgtactctgattctgctgctctggggctcacggatgacaggtgggagtgggctccatggggaacaaggtggatgcagcagggctacttgcaccctccaggg

SEQ ID NO: 480585 - DNA, 1000 bp, Homo Sapiens
ttttttttttttgtttttggtgtttttaattgtttttgttaatgtaaaaacagaaccatcacagccgctcagctctataacccatccagcccaagactgttctagtggtgaaaccaagagtagacaggtcttcctacctcagtgacctcaaaacacaaggacatctccatagggcatcaacatgcatctgtcatccaagaatctaagaacttcctgatccttccacattttctatcaataatattgccttctgaggttatggattccaggtcttctatgaaataggtaaagcttcctttcgcgttccaagaaatatagtttgcgaagggaactggaaaacgtgactctaggcctcagccacttcctctgttaccctgtgcaagttgtagaacaatccacgttctcacagctccccttcttcagttgtggagttcttcaaggtggacagatcacacctcaggaagtcatcccttgtaagcacactagaatttatcataaaggcaggtcggcttgttagtttttctttgtccccagcatacactgagccaacaacttaagtcatgaatgggttgtttagggctctgtctgtcctaaatgattcctaaaagcttcatatagctcatatagtcttattgtccactgctcttttggtgtggtatgatcctacctgtaaagctatcaaacccctgggtcctggatgcctcctccagatttcataccttcctcaagtttactaaatactttctgaatttaagaattttgagaaagtcacctaccagctaatgcaaaaacacagcctaattctgtgtgaatccctgttgagatcagcttttcaggtcagggagggaaggtatggggtttagggtaccctctcctatcacacacatcccccctgcccacagtaccctgacctaccttgcctgagactcctagacactatgagctcccttctggctgccactcagactggccaggaaggctcccagattgaacacaggtg

SEQ ID NO: 480586 - DNA, 1000 bp, Homo Sapiens
tgtgttgaggaggagctgggacctgggaatggcaggtgtccgctgaggggaaccgtgtgggggaggagctgggacccgggaaatggcaggtgtcctctgaggggaaccgtgttgaggaggagctgggacccgggaatggcaggtgtctgctgaggggaaccgtgttgaggaggagctgggacccgggaatggcaggtgtccgctgaggggaaccgtgtcggggaggagctgggacccgggaaatggcaggtgtcctctgaggggaaccgggcgggagaggagctggggcctggaaggccaaggcaagggctgtctccagtccacgctgcaccccaagaagggaagtgtggagaggtattgactggtggctcagtaaaatggcctggaagtggccttggtgattccagaatctgccagctcactccctttggcaccgtgtcctgctgtgtccagggcgggcaggtccatgctgctctgggtccagggaaggtctgggaagagtggccagggacttggagggcctctcaggtgaatgatgggaggtggctggatgcagggatggccagtgcgggtctgcatggggcgggtatcagatcgtctggtgtgtgtgtccctgatgaggtgggaggggggtgccaggtgggtgttcggcagctgtgggcactgtgaggtggtggtggggggaggctgctgggacatgatgactatgggagggtgtgaggtgggcaggcgcctgcgggggcaggtcccaggtggagaaggtggcgtggtgtcttgctgtctcaggcccttcctctgtgcatccacgtaagtgtgggtaagccaagaatagcctgggttcaaatccacctttgccgttaattggctgtgtgctggtagacaagttacttagcttctctgtgcccccactccctcatctgcacgcgagaattgtaacagagccttcctcagagcgatgatggtgtttaggatgacatgcgctgcacagcaagtcctggcc

SEQ ID NO: 480587 - DNA, 1000 bp, Homo Sapiens; identical to SEQ ID NO: 307750

SEQ ID NO: 480588 - DNA, 1000 bp, Homo Sapiens; identical to SEQ ID NO: 307752

SEQ ID NO: 480589 - DNA, 1000 bp, Homo Sapiens
ttttaagggagcactttttggaggaagtttattaaattaaaaaaaaaaactacaaatgagtaattataaaatataatttcactcttttcattatttaccacaaaaatttaaaaataccaatatacagacgagcacaagtgaactggaaaagagctaaaaattgtataaaagacaaatctaaactcaagaatatatgagaagtgacatacaccatacactctcaagtgagttcagaaagcatgttccgtgctgggcaggttttctttccaggtcagtttttattggcactacacctggaaagctctctaagccaaagttcttatgtgtcaggatcttcctagacctcccttggaaagcatttctcataaaacaactcacaccagacaggctgacttattgtaggcacaaaaatcataaatgcctctcataggccccatggagcttggaaaaaaaagatctgctaatgaaagcattacaaaaacagaaaagtggcacctagtggccacttagcagcttttctttatggcttctagctaatcatagatgtcggcctgtctgcccgtaacattgtgctgggcaagtatgagtctccaattccagggctcagtgatgacccacctgagggggagatacctcttggcagcatgatctgaaactggacactactaaacatggtctgggaactaaatattggctatttcttgtacctgtgccccagattttacggagatccctcaaagactatgacaacaaagacatccttttctgtcgtgacactgtaaataaacactttcttttaaattccatttatttactaaaagtctctattctgtactttcctgtttgtctttgtttcacaatagatttctaaatttagtgatgaccatataactcatttcacttgattccaagtatcatcctgtaataacacatctgatattttaaagtttattattttcaaaaggttaaatttggtaacatggatagagacttgttattt

SEQ ID NO: 480590 - DNA, 1000 bp, Homo Sapiens
gatcctaagattttctaaaaatagcttcagagcttagtagactgaagattgcttttctgtctttttgtttttctctagagcagtgcggtttaaaggctatcagcagcaagacagccaggagctgcttcgctacttattggatgggatgagagcagaagaacaccaagttagcatgttatgaccattgtattttatgatcttatcttcataagctttctgtctcatttgatatcttacgagttaaaacaatgaaagctagttattaaggccatcatactttaaaattttttcttacaccagctttttcaactagtatgttttcaccattagaatgaatccagagaattagcagtaattctctttctcatgatggcttaagtttagttgatgtttacagcattaatgttctttaaagattctgttgtactaacctatacgaagagagctgccaaatattggaaattgtttctcccaaacccaggtgcagcacacccttacttttaattctgagtctgatttaatactgttttttgaacctaggaagtattttcattttgtaagagtcagggaacattggttgcattttaaaatttttgttacttgccaggatataaaaaaatgtatttggggtatgaattaatgagtactaataatagtgataataactaatatttatttcgcacttatttttatgccaatcactgttttcagtgttttgtattaattcccttacttcgttctcacaaagtttctgtgaggtggatactgtgattttttcctattccatagattgagaatctaggctgtagagaagttcagtacctagtttaaggtcccccagaaataatggagctgggctttaagcactggagtcagaccctgtggctgtcatgtaatcattgtgcttgtaggacaagctatttcagtttcttctcaaaggtggtgggcatgttctgaaaacctttggcttgaagaggtttaagatcttgaaatgataaga

SEQ ID NO: 480591 - DNA, 1000 bp, Homo Sapiens
gaattcttttttttttttttttttttttcagcaacttccctaccatcgaatttttattatgcttctcttggaagtgaatgcacctgagcatgtgttggaaaccattaatttccagacacttacagctttctgcaatacacttccacatgttgaggcctaccaaagctcctggctttgtatatgcctggcttgaactgatttcccatcggatatttattgcaagaatgctggcacatacgccacagcagaaggggtggcctatgtatgcacagctactgattgatttattcaaatatttagcgcctttccttagaaatgtggaactcaccaaacctatgcaaatcctctacaaggcactttaagagtgctgctggttcttttgcatgatttcccagagttccttttgtgattaccattatgggttctgtgatgtgatcccacctaattgtatccagttaagaaatttgatcctgagtgtcctttccaagaaacatgaggctccccgacccattcactcctaatctaaaggtggacatgttgagtgaaattaacattgctccccggattctcaccaatttcactggagtaatgccacctcagttcaaaaaggatttggaggcctatcttaaaactcgatcaccagtctttcaaacagttccatgcaaacatcacatttttcaaatggaaaaacttccaactggaccagaagttcatactgctaatgtacttttcattgaaacaatttttagtaagtacaaatacatggcattaaggttcagaacctaatataggcctgacaatcaagtccttattttctggaggaaggcctcaagtccaataaatttccagtaacaatgtttttacaaatcaatttaataataaggggttttattttccttcatgtttttgtttttagcattctagtcttaagactagattagaagttagctcaattccccaaaaggcaaatggtttttctttgcagtatgaaataatccac

SEQ ID NO: 480592 - DNA, 1000 bp, Homo Sapiens
atgttgctggtattaccctatattactaaggcactttacagttgaaaaaatgtttttgtatatattatataacctcattctagcaacaaacttgcaatatcagcaggatgattactatggcctaaatgtttaataaaaattatgcaggaaggaacagaagacagagcaccgctcagccccagcgcacagtcaggctctctcattataaattacctagcttttatgtgcattttaataagtaaattccaaagtcaggcaagyctttcaacaccgtgcaaccagaagtgaaacaaaatggacacacatagctggtaagctcaccctaaataaacacattcattaatatacaagtctggttaatcctttcgctacttctcaagttactggactctatatattagaaattgaacaagagcttgtctacctgtcttgctttatgggctgtgtgaatgccatgatttctttaggcagctcacagctcttgggtctggggaccggcccacgttccagtcagaaacagcaccgctgtcaatgacccactgaaacacaaaacacacaacttcaagtccaaggacggtacctgccgggcaacgtggctcatgggaatgccgtgcctcttcatgcagctctgccctcggtagtcaggggggttccctatctcatacccggaagttgccgcgctgtctaccctccactgcagggaagaaacatggaatttttttttttttttgcaatttcctgcccagaggagttcaggttggcctctttaagatcctgaatggtacttacattctctgagatgttttgatcggttacaagtttcctgaaaactgcttctgcaatgggtgatcgacaaatgttacctttaaaaaaagggaggggtggggaaacagggttaggttggatggaagggcacatgccagctccccttctttacacacctgacacacgggggctgtgctatccctcaggaaaaacaaaggccaacactatcctttga

SEQ ID NO: 480593 - DNA, 1000 bp, Homo Sapiens; identical to SEQ ID NO: 307761

SEQ ID NO: 480594 - DNA, 1000 bp, Homo Sapiens
gtcgccgattcgcgcagcagtagcgcagaggaaccactcgctaggccgtgccgcggcgcaatgaatgcagcagcgccgccaactcccttaagtactccggggggtggtggggggtgggaggggcggggccttatctgccacgcccctttgtcacctccgcgccaatcggaggctcgtctccgccgaaggccactccccgagcaggtgcgccggctgctggccgggctcgcgccgcgtggcggtgagagcccgggcggggactcctccgaggcggggttcgctggcgcagcgcgggtcgtcccccgtgctggggctgtccggggcgggacgtcgagcgaagcgaggcccctgcgaggtgggaccccggcaggacgccgcgcgcccaccggctcagcgcccggtggtctgagcgcttctgacgccccctggcgctgcgcgccggccgggacacctgaccttccgacgcccgcccccgcctcgggcttgggagggggcggagatttcctccgcccggctggcgcctggagagcgtggcattgacgagggaaacgcacatcactggggaggaagcgaggaaagggacaccgcacgtggctctcggcggcttgaaatgccacggcctttttgcaaagcagcctggcccagctagccaagagcacccgttccttcccttatccagtgtttacggagcgcccagcacgtgtgggggcactgtacttggggccagggcacagccccggacagaacactcagagcctctcccgaagggtagcttctggtccagtgagggagacagacgaagtaaacagataattacaatgcaaagggaagtgtgcttttgtgggggagagacgggacgcggcgaccgttaagaggcgggtcacctgacagggggtcggggtgacttcccagaggaagtgaggaattatcaagggaaaaggcccgagggaagaagtggcaactgcttcagagtaactcctggagagcagcttccagggat

SEQ ID NO: 480595 - DNA, 1000 bp, Homo Sapiens
aagctttgggagataattgggtcattgagatggtttggatatgtgtccccacccaaatctcatattgaaatgtaatctccagtgttggaggtggaggctagtgggaggtgactggatcatgggggcagatttctcaggaatggcttagcaccatcccccttggtggtgtcctcaccatagcaagtgagtgctcatgagatctggttatttaagtgtgtagcccctctctctcttgctcttgctttctccatgtgacgtgcctgctccccctttgccttctgccatgactggaagcttcctgaggcctcccaagaagcagaagccactaaccgctgcacagcctgcagcactatgagccaattaaacctccttcctttataaattcccagtctcaggtattcctttatagcaatgtgagatcagactaatacagtcgtgatggcagaagccttgtgaataggaggagtccccttaaagaggccctggagagctgtcttgtcccaccatatgaagaagcagcaagaaggcactatctatgaggaaatggactcttaatggacactgaatctgccagtaccttgatcttggacttccctgcctccagaactgtgagaataaatttctgttgtttataagccacccagtttatggtaattgctagggaagcctgaatagactaagacacccttcattgtccttgattccttacttctcttcactctccattggtaagtcatcatgcttttgtctctgtaacatattcagttgctctcctctcagtattcacttctatcagcctgtgtcaagtaaacatcatcttggactactgtaggatcttcctagctggtctctctgcttcaatttttgcctccataatccattctgtaaacaattgttaaacttttaaaaacataaattagttcgtgtcactactctgattaagaacctctatatagttttccattgtactttgaatgatatgtgaatcctttaccatggc

SEQ ID NO: 480596 - DNA, 1000 bp, Homo Sapiens; identical to SEQ ID NO: 307762

SEQ ID NO: 480597 - DNA, 1000 bp, Homo Sapiens; identical to SEQ ID NO: 307763

SEQ ID NO: 480598 - DNA, 1000 bp, Homo Sapiens; identical to SEQ ID NO: 307764

SEQ ID NO: 480599 - DNA, 1000 bp, Homo Sapiens
cgcacacctctgaccaccccagctgcctaccctgaccccacaacttccttgctcctggaggcatggagcagggacaggggtggtccacctggttggtaatcaatcactcattcattcctcgtactcaaccagtcacgtgtgcactcagtaaacatgtatggagggtgcactaagtgcccaaaggggggtgaggcactgggatcggtgggtgaactttcagatgcaatccctccctcatgtagcttataagcagtggggcctcagatgtgaaggcaaagctcagaattcaggggattcagggtcccctggcaggtgcccagggtgctagagagagcaggtcaggaacactcttgaacagcggaggcccagcctggctcgtccccctcctgccccctggggcgggtgtctgcggcctccaggctactcctggatgattttattagctgtgttgggagcatatggtcctcggacatgagacctgaagtagtatttactggagagccgaggacaccgggttcccgtgtgggctgggtttggcacgcactcggttactgattgataggccattcaggaaacaaagaccacaagagaattcagcatgctcctggctcggggccaagccagcctcatctcctttgctttgtcaagtgtgtctttttgtctgccttcatcacttgctgggcgcctctgtgttcactgccgggaggaagccaagtgtgtatttgcaggggctgtgggggtgtatccagcttttctctaagaacagctatccaaggggcgggagggaacaagggggtcagccacagctctccccttaccccttcccctgaaaagtcacagctccttgacgtgtgagctgaagcttgggacttttgtcttgtgtctgttttttccaaagccaagtccagagacagaccagggccttcccaaggtcacacagcaagccaagggcagagctggcagtgaaaccaattttccaccttccacggtgtggtctgca

SEQ ID NO: 480600 - DNA, 991 bp, Homo Sapiens
ttttttttttttttttttttcatcttccattattttattattttttatacatatatatatatgcgcagatctgttttatgtacaacaattggttctatcaaatattcagaccaaggcattctactggtaatttccccccaaatcaattcaggtaaaattagatacttatgcacttcacgggctatcaaaacttgcaacttcattatcaatttcagttctgaggtcatacacacaattcaaaatatacattaactaggttaaggcgataaaagtgggctgaaagaaaccacaggattcagaacaatgaaactgtgtattttgcttgcatgagagtcataacgtgaacagcaagtattgtgcgtatctcatagctcttcagtggagaggaagcggcttctgaacatctaaggtgactgcacagcaggtgggaaacagctggtgtggcctgctggaagtaacggagggagggctcatttcttctctgcctctccttttttgggttcttgtttcaatttgtaatcagccagggcggccttgattgcatcttcagccagcatggagcagtgcagtttcacgggaggaaggcagagctccttggcgatatctgtgtttttgatagtcaaggcttcctccaccgtctttcctttcacccattcagtggctaatgagctggaggcaattgcggaaccacagccaaatgttttaaacctagcatccacaatcttccccttttcatccacttgaatctgtaatttcattacgtcaccacatgctggagcccccaccagtccagttccaacatttttagatgtcttgtcaagggaccccacgtttctaggattttcataatgatcaacaaccttcttgtgatagagtcgggccggggccgacagctcccgggcgggcaggcgggggctccgcagcagcagagccgatgccacccgcctcagacggccagccccagccgccgccatcttgccggcttgcgcct

SEQ ID NO: 480601 - DNA, 833 bp, Homo Sapiens
  misc_feature (778)..(778): n is a, c, g, or t
tgcctgtagtcccagctacccggcaggccgaggcaggagaatctgttgaatctgggtggcagaggctgcagtgagctgagatcataccactgcactcttgcctgggcaacagaacaagactgtctccaaaaaaaaaagaagaaataaagaaaaatgaagataaaagaggtgaagtttattgtatgtaaattatacctttttttttttaaatggaggaaaacaccttgctatcccttattatactgtacattcttttacctctggcacaggaagtgtaagcacactgtctcctttagagtcctttatctggggctcttcaacagaattttcaccaagacccctatccaaaccaagtgtgcagggccctgtctcagaggaagcaactggagcaactgacaacatgtgaacctcctgagagctctcttcttgattttcgtttctgaaagagagtttagcatgcatgtcatttgaaatcaggcaaatcatggaattatttttagagctaggtgtgtaaaagatcatctaattcaatggttttcaaacttttaaaacatatttaatgcaataggacttttttttttttttttttttttttttgagacagagtctcactctgtcgcccaggctggagtgcagtggcgcgatcttggctcactgcaagctccgtctcccaggttcacacgattctcctgcctcagcctcccaagtagctacaactacagacgcccgccaccacgcccggctaattttttgtattttttagtagagacggggtttnaccgtgttagccaggatggtctcgatctcctgacctcgtgatcctcccgtcttgg

SEQ ID NO: 480602 - DNA, 1000 bp, Homo Sapiens
  misc_feature (145)..(145): n is a, c, g, or t
gacctttgtgatccaccgtcttggcctcccaaagtgctgggataacaggtgtgagccatcaagcccggatttttttttattttttgcgacgacgtttacactcttgtggcccacgctggagtgcaatggcacgatttcagttcantgccacttcttcttcccaggttcaagcgattatcctgcctcagcctctggagtagctgggattacaggcacccaacaccaaacccaggtaacttattgtatttttagtagagatgggatgtcaccatgttggccaggatggtcttgaacccctgacctctaacgatccacctgaattggtttcccaaaatgttgggattacaggcacaagccattgcgcccagcccttcccatactcttttggccaaggcagcacaattcagaagaatcttgccagggaagactggtaaatggacgtcaacgtgatgcctatggctcctggtggatttagatacctcctggtgcttattgatatctttaccagttgcacaggggcttttccatgccagactgaaaacgcagaagatcaatgatcaaccttcaactatttactagcagaacactgaggggactgtgcggtcaccaatacctcctattgcacttggataaacacctcccaggaaatagagatgaatagaaaggacatagtcaaacaagcagaatggctgcattccttcaaccagaagggtccattagtctgttttcacactgctataaagaactatgagaaactgggtaatttatgaagaaaagaggtttaattgactcacagttctgcaggctgtacaggaagcgtggctggggaggcctcaggaaactgacaatcacggcagaaggcgaaggggaagcaggcacgtctggccatgttggagcaggagagacagagagagtgaagtgggagggctgcaggcttttaaacaaccagaatcccacaagcgctcactcaatatcacgagaacagcaagggggaagtcgg

SEQ ID NO: 480603 - DNA, 1000 bp, Homo Sapiens; identical to SEQ ID NO: 160290

SEQ ID NO: 480604 - DNA, 589 bp, Homo Sapiens
ccacttcttcttgctttgtaccccagggcaggcccaaggagccctcagcccaggagactggctctggggcttccctgggggacaggagggagacctgcaggaggcctgcagcaacttacccatctggaagtccccgctgcccaggtccccactgcccaggtcgtctataagcaaaaaagagatgtaatcagcaacaacaagtatttgttgagtacctactgggtgtcaggcactgttctgggcacctagtatacagtgggacagggttgagaaagctcggaatggtcggtcaccctcctcccccatgccagtgggaagaagcacagtctcaccccccacccctctgctcccagccttggatccttggctcacctcctgagatgctgtcagccagcatgtcctcatcatcagaaaggtacgaatgtgtccagcgcatttggcttgctgtgacggtctctatgtcctcaggcagagacaagccatcgtatgccctcagcccatgggtcacctgtaagcaaacgagagctgattgagtcactctctccagctcccactgagccccacggtccttcccctcacttccaggggg

SEQ ID NO: 480605 - DNA, 1000 bp, Homo Sapiens
gcgtgcggcgagcacaatcggagcgcgccgctgcccttccgcacttggctcagcggggcacgacacgggccgccacgcgctcagcctagcatcactcgcctctgactgcgagcgcctccagctccccgggctggggcatggatgcagacgcgccttcgtaccacgcgctcgcaggctgggcaaggggcagcgcgttgggatccggccagtcgtccgctgagcgcggttggcttgcaggctgggacttttcgcgagccctctgggcgctcgagttgcgaactctgacaacggcacgtggccccgcccactcttccctctttgcgaggcgtgtcccgcgccctttctgccaccacccacgtagtccctgtgcccgccttttatcatcaaggcggctcagtgagctctgcgtgttgatgtcgcgccttttctcatcttcctgcctttcctgcctcacttctgctgaatccattcaaaagttatacttgggcaagtgggtggaggagttaggaaaattaaaagagggatgcttaggtgagcaggtacctgcactgccgccaacccaggcttcaattctggctctcttgtagcggaaagccttaaaaaacgcgagtttggggatcctgaaaaaaagtaaatagggttgctgggctgaataacatccctcctctcaggctcctgctgaaagggccattcatgatttgcctggttgagcctgtggcgactttattctgacgaatctgcctttgccagcagcataaccttgccaagttggcgtcttgaccagcaagcaactgtgcccaaggaagcctctctgtggtgcctcagacctgagaggccgagtgcctttgagcgcctgaggtagattgtgagtttcatgaaaaccgagaaagtctaagtgtgcatgtgcgtaagatattttatatatatatatctcatatatatatgagatatgtctatataacgtgaactgaattgtttattgtttatgtttcgtgtcgag

SEQ ID NO: 480606 - DNA, 1000 bp, Homo Sapiens
aagctttcaagttttcctcattcaatatgatgttcactgtggatttgtcatacatgccctttattgtgttgagatatgtttcttctatatctaacttgtttagaatttttatcataaagagatgttgaattttaacaaatgatttttctgcatctattgagatgatcgtatggtttttgtctttcattccattgatgttacgtatcacatttattgatttgcaaatgttgaaccattcttgcactcctaggatgaactctgcttgatcatggtgaatgtgctgctggattcagttttctagtttttttttttttttaaggatttttgtgtgtatgttaatcagagagattgacctttggttttcttttttttgttgttgtgtcctagtctggttttgatatcagggtagaatgagtttgaaagcattccttcatcttcaattttctggaagagtttgagaaaaattggcattagttcttcaaatgtttggcagaattctgcagtgaagccatgggttcctgggcttttctttgatgggggattttaattacaagtttaatcttgttacttgtaactggtctttcagggtttctttatcttcttagttcaatctttgtagattgtatgtacctacaaatgtatccatttatgctaggttctctaatttgttggcatatagttttttgtaatagtctctagtgacccttatatttctttgatatcagttgtaatacatcctttttcatctctgattttattctttggatgttttctatttttttcttggttagtctaggtaatggtgtgttgattttttttatcttttcaaaaagccaacttttcattttgttgatcttttcattgtttcatttagtctcaattttgtttatttctgctctgatctttattatgtcttcctatctacttattttggaattgttcttgcttttttaattccttcagatgcatcattaggttgtttatttgaaatcttttactt

SEQ ID NO: 480607 - DNA, 1000 bp, Homo Sapiens; identical to SEQ ID NO: 307768

SEQ ID NO: 480608 - DNA, 1000 bp, Homo Sapiens; identical to SEQ ID NO: 307769

SEQ ID NO: 480609 - DNA, 1000 bp, Homo Sapiens
aaagaccagccttcttggaaggagggccctaccctcctcaaacccccaggcgtgctcaaccaacactaactggcccaatccttgattctgccccaacaaggccagccccgtgggccctgtcactctactgaactccagaagcttagtaatgaattctatctccagaagccggtatcacctcagctctaaaataggaatactggtgctctaactggccagcgttccccactctaaaatcctgcagtaatgaggaacagaatacagatgtggagagcagccaaggccagaggtttggcccccaaaggaaccccatccaagcctcgctcagctgaggtttcctgacaggaggggaacctgccagctgatctgaggcccacataggaccgggcagggcactactctctcctgaaggcgtgggtgggaaggcagcacttccccaactccaggacacgggaacagactgtcaggctgaaaaacgagagtccaaagccacacggtttattgaggggtggggccaagtgggctctggtggccagaatgggctatgtgtcacagtcctcggggacagcagctgtgatgatgagggagggctccaggacacctgggccggtgaagctctcctctgcacacagtctctggccggggagctgggaggccaggccgccctgggccagggactccacaatgacctccgccgagcccacctccagctctgcaggcggctgcagcgccaccaccaccatcttctcgtcctcgatgatcaggttgcggagcttgcgctgccgcgggttgtagttctctacccggtcgtggatctccatgtgcctccgcaggtgggcctggcggggagggtgagctcagaactttgggggatcctagggtaggggaagggggccaggccctggcctacctgtcgggtaaacttgtagccacactcggtgcactcaaacttcctcacccccttgtgccgtctgacgtgcacacgcagttgctccacggc

SEQ ID NO: 480610 - DNA, 1000 bp, Homo Sapiens
ttttttttgggggggtcagtctcgctctgtcgcccaggctggagtgcagtggcgtgatctcagctcactgcaagctctgcctcccaggttcacgccattctcctgtctcagcctccccagcagctgggactacaggcacacgccgccatgcctggctaatttttttgcatttttagtagagatggagtttcactgtgttagccaggatggtctcgatctcctgaccttgtgatctgcccgcctcggcctcccaaagtgctgggattacaggtgtgagccaccgcgcctggccaaaagaatgttcttgagctttatattttgacccaaattaggcaatagttaccttaaagaaaaatgatacagtcaaaatcattttggctttattaaagctcctcaaaaaactctagaattagggctttcttaagttactttttagcagaaacatttacggtattttgtacatatgtgtgcaaagttgcttattaacatttatgtcatggtcataaagactaatttggtaacaatattcagtctccagtaaatatgtggttaattgatatgcaaattacttccaaagtacaaattaatagtctcatattacatttttgtgctttgctacctttacctcaaacaaaataatctgtaggattcttcatgcttgtttcagcaccttttgcccagctttgcttgcttcattggccagaggactgtcagcacctcatgaagccctttatatgcttctctgaggtcatttgcataatgttgtggcctatagtaggttctcaataaatacctgatggatgaatgaatgaataaggatgaggaaatgaacacggtaggtatgcctggatctgaagcagaagtggcccaaaaatggaaggaaaagaaacttggcaggaatagcaggaagaagaaagcggggaggacagtattgtgtgagtttgctagggctgtgtaacaaagtgatacaaacctgatgtctcccgcaacagacatttat

SEQ ID NO: 480611 - DNA, 1000 bp, Homo Sapiens
catgccgagctgcggaggccgggggcggggggtgtggcagggctgggccgtggttggggaacaccccagaagcccgggcggcgtggtgcgcagagggaggtcgcggccgggtcagggcagccgcggcgcggggccggaggcatgggcgccgggcgcctttcccgcaggagccgagcgctgtcgctgccgctgccgccgccgccgccgccgccgctgctgctggagccgctgccagctgctggaagagccgccgggacttcagcatgtttctgagcgcgccgggcccgcagctccggcacccagcacccaccccaccccgctcccactccccaagccaacccccggggcctcgcgtcaggctcctgcagccaatccgggcaaaggcacgcccccgtctggtctgcacccccacctccaactccccgcacccccctcccgttggcaattgagcggctcctgagagtcccgagctgatcgcgtagctagtgcctcccgtgcgcccgcgggttcctgcggacgcaccccttcctgcgcccgctggttcctggtccctgttcccccgcgcccccttccgcgcctggctccccccggggccccgtcccctccctcagcccccactcgctcccgcacccactcctgcgccccgtttgcctcccgcacccgctcctgcgccccgtttgcctcccgcacccgctcctgcgccccgtttgcctccagcactcggctccctcctgcgcccccgctccccccgcatcccctcgacctgcagttccggggttctctgcggaacagagcgctagctcccttgagcggggaggggaccttggtgttcaggaagcgccagagcgcctgggacagcttgtccgccaggcttggaggagtttgccctccgagcttggttgtgatgtggggcagcctagcagggtgtgtgtaaaacccttcccccgtcaagacgggacccagccagcatgcgtcgtgacagcttgggggattggaggtg

SEQ ID NO: 480612 - DNA, 1000 bp, Homo Sapiens
cccaagggcctttgcctatgctatcgcttccgcctagaatcctgttctccagctctccccaaagtgatctctttcacctctttcggggatggcttaagtgtcacctccttggagacgcctcccagaccaccctaggcccccttctcgcttcccttcataaccattccatagcgtgtgtggaacttgatgttttgttcacggtctgttttccccactcagttgtcatctccagaagggcagggaccttttttctgtttccttcaccatttccccagcgtcctccgtactgggcctggcacgcagttggcactcaataacatccatgctaactgaacagacacggggatcccgcccctagcagtaactttccaactcccggctggcctcattcccaggccctgggagggtccccgaggacaagccgcggctggtggggacctcgcccgggccggagccggagggcagggcccggaaggcgcgctccgggagctggcgttgctcctcgcccaggctgcggcgcaggcggcagtggtgccagccacggcggatctccgactgcacctccttgttgatgaagcagtagaggacgctgaccaggaagccctggaaggagctgaggaagatctcaaagccgagcttggcgaaacgcagggcgccccgggcctgttcctctgtcacgggagcaaacaccacctcgtggacacccagcaggggcaccagcgtcagcgtggagcgagccagcctcacgcggtaatcccggcagcgcatttgccgtgtcctcagcttggacaggagaatgccaagaatgcggataaaaatgaggaaattaatcaagatggtcatgaggatgggggtccgtataatccaccaaatggccttgacttcgttgcgctcccagcactgcgtgttctcgtacaggtacctgacgatcacccagggaatgacgaaaagcgcgggggccccccagccgaggagcaggtagtagcggaagtggccctcc

SEQ ID NO: 480613 - DNA, 263 bp, Homo Sapiens
agtgtcagcagttgggtcattctgccagtgcactctcatactgcttacaggactttttggagtcactctcaactggtttttctgcttgcttcttcttcagatatgtcaccttttctaccagggatagcagacgccctctaattgttaaatcactgtttccatccagagacccatcttcatccagctcaattcctagtataaaaaaacagagaggcagaaaaaaatatttaaagaatacacttgggcaaataattctgaggcct

SEQ ID NO: 480614 - DNA, 262 bp, Homo Sapiens
gaagggagacaggtgatccttttaatgtaagtcattaatacctgatccttcctctgtcaccatcccaagaccttcagctttgttttgtcgctcaaatgcatttaggtcaaggacactataataacaagggaaaaaaaaacatttagaggactaatagaacattttctttgctcaggagagcaaacatctaaacaccatatatcttggaagatgaagcaaatgttaacgtacactgaaaacatgtctccattcattgcgtacc

SEQ ID NO: 480615 - DNA, 299 bp, Homo Sapiens
agggagaggtcagcaaacatttactgagcctaaattattacggtattgcactatatcagtaacaatattcactctaaaacatcttactagaagtttctgttgatatgctatgattttcttccagaatgctgactctggcacttctggttctccgtatctgtgtgtgtgaagctgcctcaacttttgtttgcccttgtcttccttggctttctcttctttttctccatcttctcccctatgaaaacaaacaaacaaaacataagctctccagaaactaaagaactaaacgggtgttgtgg

SEQ ID NO: 480616 - DNA, 267 bp, Homo Sapiens
tttgatttccaccttggtcccttggccgaacgtccacggaggccagttattatactgctgacagtaataaattacaaaatcttcagactgcaggctgctgatggtgagagtgaactctgtcccagacccactgccactgaacctgccggggataccagtggccctggtggatgcatcatagatgaggagtctgggagcctggccaggtttttgttggtaccaggctaagttgctgctaacactctgactggccctgcaggagagggt

SEQ ID NO: 480617 - DNA, 1000 bp, Homo Sapiens; identical to SEQ ID NO: 307772

SEQ ID NO: 480618 - DNA, 1000 bp, Homo Sapiens; identical to SEQ ID NO: 307774

SEQ ID NO: 480619 - DNA, 1000 bp, Homo Sapiens; identical to SEQ ID NO: 119859

SEQ ID NO: 480620 - DNA, 1000 bp, Homo Sapiens
  misc_feature (171)..(171): n is a, c, g, or t
atgggtttaaaaggcagaggggagggagatggaagggaatgaggaggagggagactgagggggctgcctttccttggggactggggaactcatgccctgcccccacccgcagggctccaggggtgagagaaaggggtgaatggagaatccggtggctgggtgatggggagnaacagcagctggggtatttagggctgggggagtaggggcagaaccaccgatgaatggacaggctcagaaggggagaagatacaaggaatgagagcaagagaaacggggaattgagcaacggggtgaggggggaattaggagctggggtatttaggtcagggggagtcgggggcagaaccgatgaatggacgggctcaaaaggggaaaggatacaaggaatgagagcaagagaaacggggaactgggcaacagggtgaccgagggaacagcacccggggtatcctaagacacagaggctatctataccttgctagggaccaggatgtgaggagaggagggaggatttagggctgggggactggggtgcaggatggatgaaggaacggggtcaaaaggggaggacgtctaaggaatgagagcaagagatgcagcagggagttagatcaggagagggcaggagatgggatggggctgcaggctgcctccaggttcaaagtaagaaacaggcagtagggaattgagagaaaataagaaccagggccagagaccaggtgaaggacgtgaggattggaggatccgagagaggcaatggcaacacgagggctgagacgggagggcagagtaggaccgagaattgaccaagtctatgtggttttcacaacaacggcgtgacgtatcatacaggaatgctgtacccgttttgcaggtgaggaaactgaggctcgttactgacttgcccaagattccacagtggaagaacctggacgtgaactgcgtctccaggtgggtttcagccaagttggaaggagaaggatgggatttgggggaa

SEQ ID NO: 480621 - DNA, 1000 bp, Homo Sapiens
ggatccagtgccaggctggccagctgtgggaaagcccaccattcccggaggtcactcctgctccatcacccacaccatcctgggggccgggaccccagggaaacccctggactgccagatgagcctgttcattcatctctatccatttaaagcccccacccgaccccaggatgcctgggccagtctgcagtggctccttttaagggaggatggctcattcattttccatctccccaccaggcagggctgggtctgtctcggtggcagacaggtcctaacatcaggcacagagcagagtcgatatttaaacgctagcagaatgacagctgggaggctgtggagggcgtgaggggccttgctgggtcaaaggcaaagagtgattttttaaaataaagccactttatttacaggtaatacaaaataaaccacaggacaaactactgtgcagggggaggggcagcccccacaataaccaccctccccatcccagagtaacttatataaaaaataaaaaaggccctagttggggggaggggctgggctggaagcacctttgctggttaggactggggcctgccgtcctcagccacccgggtccagggcagagtgaaccctggcttgctcctctctgagccctgggcctggccaggaggaaacacagctacaagggcagttagtggccactgcagaggctcctggccaaggctcctgacttctgagtctgaagagctggggtaaggaggtgggtaagtgactttgggggcagacatagggtgggtaataaattattgcagtgctccagccaacttcctcctggccctggacgtgggtctgcactaggttcccaggagcagctgtgtcagggcgggagtatggggtcttcaaagcgatgacgttgtcgagtccaccacctcacggccattgcaaacagtggggacaaactgggagccagaccctaagaaaaggaagccagaggttggggccaatcccgaggtcctcc

SEQ ID NO: 480622 - DNA, 1000 bp, Homo Sapiens
aaaataagggtcttggtgcagtaccccacagcagcaagtgctccaaaggggatgggtcactctgcatcagacaggcaagagggaagaggggcagagacaggcacagcagacccagcacccagagaaggccagcaagacagtgacctcagtgactgcaccagggtcaggccggcactcgggccctttgatccccatgaaaaggcgcagggggtgctggatgtgcaaaggaggctggggaatggggcctggagggacgcctgcctgtagaaagctctatgggaaggaaggcatgtggtccaaagcccaatatattgagggctgtcagggcgcagagggtcctgggttcaaatcccagctccgccatcaactgcccagctcacctggccccacccatggacttcaggatgctgtgtgccgagaggcagaagccagggcggtggagagcaggcccaaggggccagaggagacgggggaatgactggggggttgtagagtgacccgagggggcagggagggcactgaccttcaccccctgccagctgcccacagctgcattttcccacagcagagacaacaggccggctcagcggggtcagcctggttgtgtgtggcctgggccaggtgctggcccatcttcgttgagcttccctgacctcacctgtgctcaccgctcaggagtgttatgtgggctgaataagtagcagcctgcctcttgtccctgtgggcttcctggcccctgcctttccttgcctggcctgacaacatggcagtcacagggttctgggtacagcttcgagaggcagcctgtctgtcctccagggccctctgacctctgacctcccccttcgggcccccgcccccgctcagcagcgcaataccctcccctcctcagccctcccccctctcacccaggccttccctgcctgctccccacaactcactctgcgccccccagcataagacccaggctgatctatgttgctggcttctggtcctacta

SEQ ID NO: 480623 - DNA, 1000 bp, Homo Sapiens; identical to SEQ ID NO: 307778

SEQ ID NO: 480624 - DNA, 1000 bp, Homo Sapiens
cagagactgcttttgaacgctcacagccagaagagtcgatttggttctaggctagagtggggaaattgtgatgtggctgaaaggaacaagagtgcccctcagccggcaggcattcgctggggctccgaagttaaaccccaacataggaatgggctgaacataccagccctgtgctggtacaagtccttatgcatcccctgcgtctcctcccagtgtcgctggtgagtggctccctcggagaggggatgtgaggacagattttgctcttctgggatgtgtgggggatgactgagccagggctaagctggcaaggaaagggcagcttctataaacactgcagaatggacacagctggggactgctctgggaagggagatgccctccctccatccgggtgagcaaagccagaggtgtgaacaggctcttcccaacaaggggtgctggcagatagtggcctaggggatttctctatctctcctcctcgactgcgggggacagataagatctgggacacatttatgttgaagctaacagccatgagcccagcattgctcttttctctcctgagaagtttctcctttttaactgtctccctggacgcctgggctgccaaaagaaaatgccttttatcttcaaattctccttgtcttttcagagctaggtacttaagggcttctcagttagtagacagataaatggtaactttggctttcttgcttataatcaagaatcattccactagaaggatccattctagtattctagtagagaaatccatagagcctgatttctaattttctaattaaaacgtatttataccctattcatactaatattgaacagttctcagttttccttttaaccacaactgtgacctctcaagttccatttcctaagtgcacctactgaaaataaggcagtgtcttttttgcctgccagtgttgtaaaaaataggcattttgtaaacacaaattttatgaatagcatatacatattcatc

SEQ ID NO: 480625 - DNA, 1000 bp, Homo Sapiens
tggtgttggaccatcttagcctcagtttccccaactgtaagatggtcttgatcatggttgggctgtggggaagggtctagccagaaaagtcctgaatgaatacggcagggctaacaagaggctcccagctcccatctgggggtccctgagaggagctgggctctgggcgacacttgccttccaaccacgaagtttccccctccctcaaggaaggccttgagcctcaggttttctctcaggatcttcctggagaggggagaaatggagaaactggggccaagagtagaaagttgggtcactccagccagagaactcctacacattcctcaacgcccaggagcaatggcctctccccaggaagtccctccctccccccgcagcggagcccggggcccctcctctgggactcccaggggccactgttcctccttttagcctcgtggggcctgagatctttctgtggcccagcacagagcggaggtatagcagtggctgagtgagtgtgcagtgactaacatgttcctgggttgtcctacacgagggtggtggagcatggggggggggtctcagcccagcctgcaagaccctgctgcggaagaccagtagccactgccctggagcgccgggtgggacagtggggctccccgagtgccctcagcaggaagccagtagctgagtaggggccctgaattcagtcattgctgcaacccaagctggggcccacctgtcaacccccatcaccctccaagaggggaccatcccctctcctcctcctcacccctccttttccactcaccctccctccctctcccctctctgctcttttcttttcctccctttccttccctccctctctttacctccctcccctcttccccttccttccctcacttcccttccttccctctccccctcctcctccttctctcccccttcatcctccccttcatccagaggcctttggaggggctgggcttgtaacagggagggcttcaggatg

SEQ ID NO: 480626 - DNA, 1000 bp, Homo Sapiens
gatcaaatcatggtaacagtggtctcagcagctactaggctagtcatgggatgggcagagataacacaacctgatcctcaggccagtggccctgactaatgagctcaccaggaggtttctgtgcttcctaaggttgggtgagattactcaggccttagcttcatcaagacagaagaagagagcttcttcacaggtacttttctggccagtttcctcaggactctgggtaaaagagaagttctctggagcccccacacgctgtgggatcttagtgtctccacatcaaaaggaaacccatacctgtggctggggcagaggtctctcatgatccttttttgttttgttttgtctttttaaaagacaggatcttgctctgtcaccgaggctggctggagtgcagtggcatgataacagctcactgcagcttctatctcctgggcccaagggttcctcccaccccagcctcctgagtagctgggactacaggcacatgccaccatgcccggtaaatttttttttttcttttgtagagacaggatctacctatgttgcccaggctgatcttgaactcctgagctcaagggatcttcccgcctagggctcccaaagtgcaaggattacaggcgtgagccaccacacctggcctcattttcctcctgccctcaggtctgactccctctgcctggctgttgagaccttctggaatagattctattctttctgatctctactgtccttgtgtttcttacccatacctgacatccctctctaaagtacctcaaattcacttcaggcaatcccacctctaggcttttccacacactgttctacccactctcttgggaaaactttcctctcctttgttgatcttcatttgttgaaggacagttagaaatccacctcctccatgaagcctcctctgactactccggcacaaaatgatctcacccttctctaaatgttatttaaaatttatcctttacttattctttaactgttt

SEQ ID NO: 480627 - DNA, 830 bp, Homo Sapiens
gctgattgaacaaacaagctttgcacaggctctcctgccctcctgatggaaaataagttagaaaacgccctaagacaagcactcaaagagtctagatagctatccccctctcctccctccctcattttaaaaaacagcgagaagaataatcaggcttccacgttttgggttagcctgttacagatgacccaagtatgcagaaataaaataaaccagtgaaactccaaggccaactgctgcaaaccttggctatcaatgaaagttgtatccaaagtactagaacgaacagtccccactagagacataatggcggttagcttcctgccaggcaccttctagctagtatctctctccagccaccaaatatcttaagaccaagcggcccttaccttctttcgtctgcgcattggtgatctgcaggtcgcagtcggcagctttcagcttctctctccccataatctgcttctttaagtcgcagagggagatgtggagcccatcaaaggtgacggtatcatagttgagtttagaggaaaatttataatgcacacaggacatggtgccaagggattcctaaggttcagcgaggagacgtggacactctcaatatacgtatatttataaactttaagagtaaaatatgtacacacaacacactcaaagacaccgaaggaccctaaggcctcagattaaataccccccaaccacaagcaggggttcgtcagaacaataatccagagaccccccgatactcagaatcacttcatgggggaggaggaggacgaggacggggaagaggggaaatcgagaatccgccaacgggcacaatgtca

SEQ ID NO: 480628 - DNA, 1000 bp, Homo Sapiens; identical to SEQ ID NO: 307780

SEQ ID NO: 480629 - DNA, 1000 bp, Homo Sapiens
ccgcggcgggatgcgttccgagacccgcgagcgtccggcagctctgggagggcaaggctggagcagcaagcagctgtgagccaggagaggcgggcccttaaatagtgtccggcacacgtgctagttctgagcgcacacctgcaggcggcctcggggctgacgcggcgccggtgagggtgggacaagcgggagggacggcccggcacgaggtgggcggggagctctgagccactctttggctcagactcacccctcgttgcggtggcttccccacttttttgaccacgcaacccactacactcacttgtttctcttactagaacttaaacaaaactttcacaagttagtactcacccttagtaatctacaatgttcgtcctctgtgccatgctgtgttatgctagactaggctaggctatcctattcttattagaaatccaccaaactcatttcaaaacctattagtggattcatctcccagtttgaaaaagcagtgtaagtttacttagggaatttaggaacagcagccacttctgctctgttctttattttgaagtaatctctacagaaaagtttcaagagtactgcagagaattcccatatacttgtcacccagattctctgcatgttaacattttgctgtattttctttaccattctctattctttctctatagacatatatgtacacatatgtgattatataattataattatataattattactttggaacccatctagcatttattcctattctaaatggttcactaaggactttctgttccataactagagtgcaatgatcaaaataagaacttaacattgacacaagactataagctaccatctgtatttaaacttttgacaatcatctcaataacctgtgttatggtaaaaacaataacaacaatagaaaccaacctttgtttttcctggtccagaatcatttcaggatcatgtattgtgtttgatcattatgccttcccccccacccccc

SEQ ID NO: 480630 - DNA, 1000 bp, Homo Sapiens; identical to SEQ ID NO: 307784

SEQ ID NO: 480631 - DNA, 1000 bp, Homo Sapiens
aggtatcttggttgattttatgacaggtaatcccttttaaggaataaaaattcatggaagtgtgtatatcaagactctcatgatctggctgaaggcactgtctcactatgccagatgatgggagtaatctgtacctgccgggcggcgctcgaagggcgagtcgcccttagcgtggtcgcggccgaggtacgcgggatggccaccataattaccccattactccttacactattcctcatcacccaactaaaaatattaaacacaaactaccacctacctccctcaccaaagcccataaaaataaaaaattataacaaaccctgagaaccaaaatgaacgaaaatctgttcgcttcattcattgcccccacaatcctaggcctacccgccgcagtactgatcattctatttccccctctattgatccccacctccaaatatctcatcaacaaccgactaatcaccacccaacaatgactaatcaaactaacctcaaaacaaatgataaccatacacaacactaaaggacgaacctgatctcttatactagtatccttaatcatttttattgccacaactaacctcctcggactcctgcctcactcatttacaccaaccacccaactatctataaacctagccatggccatccccttatgagcgggcgcagtgattataggctttcgctctaagattaaaaatgccctagcccacttcttaccacaaggcacacctacaccccttatccccatactagttattatcgaaaccatcagcctactcattcaaccaatagccctggccgtacgcctaaccgctaacattactgcaggccacctactcatgcacctaattggaagcgccaccctagcaatatcaaccattaaccttccctctacacttatcatcttcacaattctaattctactgactatcctagaaatcgctgtcgccttaatccaagcctacgttttcacacttctagtaagcctctacctgca

SEQ ID NO: 480632 - DNA, 1000 bp, Homo Sapiens
gatctatactatgaagaaaaataaagcaaggtaaaggtaagaggaagtttgctatgttatacaggatgttctgccaaggctcctcttttctatgtttattttgtgtgggtttttttttcttttttgagacagggtcttgccctgtcaatcaggctggagtacagtggcttgatcatagctcaatgtagacttgaactcctgggatcaagtgatcctcccgcctcagtctttcaaagcactgggattccaggcatgaggcaccatacaaggcccctctcataaggagatatttcagtgaggtcctgaatgaaggaagacaacattcatgcggttatctggaggaaaccgatttcaggcagagggaggaggtgcaaaggccctgaggcaagacagtgtttggattgctcaaggaatttgcaggaggccagtgtggctaaagtaaagtggatgagagagagttggaggagaaaatgaggtgaaagaggtagcagggagccaatcctatcacgccttgtaagtcatggtgacctgtaagtctcagctcactgcaacctccccctcccgggttcaagagattctcctgcctcagcctcccgagtagctgggactacaggtgcacatcaccacgcccggctaatttgtacttagtactttggctcttgtcctgtgtaagatagaaagactttagagacttttgagcagaggaggcacatcacatgactgacactttagaaggatcacttgggctgctgggtatagaatagactggggttgtgtaatggcagaatcaaggggagcaactaggagacagttgtagtcaattaagccaagagatgatgatagcgtggaccatgaaggaatgatggaggaagtgacatgtgatcagactttaaatagaaactgatggggaactaacacgatctgccaatgggtttgatgactctaggattttttttaacggggatagctggaaaagcatttgccatttactgaatagaga

SEQ ID NO: 480633 - DNA, 759 bp, Homo Sapiens
aaatatactaatatcattgaattgtacactttgtaatgtgtgaattttatggcatgtgaattatatcttaataaagctgttattttaaaaatatgtaaaatgaatcattcagtgaaagcatgatatttaaatattttttaattaagctttgaattgaaactaccatttcagtggggtatgagaatcatgtattaaacaaatttgtgaaatataaaactttaacatcaattcagacgctttaacttgtgactattctgatatcccccttgacgtttgcttctatcttattattattcatttccagattcagattttgcattactttgaagagcattttatcatcttttttatctcctgaagaagcccttttgttgagagcttcttctgctacgataaaaaactgttccattggttgaagaatgcttactccatagcctttgttgctataaatatgattattagtcatcttcaatttgggtgctggaagaacctattaaattatttgaggaaattagtttttcaatgattttatttaaaaaatgaagtaatgaacatataaaaattagcttagactttattcttggattaacagattttttaaaacaaccaagactctcaattttgaacaagtgttaagtactgttttcatgacaccaactaacgtaatattaactacaaaaaatatttaataagaatttttttttttgagatggagtcttgctttgttgcccaggctggagtgcaatgacacagtcttgg

SEQ ID NO: 480634 - DNA, 1000 bp, Homo Sapiens; identical to SEQ ID NO: 307785

SEQ ID NO: 480635 - DNA, 1000 bp, Homo Sapiens; identical to SEQ ID NO: 119860

SEQ ID NO: 480636 - DNA, 1000 bp, Homo Sapiens
actgaggatggctcatgctctggtccagccatggcttgaacacctcccaacaagaacaaagccagactcattctccctagcatcttcttccttgctcaaagatcccacaccccgttagaagctggaactgggtccttgtcaccttcctcacctccccagtcgtagtctggttaatccttacatctcaccacggtcaccgtggctagatgtgacctccgcgatgcttcaggcacgtactagggcagcctgggcagggctggtcactgtgatctcatgaggtgtgaacttgaccccggccttctttcctgggatgccggctaaggacacaagttcagtgtttgccctggcttgtagcccagcgggggctccgtcatcccctggggaatgcctcggcctgcaagaccgcataccgcattggaacagggaaaccacctacttcagcacctccctcagcaaggtggcaggtcccaacaagccttgcaccacgaggaagtggcagtggcattcgggatatggctccctggccagcttgtgaagttcaaggggctcgttacttcttacagctcacagtccctcccgggtccagcacacctgagggctgacctccctcttgattagtgcaggggaaaagcactttaaaaagctgtgtcatgcgtaacttgcacatcttctgattctgacctgaaactgcatcccaggtcggcacagacgcaacccagtctcctcccacctccgagagtgcagtgtcctgaatggagaaccccagcacccagaagcatccactgaaggacgtaagtaggacaaggccaactgtggctgttccagcagagggactgtgggtgatgtttcccttctctgatttctaaaatatctgcaaacttgtttcatttataattgaaaatataatttgcataacaacagtaaattctacacatgaaggcaaacgtccgtggttgacagaaattacactggccagaatccccagtccccatgaggcttg

SEQ ID NO: 480637 - DNA, 1000 bp, Homo Sapiens
tctagacttttatcttttcactaggctcaacactgatactggtacaggagaacaggaaaacaaaggttttgacacagttgctgccttcaaagacatcttcattcataaagaatgactgaagccaggcctgaactagatgaccctgtggggagtttcatgggagaaggccacctcataggctcattgggcattcatgtagtatccctcagaatagcatggcaccatgcccattatatgaagtagaaaaggactaagcagtggccttgtaatctctgatttaaacacccacaactttgggaaactgtctagcctttgttgtggaagttgttcaaccccaagactcatccagccttcttcataccttccaattctatcaaggcagttcattgccaaggaatattaccactctcgaaaatatcaagttgcttagaactctgtaaatatgtgcctccaatttagcagctcattctacctgctctacctccagacttataggaaaggaaatgaagtcagtattctgttctgtttaacctggcatgaattgcaactcaattgcaaagctgagagaatgcttgattttgatcttcttttcttcactaaagggtgacagtagagtactataggaccaagatcagcacatttacttaaaaatattgggtagagggaataaaaggagaagagatgcagtcacttaactaccttataacctggccggagactgatacatgggacagggccacacacctgaacagacttttaggaaagagagactgatacaggcagcatgaggtagcagagaaggtcgtgaaggaggtgggagttcgggtcaatatttggacaagcagagaggaggaaggagagcgcagagagtgaggtctataggtctggggtcatcccctgagaatactatgtacccttctttcactctaatattaatacaattacacaaacatcctcaggcacaacgatgtatttttaatttcttgatcacctagcaact

SEQ ID NO: 480638 - DNA, 1000 bp, Homo Sapiens; identical to SEQ ID NO: 307790
  misc_feature (518)..(518): n is a, c, g, or t

SEQ ID NO: 480639 - DNA, 1000 bp, Homo Sapiens
cctgcaccccaagcgcccgtcctccccgccttcactctcgagctcacttgttctccctcgccttctctggcagctgttcctcagtttcccaggggtccaccctcctcctcagccagctgttccatggtgaacacaaccctgctattttgtcccttccagggctctgatgagccctcgcctgctgatggtgggcgagactcgatcctgagcccagctatctacactttgtatgtccacagctgcctctactgccgtgtggccaaagggaactgccgtgtgtgtagatggcctggcagagcagcccagtcccctccccgcacccaggtcctttgtggtgtggctctgcagctcaccccaggtggcctgcacttctctgtgctggacttgggacctgctttggctaacagaacgtggtaaagtccaggacctaggctgtgagtggccctgtgacctccactctctcaaagccctggggctgccatgaggacgcacccaggccagcctgctggaggatgagagattgatggagcaaagacaagctggcacacgtgggggccaccctagatcatcctgctcccagcagagcctgcagccaactcacgcccttttgagaactaatgaagggctggtgctggagacatgaagctgggcctggaagggccagtagctctgcagcagcagctaatactccatttgcacgtccacaccctacttctccccttcatggggaagctgggcatcaggcttgtcacctccctctccctcatcatcaagtcccatggattctgtgccaactcagtctctgaggtgtatgtctccatttgcagcattcccagtccctttcctgcctcaatcttcacggtgctacagggatccctgttatatgaggaatccttctaggattttatctgaaataaaagttctcttgctcaaagcctagtatacaagtcccaccactaaacagttgctacaaagctcccccgatcttttgaggcctggc

SEQ ID NO: 480640 - DNA, 1000 bp, Homo Sapiens; identical to SEQ ID NO: 307791

SEQ ID NO: 480641 - DNA, 1000 bp, Homo Sapiens; identical to SEQ ID NO: 119861

SEQ ID NO: 480642 - DNA, 567 bp, Homo Sapiens
tcgagtctagacccagaaaaggaaggtttttaaaagtaaaacagtagccactgatcatgatatcccggtcctttaagctgaatacctgccacccctcccattccacctcatatatcactttgggtggtgtgctgactttagaatgcacccactgtcacccaaatggctgaaatgctaaattctgtttaatcaaattcaactgactcgtgaagatccatttctaccgaaagcagaaaacaaaacaaatgaaccaataaaagcaacgaatcttactgcttccaggtaaactctctcccatttgacacttaatctttgtataattactctggccattgaggatttcatttaattaatcacagggtaaactctttttcagagtttcatcctcttgaaagtcctcctgtcccaccaagggatagtcaggaagttgtttctattcctcatgggggcaaagtagacattcctggttctctgtctgtcctctagtttcaagtctgactgtgtgggaggaacttaggttgttcttctggtgtctggaggtcggctccacccctgggccatgtgctc

SEQ ID NO: 480643 - DNA, 1000 bp, Homo Sapiens; identical to SEQ ID NO: 307794

SEQ ID NO: 480644 - DNA, 1000 bp, Homo Sapiens
ggctaaccagagcagcaacactaataacggaaaaagaggagaggaagttgaatgccacaaaatgaaactgaaacttttgtatttcaaatgtttcaacagtattctagagggaagtaagataatggtgttcctctatttgcctctgacttcttgttaatgaaatagtactcattaaagtcttcagagtcacagatattgtatagctgaggtaagcattttacaacttttcagacacaagtaagtacataaatattattttacaaccaacaatatttaatatttccacattgaagaatagatgtgataattaaatcttttataaggttttaaaaagacatgaaacataaacctaattatacataaaagaaaagaattttaaacaagagcttattgtgatgacattactcataacttttacctttaaaaccttttcttgggtagctattcaaaagtaaagaccacaagttttgttgcccagatttcttatgttttgtatatttaagctctttatttattgaacagatgtgtcattaattcatttggagcattactattatcagtaaaatttgatttttttttcccctcagtcataggtaaatcagctccacctggaatttctaaggacccagttttagtcaatattttcaagtaatcatgacctcagaaatagtcttaattaagataacaaatattagccatcaaaatggaaccaagacaagattctaatgtttgtaaacagtcaatccatatttatgaatattagcatatattggtgaatagttaaggcaaaaggttctagcagatgtaatctatttccatcaacatgttaaatgttataaaagtctagaattattggtaacatgaaatgattccaaaatggaatttctgtgttacagaatttactagaaaagtgctgtgaaagtataatgaaaaataaagtgatcccttgaaataatgtggatagaacaagcttttgaatatttacatggattaatgaatt

SEQ ID NO: 480645 - DNA, 1000 bp, Homo Sapiens
ctagagatgggtctcactatgttgtgcaggttagtctcaaacttctgggcttaagtgatcctcccaccttagcctttcaaagtgctgggttttcaggtgtgagccactgcatctggccacagtctacatttttaaaatgtcactttatcttctgtgtatagaatgttgggggagatgtaggaagggaaacaaggggtacaatttagatagttaatgaagaagtccagtgaaaaagaatagtagcttggactaggatggtagccatgaacacaagggaaataggcagagatgtgagatatatttcagggttctataaaattcagaggattaataatattgattccatgttgttgttaagaataaatgacccataataagtgatgaataaacattagctattattacaatcattaatgggcttttcaaaaggaagggatcagaaaaagtttttaacatcatgaaaaatcctaaatattaaaaacacctaatggaagcctatgagagttcttctggcaatgcaaatgaattagaaaagagtagtttaactggaaattaggaatctgatataaaaatagggtggggcagccaggtacggtggctcacacatgtaatcccagcactttgggaggccgaggcgggcggatcacgaggtcaggagttcaagaccagcttggccaacacagtgaaaccctgtctctactaaaaatacaaaatattagctgggcatggtggcgcatgctgtagtcccagctactcgggaggctgaggcaggagaatcgcttgaacccgggaggcggaggtcgcagtgagccaagatagtgccattgcactccagcctgggcaacagagcgagactctgtcacaaaaaaaaaaaaaaaaaaaaagggtggggctgggtgtggtggttcacatctgcatttcttagcactttgggattaatatagaatatattaggaatgccgagtaattatttttcaggtagcattcagttaatattttt

SEQ ID NO: 480646 - DNA, 1000 bp, Homo Sapiens
tcaatgcttgaggccagtagttcgagaccagcctggccaacatggtgaaacctcgtctctactaaaaatacaaaaattaaccaagcctggtgacccgtgcctgtaatcccagctactcgggaggctgaggtatgagaattgcttgaacccaggaggcagagattgcagtgagctgagatcctgccactacactccagcctgggtgacagagtaagactctgactcaaaaaacaaacaaacaaacaaaaaaagaaaaaacaaatataagatcaagataaacaaaaactgataagatttcaggcaggcaatgacaaatgtcaattataataggagcttgtaacatacctacgaagtgacaaatcaaaactgaagtttaatgagaatatagatctgaacatatacttgatacaataacaacacaataaaattagaaatcataaagagaacaaaaaagtatgcctttggaaattaaattttatttatttatttatctatttatttactgagctagggtcttgctctgttgcccaggatagtcttgaactcccgggttcaagcgatcctctcaccttggccttccaaaatattaggattacaagcaagagccactgtatccagctgtaattttaaatagttcaggagtcaataagataaaaatagaaattatgaaatatttagaatttatatactgtttgatatattatgaaagtacataaatatttccattttaaaagttaagagttctttttttttcttttttgagattagggtctcactttgtcacacaagctgaagtgcagtagcgtgatcttggctcactgcagccttgacctcctgggctcaagaaatcctccctcctcagctcccaagtagctgggactataggcacatgccaacatgcctggctaattattattattattattattattattattattgtagagacagggtttcaccatgttgcccaggctggtctcaaactcctgagcgaaagtga

SEQ ID NO: 480647 - DNA, 1000 bp, Homo Sapiens
  misc_feature (811)..(811): n is a, c, g, or t
ttttttttttttttctaaagctccaacatttattgtgtcaatgttaagcacactttttaaaagacaacatagaatgtatagaaacaaggggttggggactcatgcgcatttccacaatacaggtaattaggttggctggtttcagaagggccagggcatcactcatgacagcgatggtccacgggccctctctatgggactgattcactgttccaatgtgggtctgtttttttgtttttactttttattaaaaaatataaataaaatggcgctgcaggcctaggctggaaggactctgcaggactctgtcttcgcacaacggcttcttggaggctactgtcagaaaacatcacaaactagcaggatgacagaccacgctgacgtcgactgggcggcacgcgtccaccccacccctgggggcttcaaattttctcagaacttaagggctctcgagcttccatccgaaaactgccacacatcttgagctctctgggtactacgccgaatgggggtgtgtgaagaacaagtgtcgctgcgtctgccctcttttgagctgggcctgcccgggcccggaccactaatatggggcgtgctccctccacttcccgtgccgctgcgccccgagatccctccgtccagctccccgggcggtgtggagaagcgcaaactcccgttctccgaggagtgctccgacgaggaggcaaaaggcgattgtctggagtctccgaagctaaggaagggatctttgagctgcctggaggccgcgtagccggcgagccactgcgagtacacgttatccgtgttgggcatngcggccgggggcaggtcgaactccttctcgagcttgatgcgcttagagaaggggctcagcgagctggggctgcccagcagcagctttttggacaggccccccgaggccgactcgcccggggagcagccgcggccattaacagtgccatcgtctatgcggtccgactcgccggccaccgagtcttcgtcg

SEQ ID NO: 480648 - DNA, 1000 bp, Homo Sapiens
ccacaatggctactttctaactttatcaatagattctgtttcaaaatcaaattaatctctaaattctccccatgtaacggccttgaaatgccccccgaaccataaactctgggttcctgaatgtgtggcactcccaacctggggaatcctcagccgctcacagccccagccccagccacactacccccaaattagggtctccccaaggccctgtgctggggagatttggactcccagcactgctcccgccccacacagcttactggcccgctcccgcggagacttggtggtgtacacggagcaggcgttgtactcgttcagctgcggctccaggaacgccaccggcatggctgctgccagacgggccaggcactccccgagggctggccgaagcctggaagacggggctgtgtttagctgccacgtgtccccctctttggggtcctgggtcccagccccatctccatagaaacggctcctcccagaaccctttgggacagagctgccattcatccatgtgtgccacttgttttgttttttaagacagggtctcgctctgttactcaggctgcagtgcagtggcctgatcttggctcacagcaacctcacattcctgggttcaagtgatcctcccacctcagcctcctgagtcgctgggattacaggcacacaccataccatgcctagctagttttaaaaaaagtcgtttttgtagagatgcagtctccctatgctgctcaggctggagctcaagtgatcttcccgcctcagcctcccaaagtgctcacaggtgtgagccaccgcgcaccgctggtgtcacttgaaatctgaataacttcagagctggtggaaacagccgcagcctcgctcttgctgtatcagtaatctcagctcagaagcggtcacatggccactgccaggggccctccccagtgaccccagtgttgcgtggctcctgtgtgcagcccccgtggtctgcgcctccctttcttccccagcg

SEQ ID NO: 480649 - DNA, 1000 bp, Homo Sapiens; identical to SEQ ID NO: 307800

SEQ ID NO: 480650 - DNA, 1000 bp, Homo Sapiens
gatcacactggatttcattccataattctattcgattccattcgatgatgattccattcatttccatccgatgatgattccattcgatgccgttcaatgattattccattcgagtccattcgatgattccattcgattccattcgatgatgattgcattcgagtccatggattattccattccattccattagatgattccattcgggtccattcgatgattctcttcgattccattcgataattccgtttttttccgttggatgttgattccattcgattccattcgatgataattccattcgattctatgcgatgattccattccattccatttgaagatgattccattcgcgaccattggatgattgcagtcaattcattcgatgacgattccattcaattccgttcaatgattccatttgattccatttgatgttgattccattcgattccattttatgatgattccatgcaattccattagatgatgactcctttcatttccattcgatgatgattccattcgtttccatccgattgatgattccattcgattcaatgttccatccattcgagtccattcgatgattccattccattccattcgatgatgattgcattcgagtccagtggattattccattccattccattagatgattccattcgggtccgttcgaagattctcttcgattccattcgataattccgtttttttccgtttgataccattcgattccattcgatgataattccattcgattctatgcgatgattccattcctttccattagaagatgattccattcgagaccattcgatgattgcattcaattcattcgatgacgattccattcaattctgttcaatgattccattagattgccatttgatgatgattccattcgattccatttgatgatgattccatgcgattccattagatgatgacccctttcatttccattcaatgaggattcattcggttccatttgatg

SEQ ID NO: 480651 - DNA, 1000 bp, Homo Sapiens
gatcacttaagcctgggaggttgaggctgcagtgagctgagatcgcaccactgcactccagcctaggtgacagagagagaccctatttaaaaaagaaaaaaaaatcaaaaagaacatggcctactctgtggtactttttggattaacaaatattttagcttccctaaaaatcaatgtggttctggtttgctttcttacattagcatgagaatacagaaaagctaagtattttaatccacagaaacaaaaacaaataaaagccttgaaatacatataatttattcaaaagaaatatatcaaaatattgtcggtcaatatacttgtcctggatgataagactataagtgattttttttctttctttctcctcttccatatattcttcaactttttatgggcatgagaacaaagggaaaaccttttataatggacaaaaatttaaattctataaaaatatttgggccaggtgctgtggctctgaaggctgaggcaggcagacagctcgagtccaggagtttgagaccagcctgggcaacaccctgtctctactataataaaaatacaaaaattagccaggcatggtggcttgcatctgtatgtagtcccagctacttaggacgctgaggtgggaggatcgcttgcgactgagggtcgagtcaaggctgaagtgagccatgatcgtaccactgcactctagcctgggcaacagggcgagaccttgtcaccaaaaaaacaaaaacagaaacaaaaaacaaacaaaacaaaacacacctttgtagctctagaaaatagaaaggcatgctttctaataatgctttctaattatatgtcactaatatataagaaaaaattttgtatgatacataactataaacttgttaactgggaaaaatttattgccaaaaataaactagccaccctctgaagtaatcaaatatttttaaatatcagagtatcccttagtaaactaacaaggttctatgcactcagagggagtagt

SEQ ID NO: 480652 - DNA, 1000 bp, Homo Sapiens; identical to SEQ ID NO: 307801

SEQ ID NO: 480653 - DNA, 864 bp, Homo Sapiens
cacccaacaccccctgctcccccacacacacaccagcagtagctgcgacagcaacataaatgcaaagtttcccacctctctggaaagctcactgctctcatacatctgtctgatttcttctctgctcagcccaccaatcacgtctccgctagcagagctgtagaagggatgctgaggatagggtccctcatacttctcacatccagccctgtgactttcatacacggggttgtacttcacagcattctcaatagatgagaggctgtcaggctgcctgctggagccactaaaagaaagatatgatggattcaggctcttgtttggatgctcaactatgtggaagactatttacctgggacaatatttctgttgaagaaaaacaggtgcactttacacaaatggtgggacataactgtgaaaaacatctagatcaacctcaaaaattatttgtcaggtgttatcattatgatttcctcacacccatggcaagtgccctgtggacttgttccatgtctcattcatcttatttgccatggcgcctggcattcataaatgttggaaactatgtctgccagtagatggtgcttcataaactgtagcttcatcattcccagagttatacacattgaaaatcagtgtgtagccacgcagcaaatctgactgaaatataaatattacggtctaggggaagcagagcctcaattaaattcaactcaggtctacacatatttaccgagcattgatcatgtgcataggactgttctacacactgctgacacaaataatcttttatctctgccctggatgaaggttacaggtctaatgaaaaggtcagaccccaataagaatataataaccaatgac

SEQ ID NO: 480654 - DNA, 1000 bp, Homo Sapiens
tggacatcataaaaccacttttatttttaccatagcaacattccagtgaacatttcttgactgatttgggagaaaagatctggtttggtgattcctcacgccttctctgagggtgaatatactctttcccaaggacagggaaggaagcagaatcataaaatcatatgaacattttcacaagaggattcttcttgaagcttcaaggaaattgcttacagacagaagaaaatatgtccttattgatgaaaagggagagtaaacattgcaactctaacctagacacccacatgggtaaaaaaaaaaaactgacaaatgcgaactcacagttgatcactctatgaaaaggaattcagagatgtttggagctcttaacctatgaggccaatttcatggaagaactctaccttctacttcagagacagaacactgggctagataggatgcttgtctggcccaaagtggaatttcttaccatctgtatactcccccaagacccacaacagatggttactgagttgaagcttgccactgatccttaatgatgtcaacaagctcagctctgggagctggcactccagaagcccaggtcaggggagcaagggaaagtggagatgggaacagagctctgattcctagccccatatttgatacttactcccttcaaagtcctgtccctggactacaaatttagttcccagttagtaatcagaaaaccatgaaatatgagttgcatttctaagatgtgcctgactttagtatgatgtttaagagaaaagggcagtggaaaccataaagaaacagcaggatcttttttttgtatctaagagtggactgatgaagcacctggcaaggagcaagaggccttcttacaaatcaaacattgagactgagattcttaatgactagagtgagctctaaagagaaaggtggctgggtgcagtggctcacacctgtaatcccagcattttgggaggccaaggtgggcggatcacttgaggtc

SEQ ID NO: 480655 - DNA, 1000 bp, Homo Sapiens
gacagaccaatggtttattccaaaggggaaagcccaagctggatgtctccctccccaacccctgcaagctggcccatccttccagagcccccataggcctggggctgttgagacgggagatgtccccactgtgctgctcctggttttgtctcctctccaatccttgagcaccctgatatgcaacatggggggtaatcagaaggaggaggcagcctctgatggggcaacggctgagggtgggggcagtgtgtaaggcaccttttgcggtcagcccagccacactccatcgccagagagaatgccaaagtgtagactgaatgaaattctgtaggcaaatggtaaatggtagctgggccagtagctatttgcatgggtggattatatcatgttaagggaattctttatctcagcagagggaacagaggaatatcttggctaaggtcatcctgccagtcaggagaagccaccctccagggaccacagactcaaagtggctgtggtggagacccaccgcctgggtagggtgatgtcaagacactgagaggtttccatctgcagcccttggccactgcaggttctgccatgctgggcattgataggtaggacgagagagagcacgtagggccagtcctctgggaagcaggaggtgggccatgtgaatgggagatgggtggctgtgctgtccaggcatctgctgacaacattgggggatagggccttggagagaaacgtctataggcctggagacagcagggcgtgggcgggagaggcaggctgataccatgcgggtactcactgctagcccccagatccagcccgagaggaggaggctggcgggttagggcaggccccaacctatctcacccctgtgatgggttggcctctgagcacaggaatgatggtgaccatctgaggtcacaaggcaggaaaggagtctgaatggagtgtggccagtggggaagtcggagaggccggaactgcccccaagaggctggcagag

SEQ ID NO: 480656 - DNA, 1000 bp, Homo Sapiens
tttgagacagagtctcactctgtcacccaggctggagtgccgtggtgcaatctcagctcactgcaacctccgccttctggattcaagtgattctcctgcctcagcctcctgagtaactgggattacaggtgtgcaccaccatgcccagctaatttttgtatttttagtagagacagggtttcatcatgttggccaggctggtctcgaactcatgacctcagatgatctgcctgccttggcctcccaaagtgctgagattcaggcatgagccaccgctcgtagcaagcattcagcaaatttttaaatgccatttaattgttacctaccattattattaccctgaaatcagagccatcttccactgaactctcttttctgtttaatttggcaaaatactgtcttttttttttcatccaacaagaagccataactttatttatgatagaaacagtacaaatttcaaaccaagctgcagttactcatctgagacaccaaaaaagttgctttcagatggttacattgttaattccataatagcatttacaatatcattactgttcttcagggctcggactgcctttgctccccacacatttgcttgtgacaggaccaattctatatccttaatttctacacctgtttcatcgacctcttcgtcttcactgccctcttgtacagttggagtctgtgtgttttcttgaatgtttgagacagcttcaccttgaactttgaatttctcagcagctgctagttgtgcttcctgagataaatcttcaatcttggcttccccaaaaaccatgtaggtatccgaagccgggctcttgtagacatctggttttgtgatgacaaagaggatattcttagatttccggatggtgactctagtaactcctgtaacctgttgaagacccagtttgaacctagccttccgtgccttcttttcactccgcctctgttttgctttactgactggttcttcatcaatttcagctgctaccac

SEQ ID NO: 480657 - DNA, 1000 bp, Homo Sapiens
gtagctgggattacaggcatgtaccaccacacccggctaattttgtatttttattagagacggggtttctccatgctggtcaggctggcctcaggtgacccacctgcctcggcctcccaaagtgctgggattacaggcgtgagccacacctggcctaaaaatcatttaattttttatgcttgcctagttataaggtcaaagagaatcaaatgactgatgcagtcagcacctaacaacctctgtatatgggaagggggtaatgagaacatactatttggaaataataacagcctaagagccaagtgctgaagttacatttctgcctaccacagctaaaactctcctcactgtctcctacccagtcctcctttccatcaattaccagtctcttgtataaatgtatccaataccaggctcacagactgggagtgatttttctcctttggagctcgtccagaatccatcagcctcacacacatatttacctgcaaatcattggaaaagcaaaaatgtttaactgcatgtataagatggttgtcatttgcttgaatacccccttgaaaaatgttgattcttgagcatcagtggcacatagaggtgtctgaagaaccattttacatgatttcataaataggaggtctctgcattaccatgtttgcttgcaaagtggaaaccttttagatgtgtaacttgaatatgtatcaagatctcaagtgcttaatgataaggtgttgacttgttaaattaaaccatttggaatacattgtgtgtttgtagtagtcatttactagatctgttttcagatttttgcaaattgacattaaagtcactttagctataatatttcacttagcggatgggagaagtggcttttaatcttttgtctagccttagccaaaaatgttggttaaagtttattttcagaccatgggggctcaagttccaagtattgcccaccccccccaactttgaagaatttgcataccatcattcactttca

SEQ ID NO: 480658 - DNA, 705 bp, Homo Sapiens
ggtatcagcacaggccagctgagggacagacaggttttcacagaagaagtggttgatttcacgaggcccacaaaagggcagtcttaggatgaggctcacatggaccatagccaggagggagccacatgtccaggaagtgatggcaagagtgatgcagactttccaggtcatgatgatgaaatatcggagagggtggcagatggccacgtaccgatcgtaggacatcagcaccaacaggaggcattcagtatgtgcaaaactcaaaaagagaaaggtctatgtcatgcagccagcaaaggagatgggcttggctggatgcaggaggttcaccagcatctggggcactgtgttgcaggcataggcgatgttgacgacggccaggtgtgagaggaagaagtacatgggggtgtggagtctggagtccagtgagatgagccccaggatggtcccattccccagcagggtgaagacatagaacagggagaagagcccaaagaggagcatctgaatccttgggcccaggagaaatcccagtaggaggaactctgtgaccattgtctgatttttcaccatttcactactaaaaaacaaacaaagaaacaaacaaaaaacaagcagctgtgtgacacgcttttttttaaagtctattttatttattgttttataaatttttagtttgtggaaaattgttagtaaatgtcttta

SEQ ID NO: 480659 - DNA, 1000 bp, Homo Sapiens
gacacactcatttttggctcttggtttgtgtgtgggaacaacatgagtgggaaggaatttctgggtgcagaaggaagcagccgggatttgaccaagcagggtatcaggcaggcatgagagcagccaggacagtggtctacaagcccagcacgagttgtgaagacagtgacaaaatcagctgcccagccctcacttctccccagcatccatcccacccagttttcccaaaagcgtggactttcatgtaactgttagtcaccatgaaggggtagcctgccctggcacgagatgcccagattatcatgagggctacatatgagaatgggagactgtggacaagattgccctgtctcccctctcccccaccccaagggatgggatgcctggggttatggaattaaccagccaaacctgggattaaagactcaaggcatcttagggcctgctgagcagattggatgcagggaatgtacaattggtgctgttgggtggccagtgcataattggacacagactttcaggacctgtgtgaaatggagatggggaaggggcaacctcgaaggggctagatgacagttatagtctcagataggcctcaggtagggagggtcaggaatagagaagagaggacttaaaggtggggctttggaggggtgtgggctggagaacgtagactggggaggaagggatggggtacaagggtaggctgggccagaggagggaggggcgtctcaggatatgcttagcacccgcatgatgttggtgtagccggagccaggtcgccagcctgtcaccacaatcaccaggtctccaacacggaggaagccacggagctttcctgggggagggaaagaaaacaaatcattggacaggtgtggtggctcacacctgtaatcccatcactttgggaagccaaggcaggaggatcacctgaggtcaggagtttgagaccagcctggccaacatggtgaaacttgtctctactgaaaatacaaaaatt

SEQ ID NO: 480660 - DNA, 1000 bp, Homo Sapiens
aactttcaacaaacacattatgtcaaattctttctgtgtgttataattaaagccaaagagattcttaatatttaccaagtcttaatttcgcttcagagatgtgtttcctagttcggttaaaattggagtttctgttcatgttctccttgttttcagagaagacagagagatgtagacaccgttcatctactatcttttatcaaacctgaggtccttcagacttatatttttaaggtatcttatatatatatttttagtgatatcctttttgctggtctatcctaatttaatatttcttaaggacgtcaaggcctactgtttcttttaaatattttagaatcaaataattattttcttcaattcatcaagagtgtattgatcacctgtaatgtacaagcactgtcagttttgtttttataatgctcaaagttttataatctgggtgaaaaactagccacatgtataaaatgcttaacagacagcataaggcagcccagaaatatgtgttgaatgaaatgaatagatcagtacaaacaagaatttctctggaaagtcagacaaagaagaaggacagagtggacagtgaaagcttcctgcaggcggagccaggactgggcctttcttcttgttatttcagagacatctgtattttgattatgtctcttttgaattatctattttccagcttggtgacgctgacagggaaataatacatgtcagcattagtttttccaacttaatggatcagatgagagtgatccataacatgtaagctttaggtgtgggctgtaagcaggagagattgcacgataagagcagagcaaaaggttatttagagaggataaattaaaacacttggaattggggtcagtcaatacctggttttgaaatgaatgatgaagatggagttttagaaatgaaatgaatggattgtttggttggcattattaacttaaagaacagggtttagcttaagtattatagggctttacaggagaca

SEQ ID NO: 480661 - DNA, 1000 bp, Homo Sapiens
ctggttaataactgtgagaacacgggcaatggatttccggacgactcggctacaaaacagagatgtcagtgaagatagggaagacacatagcactacccaagactcaggactcacacatagggcagcaatagctgcagcctcccccatcaacccatccatattcactcaggaggaaggcgttctgggagtgaggtctgaggagggaagagaggggcatgggagagacagcagaggctttatgaggaagtgcaggctggataaatgaggcagatcagaaaaagaccttcaatcccagaacacgaatttatcctgagggctaagacccaaccaatgccaatttcaatgagctgatgggaaggaatcatgccacaaaccaggcaatcaggctagcttagggaactgcaggagagagaaacaagacatttgcaaagtggagtcactacaagccaggagactgaagcaaacaacgagccagggagaagttatttgtagtcatgtcaggatgagggagtcacctagtagacagctggtcaacatggtttttgaggattcagtgtgcaactgtgcttgtccaatcctcccacccctgcctctactaaggttgtttgggggcaaagagggcaaccaccattttttttttttggagacagggtctcacctgtcaaccagactgaagagcagtggccccatcatagcctcccaactcctgggctcaagtgatcctcctgcctcagcctccagagtagctgggactacaggcctgtaccaccacacccatctaatttttttttgagaagtggactttgtacccaggttgatgaactccaaacccatgttcctttcacaagtctcccgcactcttagccatgtaaaataacttacgctgccactccagggtgcaagccacccacctgccaagggggttaaaaactcaagtgttggtgggaagcggaaggaaggggtccgggtaggctttgaaggcagcattaagatgggtct

SEQ ID NO: 480662 - DNA, 1000 bp, Homo Sapiens
gcttctcaggtagttctaatatgcattcagaattgagaaacatttcccaaactgttcataattaaatgagaaagtcaaatctgtgctattttggaattttgtttatatattatgaaaagttgcagtctaagctttcttagaatttttgtaaagaaaattgtaaaaataaatacgcagatactatgtgcactttacagagtgacagcaaattttagggatctaaatctaagtgatctataggctgtaataaacaagacatttggtgaacagaaaagaaacaaggagaatatcctaaatgaaaaatactgagagcgcaaggaaaggatagaaggatataaagaaaagtagatcaagaatacataaggaagaaattgaaatggaaaagtgaaaaaaagaacaataggtggacaggaaggagaaaagatgcacaacttaaaatgttagtcaattttttattaatttttgtaactttccactagtctacctgatgccatatctagctttttggccaatattaaagtagttatccaatacactcttcttaattaacttccattccatgaaaaaattgaaagatgaattatagtaattaatgtgtgttctttacatttgtttttcagatagattatttttacatgatagaaatctacctttaaatggcatttcaaagatagaaacaaagacaacaattaaatacaaaaacaaaagcgaaacctttattcttttggcttgattgtaatgtggtttaccgttctttatggtaacagcattttcctgcatgcatttcaccaacacactacaagtcaatagcttcagtataaagaatctacatttattgttgcttgtgaaacacaaagtattttgctgtaactggtaatataacttcactacctggttttgtgggagaggaaaaaaagctgggatcccatattatatctgatacagttctagtgccatatgggtcaataagatctatctgtgtaaacaaacattggaaaag

SEQ ID NO: 480663 - DNA, 1000 bp, Homo Sapiens
ttttttttttttttttttttttctctcataaaaatcatttattggcacatcagaaatgacaattttttctagtatagtagttgtatgcatctgtaattgcaattcagtgtaaactacatgttacaagtcactagaaatctaattagcaggatgaatttaataaagaacaagaggaactatgagtctaccacggcccagccattgagtctcattggagagtaaatcaaatatcaaactagtgttgccctgcaacagtttttctgtagccaagaaaaaccaagacacacataaacaggatagcacccattccataaattaggtacacttaactagaaaaagattgtaactgatagaaataatctaaataaagtaagcacaaaagtaaataattagctatttacatatattcctttttgccaaaactttaatttgttagctttcccatcctatctcttcccttctatttgttattcttgttttttcatggtgaatttcttggctcactgaaaaatatttagacaactaattagaacttctttccgggtcctacctttcctaaaactttatgacaaactaatgaatttcaagggtaacctatgtaagtctatctctatatagaagtaagatgcattattattctgctatcagtcatagtaatgacatacagtcccatgtttttccaaacattgtttggactactccagaagattaggctgtgaatggcagcagagtggatggatttttcattcataacaggcacagatagtatatatggagacaagcatgtttatcctgagaatgtgaatgctgtggactgcaactcaagatctcccattactgagaatgggtcctttgccctctggtcactcttttttttttcaactgtcaatttttaaggcgtggtatcatagcagcatcagcaaataagaatgctgacatcatttctaccaagaagggctctgtgatgagtggcagcaggtaccataattaaatagtgcag

SEQ ID NO: 480664 - DNA, 158 bp, Homo Sapiens
tgcctcagactcccgagtaaggggattacaggtgcgagccaccacacctggctaatctttctttttctttctttctttctttcttccttccttccttccttccttcctttctctttcctgcttgcttgcttgcttgcttgcctgctttcgacggagtc

SEQ ID NO: 480665 - DNA, 1000 bp, Homo Sapiens
aaagtgttgaggaccaggtcaatcctccagggtatgtggccagggttacacatgaccagtgagggcagaaaaactgataagaatctagacaactagagtcagggtgatttccaggacagaggtaaaagtcaacgctctggagtcctttttctgcacctttagagcttccacatctagtccggcttcctgtgtgtctggaccctgcagcgaggttgacatttcctgctcccataaccggcaggttgggttgtttttcatgggtttgggcaggctctgggaacaaagcacataaatcgactgcaaaagagacttccttggaggttcctgccttccaggtggtgtttgcaaacacacatactgtcgtgaaagaagtgaggagaaaagagtagagaggggcagagggcgtaataggcggaaacaaacaaaagaggtaaataaaaatgattaatccgatggcttcacttgacttatgcgcagttttaaggggcatggcccaggcttggggatccatgtttcttgctgggctttgttcgcctttttgatgtgacagtgatgaatccaagaaggaatgccatccactttcagagccatcggcgtggtgaggatgacagtatgaggtccttttcaggcaggagtgaatccttccttctggaactttttaacctatactaagtcacctggctggaaaaagtggcagggccagtctggtcaggaactggattggagtgtgctccctggacaagtggctggatggtgtctcatacctgttggagagactgcaggtactgaacaaattagcttgtgagatttctgctaaattggtatcccttagcttaggcaagatagaggagcccttccatacatgatttcaaaaggtgaaaacccagcccagtaagtggtgtatcttactctaagaagggctaaaggaaggagctttacccaattctcactggtctctaggattaacttagtaagagtactttttattgtgtggttcatg

SEQ ID NO: 480666 - DNA, 1000 bp, Homo Sapiens
tgtatttatctttctctctaattttaagaactacagtttgccctgtgacctcaatttgctaatggatctaaggtgagttgattttcagtctgtttagctttaaaaatgtgtttcctttaaaaatttcctgctgaatagcaagcaatttaaatatttaattaaaaactgtttggggataaattttaaatgtttattcataattagtacattttgtaaaaagtaaagaaaacaaattaactctacagtagtttcttgagagaaaatagttcaaaattcttgtttcaatgcatgtaacctagtatcccacaaagatagggttgatgcagtttttgtctgcacaattcattgtgaacaagagactagatgttccataattattcatctattatttattagtgcactatttttttccagaaaaggatatagttgttttttaattcaagtaactgcaaataggaaaccagagggagagccccaggctgggacaaatcatggctacccctcctcaacagaacagggggaggaggtggcctctatgccctttttggtcaattcgggcccccttgccagctctgctgcagcatcctaggggcagggccccaccttccctgggactggggtagttggtcacccagccagccatgctccagcccctcttctccatgaagagtatcttgggggatcatgggcagaacaggaggcaatgaggatgaacatttggcactggtagcagcagcaatgacagatgtcgaaaaatggaacattgaacaaaaaacaacacgactgtccagaggtagtttgtgaacagagaaaaaatggaaccagaaccttggggggcagggaggagcaggagggtttggagcccgcagggtgagctccttgttattggtgccccatctgaggaggggcaaatggccaagtaggagaagcaagtaggggtgggggagcagccccagcccacctcaggtggcggccacagggcttgtgggcctcacctgga

SEQ ID NO: 480667 - DNA, 500 bp, Homo Sapiens
cctgcgatcctgtctgtgctcacccctgcaaaaaaaaaaaaaaaaattaagtatccattatatttgagttaccagcctctccaagcctagatatcctatctgcccctcctacctaacccagcgagtatcttatctcaagtgggtctacagattcactccccctgagttaattttccttccctctccactactggttacaacctcaggtctttccacctagccctcaaaatgaaaccactttctcaacaaaaccctgttatcctatggcctctgttcgcaactctattcaccatacagcagcctgagtgagccttttaaaacaggtcattcctctgctcaaaccctccaatgacttcctatttcatgtcatggaagtcactgaagggtttggagtggaggaattacctaaggtaattcctgaccacctgatgtaacactctgacctccatcctgaacattctccattcctttctctgctttagctttctccgtggcactta

SEQ ID NO: 480668 - DNA, 1000 bp, Homo Sapiens
gactccagggctgagccagaaccgcccctgctgaatgctcagagcacccagagggaggacactaaccaagcatccctgcttgggatcctttacctttttgcttattgagaaacagcagtgggggcggggcgccaggacctagaggcccagggccctttgtggccgcaggactttggttggaactcgagtcttcttcaggcttccgtggcaacatgggcgtctcaggctccagggctccgtctccagggggcagctcggggccaggctggggctcagttgaggggtagtcgaggaaggaacccggctcggccaggccccgccggcttggcgcacgctcctcggcccggacgccagtctcctcccggatggcatccagggcgctgggcttcatcgggggtgagtcctgctcccgcttggggctctcctccgaggccgaggaggcgtcgcacgactcgatgatgagctcgctgtccagctcggcctcgcgctcctccctcaggatgctgtactggatggatggcgaggcgggcgagggcggcgggccgcccacgtggccaaagctcacatagcctgagggcagcgcgtcctccgcggccatggggtcctcggacaccagctcgatctctgagtcccccgactccgcgctgctggcctcgtggtccagggggctggggatggttggcggtccggacctggccttgacctcgggcctgtcggccagctggcccaccggccgtgggttctcggcggtttcatacgataatccctttgcttctttgatggcggtgatcagctcatcctcggagatgctgcctttcccctgggattctgcagcagatggttctgtcgtcccacagagcgaaggagagccacggaggcacacacacggacagacagatggacagagagaggagggataaaacaaaattccattaggcgagatgttttgtcgttgcttgagaaacacatatctcattagcacaaaaataatctgtttcca

SEQ ID NO: 480669 - DNA, 885 bp, Homo Sapiens
tgctttataccctgccagacctatttctgattttttttttaatcttcttggactgtccaaacttggccagaatattgaaagccagcccacgattacttttagcaggtggctgcatgcatggacacatgctgccaagtctctcaacttggcatagccatcttaataatcccagcaagaacttctttggttgtctttccagattatattcctttccttccatgcaaaaccaggttatgatttctagacttcattattttaaaagggccaaatccccagggtagtggtaaaggaacccatcaagtgctgctccttcagacttgggattacaggagaaatgtgctccttccctccagttccctcttctaagcgttcccagcttgctacctgttggcagtgctggtgttgctsstcccgctgctgtgtttctgtgcccggctcaacctccgtgggggctttgaatgctgcagtcgggggctcggcatggacgggaatgaagaggcgtagccatgttcacactctgaagaaagcaagaaaaaaagatacggtaagaagaatatagtacccaaatccattgacccacaaatccgaggtctttgcagtaacaggtttttgaaagcaggaaaagaggtaaaatgtttccactctttttggttagaaaattaatgtccctcgcctggacatcaatcctgtgacaccccaccagctggaaggtgttttgatacctcctctaaaccaaagagtttatcccccctttccaaaatccttctctcccaaggaacttgagatttcagatgctttagaacaaaaattttgtggaccagttaccattcacctcattgacttcgcttgcctcaaaaattccccttttactttcaactctctctg

SEQ ID NO: 480670 - DNA, 1000 bp, Homo Sapiens
aagcttagtcactggcttcattcactttgtatggtagcacagtcttcaaactgtctcacacttgatcaagagtaagcaaacacagagacaacatcttgactcagccattagtaattataagtgaaaccagaaataatttacctgggccacaaaaaggaattgttttgtcctgtttttcattaagtccctagcacctgaaacgtagcaagttctgatactgggcttctaaaggcatgcagtttttcactcacatctacttcaaagaatttcttccactgaaacatagcacaatcaaggaaaaacttcttctggaggcaaaggaagagcacaagtatatgttgaggcgtaatgtatgaccaagatggtacgctatatatagaagcagtgaatgctgttaaagtgtcactcacaaagggatagtctaacattaacacacaactcaactgcactgctaaatatggttgtctttattttctttttccttgcccagccctatctaaacataaaataaaactacaggactgaaattaacaatccattaaaatcagcaataagttatgaaaatcataaagcttttttttttttttttaagtaattaagggtagttaaattatttaaagtatacaaagtccaaacagccaggggtaaggtctccaagaggccttcccagggtaagggagagggccacaggggaaccttggagtttgaaagacaaagggaacacatgacatcaaagtgcaggctagaaatttcacttagaagaaaataacattactgaaaatattcgtaagagtaacaatagcacctgcacagtgggactgtgaggaagagagagactgcctgtaggaaaatggaagcaaatctttacattaaaatgagacaagtgctgaacttaactatgttaactatgatagtgtgtctactatagatatcagatgggtaaaagctggtaaaaggtaatgattctaaaaacaaaaatagcattgaccctttttctacc

SEQ ID NO: 480671 - DNA, 1000 bp, Homo Sapiens
ttaggttggtgcaaaagtaattgcggttttggaccgtgaattttaaatcattataactaggctcaaacacatctttattaatcaaaataggaaccattacaatcaacacatttttgccaacgagaaataagtttgtttattcctgtagcgtaaaaatccgtgcttcgggattcgacgaactcttggaaagcattttctgcatcctgctggttgtggaagcgttttccctgcaaaaagttgtcgagatgcttgaagaagtggtagtcggttggcgagaggtcaggtgaatatggcggatgaggcaaaacttcgtagcccaattcgttcaacttttgaagcgttggttgtgcgacgtgcggtcgggcgttgtcgtggagaagaattgggccctttctgttgaccaatgccggctgcaggcgttgcagttttcggtgcatctcatcgatttgctgagcatacttctcagatgtaatggtttcgccgggattcagaaagctgtagtggatcagaccggcagcagaccaccaaacagtgaccatgacctttttttggtgcaagtttggctttgggaagtgctttggagcttcttctcggtccaaccactgagctggtcgtcgccggttgtcgtataaaatccacttttcgtcgcacgtcacaatccgatcgagaaatggttcgttgttgttgcgtagaataagagaagacgacacttcaaaacgacgatttttttgattttcgctcagctcatgaggcacccacttatcgagctttttcacctttccaatttgcttcaaatgccgaacgaccgtagaatggtcgacgttgagttcttcggcaacttctcgcgtagttgtaagaggatcagcttcgatgattgctctcaattggtcgttgtcaacttccgatggccggccactacgctcctcatcttcaaggctctcgtctcctttgcaaaacttcttgaaccaccactgcactgtacgttcgttagcagttcctg

SEQ ID NO: 480672 - DNA, 1000 bp, Homo Sapiens
agcaagggcaaaccctgacaaaacttgcctggagcctggcctaactatggacttcctcaggtgaataaatgtctttactgactaggcaattaagtttcccccttaccaattcacatgctaactatttaaataggaaaacatccttcaaaataaatagaagagattatagaaaacttccaacaaagatacctttgaagtcttggtggaaaaaataacttccaggcagtaatacagaagtaaccttctctcaaataccagtttcaagtcatataacaagtaatgtcaattaaaaagcacagaaaaagcactaaacacattcactacatcttcctatatttttcaaaggtggagttaaaaaacacatacctatacagtcctgattatccacataatgcacttcattaacacctaaaccttctttttgatagagttcttgttcctaaaaatgaaataatcataatcatagatacagcaatactgagcaatagtgaattttgcactgtttctgaacataacatttgctaattagaatgcaaaggtttatacaaactggtatagccttaaatggttttccaaaaacataacagatttttgaacacttgcagacaggcactaaaggtaaggaaatagcaattaactgcaaatgggctctaataccaacacagtgatataatatatatgatacatcacttggggaaaataagtgtaatttagaagaacaatatatgatcaaatttgagtcctcaaatatgtcttgtgtctttttaaaatttttaaagggattttatcatagatggataaactatgcaatgaacttaagtaaatatgttttaacattgtttcctgagtgtttaaatatttcctcccatgagatactagaaaagatttctgacattctagaaggcactgtccacttaaacacaactcaatttgaaattcacatttattttaaagtatattaaaaaggtgaacataaatcaaaatacagtctcctttttac

SEQ ID NO: 480673 - DNA, 1000 bp, Homo Sapiens
taatcaaattttagtgtaatatgcacacccaaaatgccattgtgagagaaacacattgaaaatgaattacaaactgaatcattaacttcagatgggctctttttaacatggcagccactttataaataggagtccatgaaggcgatcatttacctgaagcccctggctgtgcctgctttcctctctcaactcaactagtcctctctagccatcccgagctggactactccagctaaaacaaaaccgctgaatgaggaaggaaacagaaaacacatgggaaagagaaggtttgaaggtcaaccagacagtatgcagaagcaagaacattaggagaggcaatcagatatgttaagaaccaagaatgaacacattcagaaaattacaagcatttctgtatgttcaattactaggcctacattatgatattttacatacaaatatcaacaatgcagggtctgctcttgaacttcactgtgagatttctgacagtgatctacattatccattttagaatataaaacaataatttcattttaaatatagtaaaaaaaaaattaaataacacaaataccttaaacttgtttcccacgctgatgaagctaagttttcctgctttttgtttagtatctttgttgttatttgtggatgattcaaataattcccgtataaacttatctctggattcacatattaaggattcaagagacatatgtaaagcatcattatttttctccacaaactgggtctgaaaaataaatcaaacaggaatgtttctgtccatcttgtgataacatcacttaacatggctctgtccaaaggaactttctgtgatgacagaaatgttctgtatctgcactgtccaacgcagtcactactagtcagtgtggacactgggcacctgaagtgtggctagtgtactgaggaattgaacttgtaattttacttaatttaaataaccacgtgaaataattaataaccacgtgactagaagctatcatac

SEQ ID NO: 480674 - DNA, 1000 bp, Homo Sapiens
atcctaccacaaggtgaaacggttctactgagtttagaaacctgtctgctttcatgggaatgcagattttgttttccttaaaaacattatgaaagaactccaagagttcctccctttagccaataactctccaatatctgtgccagtgaaaaggggttagggtgaggcataccccattatacaaaataataaaatgtcccaaatacaaacatacccattcaaaaagttttacactcattagcagtctttgtgcttggtctactccctttcagctcttaaaagagaaactgctgggtgcggtgtctcatgcctgtaatcccagcactttggaaagcctaggtgggtggatcacctgagatcagagttcgagacaagcctgatcaacatggtgaaaccctgtctctaccaaaaatacaaaaatgagctgggcatagtggtgggcgcctgtaatcccagctacttgggaggctgagtcatgagaattgcttgaacctgggaggcggaggttgcaatgagctgggattgcgccactgcactccagcctgggagacacagtgagactctgtctcaaaaaaaaaaaaaaagagagaacctgtcaactacctaagtattatctgtgtgattttgggagatggatggggtgaagaggtaaccaatttaaatcagatcagtactccaaacacaaagaagtgttagcagtgctggaaagttaaacatatatatgaatacccctttcaacagagtatgttccctcattgaagagtcagcaatcaaaacagaaaaagtggttgctccaatctaaactattttttaaaactgatttttttaaagttgtttgtacattttaaagcaaatcttaggagataaaactgattgaggctggaggttaagctaagcataaaattcttcaattcaatagcgcacaaagccaggcgctatagctcacacctttaatcccggcactttgggaggccgaggctggtggatcacttggggtcag

SEQ ID NO: 480675 - DNA, 1000 bp, Homo Sapiens
ggcatttattggaccccagtagtgtgtccgtcggcaaaaatgtacacttcgccctgagtgatgggtttgtggcagtcatagacttacagaacatgaagttcacgattcgtagtgagactcgtacactactcctcccgggttggaggacaatgtctcgattcggtgtagcatctgcaggtcacagcagtacacaaccctctacagctcgacctctagctacagccctgcatgcgctcgatgtcatgcgtgctccatcggagctatatcagtagatcgagtcagcagtgaacatgttgtgtccggcacgtccgtgagctagacactaagatccagggcctggatgacgtcacagttgttcaaggtgaacaccagctcccacatgctgttctctcacgacgtctgcaaaatgcacggtaaccacctggcccttgactgggcggcttgaacccggcggccctgggacaagcgtcttcttcctcaacagctgcttccggggccagggacggggcgggctcaggctccatggcagcgaggaactctagggccaatgtcctcagctgttcagcctcttccaccgggggctgtcccatgcaccagcgggggcagctctttcaggtcatcttcctcctcgccctctgcatcctccaccccatccagcaccttgaagtcctcaagcggtgggaccctggcaggaggcgggggcagagggcttagagggttcagcacacgaagccatgccgctggggggacgggaattggccctctggatccaggacccctacctggggtcctgtgcccccctccgccatactgaaatttttatgttgctgatccattttttgctttaggtaagggggcaaggaagattgaacaaaccaaaaggaaaagctatttttaaagcttttttattttcttttttggtcaagcaaacaatagcaagcaaatagctacttgaataaactatcagtgtgcctctctctctttaaagactttgcatttc

SEQ ID NO: 480676 - DNA, 1000 bp, Homo Sapiens; identical to SEQ ID NO: 307807

SEQ ID NO: 480677 - DNA, 1000 bp, Homo Sapiens; identical to SEQ ID NO: 119865

SEQ ID NO: 480678 - DNA, 1000 bp, Homo Sapiens
  misc_feature (649)..(649): n is a, c, g, or t
tttttttttttttttcaacaacatttatacatctttttaattagattagctttgcaagcaacttgagagctctttcataatgaaacactgcttttcaaattacatgactttatagtctatctgtatatgaatcctgaaaatctttgcctactcttgataaaggtctgtgttttacagctggttaatgtgttgaataaaaacagcattatgaagctttatctttaaccaggattaaacacatataggccacaaacagttttaaattttgtttgaaatagagtcctgcttggtgacaagttaatagtcccactaacatgaaatgaatggatattaaataaatggccatcctgatttcttgatcttttcacaatgattcctaagagagtatataaacttttccaaaaaatatacaatttaagacctgtctggcaagcacaacccacagatagtagaatctaatactttttacaactgtagaggtacacatttgaatgacaacaggggctcccaaattaaaaggctgtggctgtacattttgaccatcgacaacctcccatcaacataacgatttctactaaccctggaaagataatgcttttgattgtggcctaacgccgcgcactgtactatagaccagatggcaaagacnacttgcgctcctgggttgggctggcagaggcacttactgtagagatgtgatgttatcatctggaaggaaggggaggaagtagaacaaactgaatatgggcgaggaaaaaacataaactatcactttctcctgcaaattctcctaagtgagatcactatactgaacattcaatcccatcctaagtccactgttggcttcactacacaattttttttccatgttttacatgaatagcaatggcaatcttttaataaaaattactgagcttcccatagaaaaggtctcaaattgaatacaactatacagatgctaaaaatgtcttaagttgaaatatacagaaaatttctgtat

SEQ ID NO: 480679 - DNA, 302 bp, Homo Sapiens
gatcatagccaaaaaaaaaaaaaaggatagtctcagatgacaaaaaactaagagatttgtgaccagcagatctattctaaaatgacagtttaaggaaattcttttttatctatttatttttaaaaaataatttaaaattttaattgaagtatagttggtgaacaataataaaggaaatttttcaaatcaaaaatgataataagaatgaatctttggataacagaaagaacaaatgaaaaagtaaaaataggggaaaatacaatatattttcatcctcttaaaagtttaagcaaaaaaaaaaa

SEQ ID NO: 480680 - DNA, 1000 bp, Homo Sapiens; identical to SEQ ID NO: 307812

SEQ ID NO: 480681 - DNA, 1000 bp, Homo Sapiens; identical to SEQ ID NO: 307813

SEQ ID NO: 480682 - DNA, 1000 bp, Homo Sapiens
aggctgtggaggactttattcattagacccagagagccatgagtgcctcccacgaagtccccactgcagggagccagggtcctagatgccaggccaatgcatgtgccgtgagctggccgaggggtctgctggtcccaagagcgcctctgtgttcttcagacagctccgggtatggtggcctcgccaggtggcttgaactatcttcgctgccatttgctgctgcctcatctgctggcggatcttaaagcccctccaggcggactggatggctgtggccgctttgtcctggcgatgcggctgcctgggactcagggcagccagctggtaggcggaggcccaagacactgccccggggccctcagtgccctggcccatgccctgcaccacacgggtgggctgtgtgcgtccacaggtatgacaggtgcgagggctggagcccactagcatcaccacgctgggcgggctcccgatcctggagctcagggagtggcagacgctgcaagcgtgtgcctggcaggactggaagcagcgatggtcagatactgtcctggctctgccatcctggaaccagcttcggtcagacatgaccccggcccggctgcccagctccacccacgtgacggggtggagcatctgccagtgccgggcttggtcccggcgggtgctgtagccgcgccaggcagactggatggtcgtggtggctctgcagaggtgtgccaggttccgccgcacacggtagccgcgccaagtagcttggatgaccatggccccccggtgccacagccggatcctgcgacgcgccaggtagccacggacgcccgcctggatagtgatcactgcgaggatgcggatctcctctgcagcctgcatggacaccattggctccccggaccgcctgggatgcaccaccgccttgttgcgccaggtgtcccaggacgcagcacccctggctggctcccatgcgcggttccacgattggccaccaaccacaccagcgtcc

SEQ ID NO: 480683 - DNA, 1000 bp, Homo Sapiens
cttttaacgttataattttatttcaaagaaaacagaaacagaacaaaaacaacctttgcatttgagggaggagattattttacagttttggaaaagaataagaacaattgtatcaggaaacaaatgattatgacagaaactcgcatccgacagctgcagtgaatccacgaggacacagaccatgctggtggccacagcagggccacaggtgaatccacaaggaaacacagaccatgctggcagccacggcagggccacagggcacggtctccatgtgttaatgtttaatgtcagcattttcatatggacagaaatcacgaagaaatcctgcaaaaatggcatcaatatgaacaaacccttgttataaaaagcaaaatattgataggaacaatatcttccagcgtgtgcgtttcacatttaggctttactgtatgaaactaagtcaaaattagaagcactggctatctccaccgacatatattttaactgaatataaacttcaaggcttttcttaaccataggcttaagaggatttcttttatgcagaatgtgaccagagcaacaaatacacctaaactgtttgaagatgggaaatttatacatgaaatgagctagcaggcttcctttggtatggggacactgttattctaaaattaaaaaaaaaaaattgaatggaagtggactgcttcaagatggtaacacttgtagctgcaatttttagcccagtagagaatgaaatggaaaggcagctacatgctgactgcacaagcaggtgcaccccaagccacgaggggtatcttcaccactttccccacggccatgaccttctgataactgaaatgggaaaacacttgggagagaaaaacaccaacaacacttggcttctcttcagcacagcggccaggacgaagcgggaggccactgatcgaagggcccccagtggaccggagctccctgtgtggcctgcgcccggccctcccctgcacttggcagcctgctc

SEQ ID NO: 480684 - DNA, 1000 bp, Homo Sapiens
cagatatagataaaactttatttatacataaaaaattacactttaggaattctgttcctaaaagcattctcttagtaaagctcaaaatgaaaaggttgaaaggggcagtgaacagctttttaactgtgtacatactgcagtcacaagcaattttttaagctgcaaaaatcatctcttctaagtagcatgagcttttgaaactgcagacttaaatctcatgatggcatcaaaagccaaagcgaaataaatcaatattctgaaatagaagacttggctgtcgatgttaattgggtgctatctccaaccactttccatcatgttacttcttcctcttaggtgtaactcaagaaataacttttttctaataatacctatcacagtaatgtggttactatttgaagcatctaaatctattggagatgacaatttagagagctggacaaaaatcatataatttcaagtataacaaacttaaatggcatattcaatggtaagaacattaaaagtatctgctccattatattaacttagtgttgctctttttttcttcttcatttttaaatttcaaaagaggccacattcctatgacacttggccaagaaatgtaggaaattaaaaagtccttattaaaatgtctcctgccagatggaaaggagacttgattcaattaggccttttgcatctttggaagtggggaggggatgaaataaagacacctttccgtcctgtgcaataactactttgtccttttgttgtcaatattcttgtattgggattagtctctctgtggggcaaaacaacctctgaaactggccttacattttgttaaaattatcctcaggttggcacaaaagagcattatctccaaggccagtaaggtagtaactcctggaagcaataggcggaaagcagaggtttctctccttcatgccaaggtcatggtcactccaaaggtgagggatgaaacagtaaatatataatacagaaatatccctattct

SEQ ID NO: 480685 - DNA, 1000 bp, Homo Sapiens
atgaagccataagtttttaatgaaaaaaaatgtatgccacagtgtctatatattcatctgaagagtacaaagatggagttctgagaaaaaagggtttatcactatagaaaataaatctggttcttaaattatgttcaaagcaaacattaaaacagtaatgtctcatacactgaaataaagcaattagaggtaataaattataaatacagtagttcaaatattgttttaagcattagtttttctaaacaagttaaattcaaaacattttaaatctgttatattttttcaaagggatgtacaaatgaaagccttcatagaaatctaaaacgataccaccttgtgatcttcatatagaatatgctgaaccttgaccatttttgatttataacatactttggttaatacattatgttccatatgcctttatatttgggaggaatcagattgtgatttgtagcctttacatgcagtttacccaaaccttcttcacatccaggtcttgcttgattctctggagaaggttttgtcagactcataattaaaatgatgcaaactgtaaatgacttcttcagaactgaaaacttcttttttttttaaataaagtgcttttaaattcaaatatatgttgccctaaagaaaactgaaatatactttaaccctgaaatctccgtatcttgacacacacattttaacggaaaaaaaaaaaatcagttttaggccattcatgtccttcaagagttcagattggatctaaattgggttttgcatcatcatcgtgctcatgtttatacatgaaggttaaaagaaaaagggcaacatccaaggatgaccaataggcagtatgcgacgtgacagctgaccaatagcggctctccacaaggccttctctgagttcaaaatcaatcctgtgatccaactccaatgcagaatcgaggaagccagaactgctatgtggaagggtctgtgtccctacggtggtagcagaaggtgaggcaactgg

SEQ ID NO: 480686 - DNA, 1000 bp, Homo Sapiens
gtgggcgcaagtgctttattcaaagcgaggggtggggggtgagacccgccagcaggggcctggggcaagaggcggggccaagctcacacagggagaggggcaagaatcaattctgttcttcagggtcacaggcagcaggcaagagagttggggggccgggtccagcgcccactgtgccctcagggagcctccccagggcagcattgcatagtgaccagccgactggccttagcctgacctgcgctgagtgggggaggccctgcctccctgccgggcacctttggggaaggggtgcgtgaaggcattggcaggccctgcaatatgagccgaaagacccctggacccaagggggaggctggtcaggggcagggctggggctcaggcgtcctcaagagtccacagagaaaagacgcaagacaaagtcagacgaggcctatagcaaacccactcggtccgctacaaagaacatgagatgagggctgcaaagtggcaaagtggctttatgcgcaggctctgggccgagtaccaggagaaggtgcctccggaggaggccgggatgcggctggggctgtctggcacggggaccttcgtggccagccacgtggccttgggacgcccgcgtccagccagggctgaggacccaggccagagcccctcccgcccagcacccgcgacgccagcctggatgctggggtcactaagtgaggtactcgttggttccctggatgggccaccctttctgccctgggaggaggctctggggtgtgcaggagggagccagctaacaggtcagtgttctgggcagaagtggggcacgaagtaacacaggccctgaggacacagggacacaggtgacacgggccttaaaagtggcttgtgacatgagcaacccaggcccctgaaaaggggtgacctgaagacagaggttccccaggtggggtgagggacacccgacgatgcagcacccccccagggaaacgtgaggcttcaagagactcag

SEQ ID NO: 480687 - DNA, 1000 bp, Homo Sapiens
aatgcaaatttctcttgaataaaagcccattaaactagtcagccattaatagctcagtatgaattaatctagtagagataaactggggggcagacagcaacacccggaagtagggagcccccagacagtgacatttgtacaaatgcaaatttcagtgggataaaacctattaaactagtcagccattaatatcttagtatgaattaatctagcagagttaaatggggaggcagacagcaagaaccagaaggagggaactcccattttgcgatgtctcaggtgggaaaacggatggaagaaaaggtggtctggatgttgggtcaccagggacagctagagggcacacggtgaaaatttacagaagcacagaatactagggccatgaggggacctagtgaccacctcatctaccactcctggtttataactgaggatctgaaggctcaggggtgttaagtggccagtcacaccctacctggctcagtggttacacagataggttttttcctgtggtcatgttttgtgtggggccggctctcctcctcattactagcctcagacttctgatcctacaggtcccttcagagccgtgaaggcgggcatcctgtgacacagctgacacagcatggagccttcatctcctatgtgcgtttcttaggtcactctgaggggtggggccacaagctaccacctacagaattgatacctttagttcaaagccattgaccaacccaggttcatgaattttcaggcagaaggtaccaagacaaccccattaggcaactgggaagacaggccaggaaaggcctacgatgtcgtcattacagctgccaccatcagagggttcattatgtgctcagaggtgcacagggcctcactggctgctggacagaacaggggctgctcccaggaccaggcagggtggggctggaaaccaacccaaggctctcaaagctccagggctgagccatggcatctctgtgccctgttccccaccacc

SEQ ID NO: 480688 - DNA, 1000 bp, Homo Sapiens
aaaggaaggccaagaaacaagcatttttattgtacatccagctggcccaaaggagattcttcttagatttgaaagccacaatgcccattttctagacatccttgatttggagaatagaaattaatccagctacactagctgaatggaaatattccttaaacacacctagctagatttgttctaactctctgctcactaagctcacttgtgatcctgttcataagatggcctctttaaagggatgccaccaaggaagatctgactcagaaccatgtctgtgatctggccagagagaaatatcctgttgttaactagcaaatagccatgtttgtgtatagatccttcagtcactcgagcttttggaaactgcgttttggttcctgtggatctagtcaccccagagagcgtgataaaatcctgtgataaaattctgtacctagccctgcaaagctgaggactgatcaagcatctctgggttggcctcatcaaggtgttgacaacagagagggctaatatgaagcagccagccagtatctcctttctgttatctcttttagctgcaatcaaaatgcagcggccaaaacatataaagaaataaagtggagaccacagtgctatatctgaaattgtttcaacagccctggcattaggccaccagcatgcattctttccagcctgcattcagtgtgaacccattgtctaggcattcatctttctgaaggagcagaggacagaaggcaggatgtaaactctctggatgctcgtggttcttttctcctgataatcagggcaactctctgcaaacagcagcaggagtgaagaagaatggcctgggaggataaatacagggcttacccttcttctctggaagagtcaaccagcttgattgtcctttctgggcatcagagcctcttcaactccacagttttccatctcgacaccagaggaccagatttagccctgttctttccatccaagataactttattccattttgcat

SEQ ID NO: 480689 - DNA, 528 bp, Homo Sapiens; identical to SEQ ID NO: 307815

SEQ ID NO: 480690 - DNA, 766 bp, Homo Sapiens
acggaagtaacaaacgtgaattgggtgcttggtctaggtttctaccttctttattaagggctttcttacaacatactgcggacatcatcttcttagagagatgaaaagtttgcggattctgctagcttcttttgggcccaggcggcgaggcactgtagtatcagtcagtccaggaatatctttttctcctttttttacaataaccaagttgagaacgctcagatttgcatccacaatgcaaccacgaactgattttctctttctttctccagttctccttggtctgtaacaggaatgccccttactcagtagcaggcggatcatttaatgcgttagctgcgccgatgagttccccatcagctaatgatcatcgtttagggcgtggactaccagggtatctaatcctgtttgctccccacgctttcgtctctcagtgtcagtatatgtccagttagctgccttcgccatcttggtgttcttccttatatctacgcatttcaccgcttcacaaggaattccgctaacctctacacaactctagcctgccagtatccaacgcgttttggggttgagccccaaaatttaacgccagacacttaacaaacaacctacagggctagttgattcggcaggtgagttgttacacactccttagcggattccgacttccatggccaccgtcctgctgtctatatcaaccaacaccttttctggggtctgatgagcgtcggcatcgggcgccttaacgcttgcaacctatgtatta

SEQ ID NO: 480691 - DNA, 1000 bp, Homo Sapiens; identical to SEQ ID NO: 307818

SEQ ID NO: 480692 - DNA, 1000 bp, Homo Sapiens; identical to SEQ ID NO: 307820

SEQ ID NO: 480693 - DNA, 982 bp, Homo Sapiens
catgctggcggggcggcggcgagggaagcggcgcactggaggccaggggagggcgtcctctcgcccgcttgcttgctcgatcgcgaccgcgaccgctcccgccctcgctccccgacctcttccccttccctctgctcgcctccctccttcctgtctcccgccccccgctcggtccgcggctccgcgctcgtcctcgggctccagccgtctccctctccctttccttctttttctctctttctttctctccctccctccctccctccgactcccccccccctttttagggaaatgagctcgctggagggcgggttttcgcccgagctctgcccccctcggggccgggacagtgctcggccgggccgggccgcgcgccagccggggcggggaaggcggagagccgcgcgcccggggagggggctcgggccgcccgggccgcgggccgcgggccgcgaggccggggctggagctcgggccccggggtgccgggagggctgtccctcctgaagtgccctctagcggcggcctcccccgcgggcgcgcggccgagcccccgccccgccgcgggacacgctgtcaggtcctcgcgccgcccctgccccgcgcccccgcctcgggtcggtctctccgcccgcgtctccctatctccccttcttggaccctcgctctctcgcgtctcgctctctgcgctctgtctctctcgctgtcttggtgtctctccctcctccggagacgccgctggagggcgccgaaagcccgtggatggctccctgcgagcccctctcccccgccgaggtggacccagtgccccagcgccctgggacagagggcgaatggcaaaccccactttgctctcccaaggcccttcccttcttggccggcccccgccaggcgaggactgcgccctgcaggaagacagaagcacaccctttgcttttcaatcaggctgctttattctgttgtggcaggagttcccgggccc

SEQ ID NO: 480694 - DNA, 916 bp, Homo Sapiens
cgcatccagccccacaggtaatacttaatgatgaaagactataagtttttctcctaagatcaggaagaagacaaggatattcactcttgccacctctattcaacattatacttaaatttctagccaggaaattagcaagaaaaagaaataaaagccacacaaattagaaaggaagaaataaaaccatatgtatttgcatatgacatgatcttgtatgtaggaaattctaaggaatccacaaaaccgtcagaacaagtaaacaaattcagcaaagttgcaggtgtaagagtgatataaaaaaaattggcctggcgcagtggctcatgcctataatcccagcactttgggaggcctaggtgagcagatcatgaggtcaggagttcgagactaacctgaccggtggggggggggtcagcccccccgcccggccagccgccccgtccgggaggtgaggggcgcctctgcccggccgcccctactgggaagtgaggagcccctctgcccggccaccaccccgtctgggaggtgtgcccaacagctcattgagaatgggccaggatgacaatggcggctttgtggaatagaaaggcaggaaaggtggggaaaagattgagaaatcggatggttgccgtgtctgtgtagaaagaagtagacatgggagacttttcattttgttctgcactaagaaaaattcctctgccttgggatcctgttgatctgtgaccttacccccaaccctgtgctctctgaaacatgtgctgtgtccactcagggttaaatggattaagggcggtgcaagatgtgctttgttaaacagatgcttgaaggcagcatgctcgttaagagtcatcaccaatccctaatctcaagtaatcagggacacaaacactgcggaaggccgcagggtcctctgcct

SEQ ID NO: 480695 - DNA, 1000 bp, Homo Sapiens
agagatactgagacaaatagtagaaagcagggtaatagattctgggggctgaaagggcccatagagatccaaatccctcacaatacagtcaggaaaactgagagccagtgaagtgaagacacttaggttcactcagcttgttagtggtataggtggatctaggacctgtgtctttaaactcatgtttgccttttcctacagcagtttgcatctcccagagaatactgtaaatttatttgtgaccctgccattttttaggataggaaaggagaaagtatcccagatgacttcagagtctggtcagagtggttccttgatcctttgaaagctaattttgaccgaagttcagccttactggatagcaaagcccatgagtgaggcactcattttttcagttattattgctattactctgaatactagcacctctctccttctgagctaagatgactaaatcaaaaggagactttcagctaaggagtccctgaagggagactgtgccaaatcatttggaaccaggataaggctggatagaatgataccagatttggctgtgctttccaggggagtaggctcagttccaagaatcctgcaagtgagaatatttttatttcagttgttcaaatggatgtgtggagtcattatgatgtatattaattggagaatctatctcttagcaattgcagcacagtaaaattaaccacttatgaaagtaggtgatatgcagatatactgaggtggaaaatggtgtaaactacagtcagaatcagatcacacatttggggcaattgtttttgcaatggttcctgttgaacacagattctttggccaaatgcagtttattttggggctcaactgggaaagttgtagagttcaagttgtacagactactcaaatctgaagacatcaaatgaataaacacatttatgggttgttttggtttgaaataagtgagttggggttttaaaagacaggccagcctgctgggcttggtggctca

SEQ ID NO: 480696 - DNA, 1000 bp, Homo Sapiens; identical to SEQ ID NO: 307821

SEQ ID NO: 480697 - DNA, 580 bp, Homo Sapiens
aatcttaattagatgattggattatctggagccacaccttgatattcctaacccgagcaccctcatccaacgaatgctccacccaactggctcccaagtctctacgtggttccagagcaaaagaatgtttatacaacgcatatctccaccttttcttcaaagtcttttcgcttacacggaaagacttcttcaactgccacgcttcagggtcagggggaggtcttgttacaacacagatctgcggatctccggggtttgattgtggcaaggatgctgctggtgtcaaaaccacaacgtgggaagcacagaaccactagttggttttcagtgtttcagtgcatacaattcctaataaatctggccaagaaaacctgtaagttcttagattgtcccaaaggtggcgcatgaaatcaaagcaggagaacagtttcctacgaggtgtagcctcggaaagttgggggtgactgatggaaaggaggagtgaagctccgccctttccgctgctagctgcgcccgaggctatttaaacccaccctggctggcctgtactcagatcttcgcggagcggatcagcggccgc

SEQ ID NO: 480698 - DNA, 1000 bp, Homo Sapiens; identical to SEQ ID NO: 307823

SEQ ID NO: 480699 - DNA, 1000 bp, Homo Sapiens
aattcccctctataaccctacaccatagcacatcgtgaagatgggaggaagcagtgggaacttgaaaaatggatttattgcagggtttgctgcagtatgtgtatcatgtgaggccatttctatttctctttctttgccttcccagttgtttttcccctgtatgccacagtaaactagccactgttttagcagctctcttgttgatttttaaaatacctattcactaaatctttaaaggaaacatttagctactgcaatgggtgtacataagttggttgtgtaataggaaggaaacaagccaggactggagacttcatttctaaagaaggattttaaagcagactaagagttatttcccagagcaggtcatgaagcaggagtctctctacaccctttcattgctatgacgacagcctgctcctgctacatgcagccagaaaaagcagcttacatttcaatgctaggaacataggggagaggtttacaaaaacaccaaacaaagacaaaaaaacaaaaaaaagactctttcacttgaatttcagttagagaggaaaaaatatcccctggagcaagtcaaaagccctattcttgcctttagaagcagataagaaagaagaaatgttgggggctttccctcttgtccaagtgggccaataaaacagaattgacagcaaagcagcatttcttctcactctgtgtaatggcaagctggcatagaacactttctttggtttcctttgacttggccattaagaagctactaactgatgcagcagtgaagtctcatagtaataaatacctcgtgttgaggccccccaccaggggaaaatagtagtgtccgatttacttttacatttctttggataaaaaaggcaattcaaagaatatttccttcttgatctccattgttactaccagagaaatcattgcaagtatgtaacagaggcctcactgatatacgagattccttatgagcaaccagtcaactttcctatgtgtt

SEQ ID NO: 480700 - DNA, 1000 bp, Homo Sapiens; identical to SEQ ID NO: 307825

SEQ ID NO: 480701 - DNA, 1000 bp, Homo Sapiens
gatctgcatcccacctctgagacggagcaccaggtgcagggtggactctttctggatgttgtagtcagacagggtgcgtccatcttccagctgtttcccagcaaagatcaacctctgctggtcaggagggatgccttccttgtcttggatctttgccttgacattctcaatggtgtcactcggctccacttcgagagtgatggtcttaccagtcagggtcttcacgaagatctgcatcccacctctaagacggagcaccaggtgcagggtggactctttctggatgttgtagtcagacagggtgcgtccatcttccagctgtttcccagcaaagatcaacctctgctggtcaggagggatgccttccttgtcttggatctttgccttgacattctcaatggtgtcactcggctccacttcgagagtgatggtcttaccagtcagggtcttcacgaagatctgcatcccacctctaagacggagcaccaggtgcagggtggactctttctggatgttgtagtcagacagggtgcgtccatcttccagctgtttcccagcaaagatcaacctctgctgatcaggagggatgccttccttgtcttggatctttgccttgacattctcaatggtgtcactcggctccccctcgagagtgatcgtcttaccagtcagggtcttcacgaagatctgcatcccacctctgagacggagcaccaggtgcaaggtggactctttctggatgttgtagtcagacagggtacgaccatcttccagctgttttccggcaaagatcaacctctgctggtcaggaggaatgccctccttgtcttggatctttgccttgacattctcaatggtgtcactcggctccacttcgagggtgatggtcttaccagtcagggtcttcacgaagatctgcatcccacctctgagacggagcaccaggtgcagggtagactctttctggatgttgtagtcagacagggtgcgcccatcttcc

SEQ ID NO: 480702 - DNA, 1000 bp, Homo Sapiens; identical to SEQ ID NO: 307826

SEQ ID NO: 480703 - DNA, 1000 bp, Homo Sapiens
gatgaggggctcaagaaaggggagggggctcagtgtgggggaggggactcaggatggagcaggggctcaagacaggggagggggctcagggtgggggagggggctcaggatgggggaggggatcaagaaaggggagggggctcaggacaggggacagggctcaggatgggagaggggactcaggatgggggaaggtgtggggggcagtcaccacctgggtaggaagcagtggtggtttggacaggaggggctggccctccagtgacccgggtggacaccccaggcctggctcagggcttcttggggacatagtggtggatccagtccaagtagtaggtgacacgggtgtagatgccaggccggttgggctgggcacagctctcctcccagctgaccacgcccgcctgcagttaggtgccattcaccttgcagaccaggggccctccagagtcaccctgggaaggtcagaggtcagtgctcgctggccaggcttcgggggtcaggatgagggatgcgctcgctggccaggctccggggattggggtgggggacgcgagggcccacctggcaggagtcgtgattttcgctccccgcacacagcatgtcatcgcggacgatttgaaagctgtggcccgtatggaggccggtgtgatattccgcgttgcaaaggtggttttccactacggggacttccacctccttcagcgggtatggcggcggcaggtgcactgggggcggaggggggcgtggagccgggtctggggccggctgggtgctgcttcgtggacttggtggcagagtcacgggcaggggagatggcaccatgggcccagtgctgttctgtgcctgcagccccggggaaggggcggtgaatgcagtccaggcccctccgctgaggctggtcctgggtccctggcctcatttaagccccatctggggaagggaggggagggccctggaggttgccaagctgggctccatggcacgggggtgcagagcc

SEQ ID NO: 480704 - DNA, 1000 bp, Homo Sapiens; identical to SEQ ID NO: 307827

SEQ ID NO: 480705 - DNA, 1000 bp, Homo Sapiens
tttttttttttgcacataaagggtttattttaaatgttttaaggataagatagagttacatcataattataaaaattacttacagaattaacagatttatattgtgtatacttctaaatgcagagaacagggaactgtctacacattgtataaaataaaattaaaattaaaaatgaattcaagcttgaaagatgaggtcatttacctaattttaaaatgtgaacacgaagacctctgacctatacacattcattccaactgcactaatgatggaaaaacacaaagagcgcagcatttccaaggaaccacagacatttcaaccataattattttgttataataattgttctgttttgtctttggagaactttcattttgttaagacaatcagcttaagagtgttttcaggcactacaatttgtaacaatcggaacagtcttctaatgggtctacagtgttcagagattgaagcccaatgcacttcgtggtttggcacataaaacaataaaagaaatgaaatctggtttagaagtaactgtgatttttttttaagaaaacacagtcccttcaaatgctgcatgacatttacaactggaaaatcaccttctgttggcactacatttgcttcaccagtgcatttttatcctaaaaccactaaaacggcacagtaagcaaatatacaggaaactgaaaacaaataaaaataaagaaaacaaaaaaacctaaatatctttaacatgcaattttagtcagttacattgaacattctacttagaatagagcatgcaaaaaaggatggtctgcttttaagatttttctctgaagttttacgtggcagcctgacatcacacacgcacgcacacacaatacaataatactagagcaggtaaatgagaaaggccgataaattttatacatagattcatgtcttgtattgtcacaagtcccatgatacttttggaaattaatgttgaattcctggaacaaggaaccaacattc

SEQ ID NO: 480706 - DNA, 848 bp, Homo Sapiens
gggatgacaaagaggagaggcaatggggcagagtgtctcaaggcactctgaggagagacagaggcggaatgtgagtatcagtgatttattgggtagcccccactctaaagaccagcagccccacgcatgcatcctcaccagaaataaataaggcggcattcaatgaaccagtctgtcttcttcctaaggagctctggggagggtctgcctctgcccacctagggtctgggatcccttcagctcttgaggaagggttggggaaggtggggggtgcaggctgcaggcccacccttttctggcctggcccttgcagcctgtgagcttggcactgcattgagaatctctgaggtctgtcccagagagacctgtccccagcagaccccagcccctggcccctaccccaggagtcccatcatgggttccttctcccctctctaactgtgcagccagggtgaccagctcctcctcctcagccaagaggaccggttgtgcaaaaaggaagcttgtgttaggatctttttcttcttttcccccttggctcaggggctgaggggctggcccctgcctgacactggtcagcgggtggtcagctccatggtcttcttccgctcttcccgctgctcctcccagtcctcgtcaggctcatacgtgcctttgatgatggccacacgctcactcaggctcagggagttggggaagagcaggtagaagtaaaggatggcagccaggaccgcccccacgatgggccctacccagaaaacctggtggagacagggcacgagtcagggcgctgagcccagaccttgaagacctgccccccaccccacagaggacagacccacggaccc

SEQ ID NO: 480707 - DNA, 1000 bp, Homo Sapiens
gagctcgaggcatccattgggagagtcattcacataaatggcagtattttgggagcacagcaagaaacacagttacctcatactggaggagttaggtcaagcttcttggaaaagataaggtttcaataaaggcttaaatattaaggaaaatttattagttaaaaataaaattgagaatgagaaggaagatacttttagtagagagaacagaataaataaacactcagaacctaaaaacagcatagtatgttcagtgaatgagaagtatttttatgtgtctggcacataaagtgtgaggtctacaatggtcagagataaggctatagggattggcatgaaccattgcggctttcctgataaatttgaattttatcctgtagatatgggggtggtgcaggattttaagcaatatcataatgtaactcactatattgcattttcaatagatcattctgtgtagaagaatagtatggcactggatacaagtacatactatagagaaacttcaccattgtttaaaaattataaataatgtatattatcatctctcaaaatatgaaaattaagtttgcaaaacacttcttattaactacaatatatcaaaaatgatgctgagcacagaactggcaacctataatctatgcccagcctaaatcacatctgagacaacgggaattaaggcatctagacaaagaataaaagtgttcatgtttcacagatcatcacaaaaataatatttaagggatgaattttagcaataataatgtagagaaatgagtagatttttaaagaaataataaaacaaaacagaacaaaacttgtggtgagcaaataatactgtcaaatgtaattaaatactggggtcatcagaaaaccatgtcttacataaacaacgtagtattaaatttcctaaccaaaaaaatgaagacagttagataaggcagggagtgaggtattcagtgaggagttcaaatatgttaaagttttttattatccttaa

SEQ ID NO: 480708 - DNA, 1000 bp, Homo Sapiens
aagcttttattttcttcatgagtccttaaaaaacatctaccagtttgactttaaagctaagaagtatagaaaggtcgctggcaaagagatctactcggataccttagagagcacgcccatgctggagaaggagaagtttcgcagactacttccccgagtgcaaatggtcaagaaaaggcttcatccggacgaggtggtgattgcagactgtgcctttgacttggtgaatatccatcttttccatgatgcttccaatctggtcgcctgggaaacaagcccttccgtgtactcgggaatccggcacaaggcactgggctacgtgctggacagaatcattgatcagcgattcgagaaggtttcctactttgtatttggtgatttcaacttccggctggattccaagtctgtcgtggagacgctctcagcaaaaccaccgatgcagacggtccgggccgccgacaccaatgaagtggtgaagctcatatttcgtgagtcggacaacgaccggaaggttatgctccagttagaaaagaaactcttcgactacttcaaccaggaggttttccgagacaacaacggcaccgcgctcttggagtttgacaaggagttgtctgtctttaaggacagactgtatgaactggacatctcgttccctcccagctacccgtacagtgaggacgcccgccagggtgagcagtacatgaacacccggtgcccagcctggtgtgaccgcatcctcatgtccccgtctgccaaggagctggtgctgcggtcggagagcgaggagaaggttgtcacctatgaccacattgggcccaacgtctgcatgggagaccacaagcccgtgttcctggccttccgaatcatgcccggggcaggtaaacctcatgcccatgtgcacaagtgttgtgtcgtgcagtgacgtggtgggaagagatgccagcgccacgagaggacacttcgtgagcctccctgtagccgtggaccgaatacgcactct

SEQ ID NO: 480709 - DNA, 1000 bp, Homo Sapiens
ctgggaggcagaggctgcagtgagccatgattgctgccactgcactccagtctgggtgacaaagcaagactttgtctcaaaaaaaacatgtatagctacataattaataatatgcaaatattcttctttagggtcacttaggttttcaacatacagacccaagagaaggtacagagactcattctctctctctttcaatcacacacacacacacacacacacacacacacacacccctcttcactataattataattactatgttggcttccacatcaggggttagagccttggcatggagacgcctgaaaggcacccaaggcaattagtggtgtcccttctccaccccctacataccttcaggccctttgcacttgctgctccccctcccagtgcacacacccccagatccttgtgtggctccctctcccaccacattttggtcttagctcaaatgccacctcctcagaaatgcctggcctggccgccttcagggctgtctatatgctcaccagctttatttttctttcgagaactttccattcccggacattgtactaaatgtttatttgttatccgtccattatccatctccttgccagcactccctgtgagctccatgaggctccaagattacaaccacatgcccagagctagggtggtgcctggctcacagctggcatccagtcagtagcaatggaatgaatgaatgatcaccctctcttcctctccatccccaccctctcctttttcacttcctctcccgccccatctcccctgcctccgccttaaatctgctggcatgaccagccctcaggaagttgtcaggcaggggaggtgtgtgctctgcacccctctccttccatctctctttcccacctcccttatgggtacctatctctcctacctgcagctgctcgctgccagctctggccctcttggtgggcagaagcttaggcaccccagacaattgtagggaaattgggcattggagggcagc

SEQ ID NO: 480710 - DNA, 893 bp, Homo Sapiens
ctgttagatataaatatatcacttaaaacacagcatgcattataatgttgaaaataattactttcattttttatcgttatggaaatattttctaaagggtaacttcaacaatctttccttagtgatggtgaaactgaataaatatcagtttttatcttcagaaataaaaaatcttcaaaccctttctatatcatgaatatatttttgataaatggaaaaattatgtgtatatattatatttttaaaatatatatttttaaatataaaatatatttttatatatgtataaataattgcttcattttgctatgtggaattttcttctgtttaattttttcccttgaacatccaagttaaaattcactcaaatgcttcttttactttatgaaactagaaaaggaaacttctagtatacaaacatacatttttgtatatttgtcacatacagccaaatacatataaaagtatttttatgtaaaatgatacaaccttctgtgaaaaatattttggcagttcctcaaaaagttaaaccctagagttactatatgatctagcaattctactcctgggtatatgcccaaaataattgaaaacacatgttcacacataaacttgcacatgaatattcatggaagcatattcataacagccagaaggtgaacacaacccgcatgtccatcagtgggtgaatgaataaggaaaatatggtatatccatacaatggagtattattcagccatgaaaaggaatgaagtgctgatatgtgctacagcatgaatgaatctcgacaacattgtgccaagtgaaagaagccacatattttatgattctatgtataagaagggccagaataggaaatccatacagatagataggcaattgattaatagttg

SEQ ID NO: 480711 - DNA, 1000 bp, Homo Sapiens
tttttttttttttttttttttttttttttttttttttttttttttagaatcttaaactaaatcctttatttcaaaaacaaacataaaataatttcccaggcagagaaaaggtttgagatggaagcgttcttgttagcagtcccttcctgcataaatggggttggagagagaggagagagggaatggccaagggtatggaaagctttcacaatgcatgccgagtgtgaagtgacacccccagcagatggggtttatcatctttacttagtcacacaacatcaaggactggttagttccagggaagggctccatttcattacctgggtcagttctcttcccccgcatgctccacaatgcagtagaaccaaacaacacattcatttacaatagaatgtttaaataacacctgtccaataactgcccttacttctttgtgctgtcgggaaaagaaaaaacagaaagcaataaaacccaaaccctttggcaagccagccggtgcctattctcctggggcatttttagtggaacttcggctgggccttgccctcctcccaatatcagtgaggaaagtggcagcgggacaggtttggtcatctgcagtggagtagaaagaggaaccaaacacgattcgggccacaggtggattctggcacatttttagattggattggttaaaaatgtcatgttgtacacaggatgcaggcaaaggagtttttttttgagggacataatgcctataggcagcatgaacggtccgatctacccttggggaggagctccctgtgtagggacggagaaactagggggcctcgaggaaggtgttggttcggaagatggaggagacaatctttccggtggcattgatggtgccttcgctgtctgagctggactcggagtcgctgctcccagagtaggcacccaggcctgggaggatgccgatacatactgcagcagaggggcagtggatggaggggccactcagggaggtgtttccgagaga

SEQ ID NO: 480712 - DNA, 1000 bp, Homo Sapiens; identical to SEQ ID NO: 119867

SEQ ID NO: 480713 - DNA, 1000 bp, Homo Sapiens
tatacccttctatacagggacaaagttatagtttctatcatgtagatagaaaagaatttgactgtgtaccacatttgcattaatgtctttgacctgagtaatgaagcaaacaatggaactgtctatgtcaggttacaggtgggcacagctggaagcttccatcacttgtgctttaacatttctgcattctcatcagtctctcctggaaagaaaatggactataactatcctaaagaacatatgttacatgtagacactaagtattgagataaaaccttgatttgtcttatcactgtctcgtcattacatttgtatgtgtaacttacacagagaaattcagtgtattttatcaccattaaattttacatcacacatttatatattttattatctttctattgacctttatttttcttgagatgcagttccactttgtcactcagtctggaatgcagtggcctgctcacagctcactgcaacttcagcctcttgggttcaagcaattctcctgcctcagcctcctgagtagctgggattacaggcacacaccacccctcctggctaattttgtatttttagtagagatgggttttccccatgttggtcagactggtcttaaactcctgacttcaggtgatttactggcctcagcctcccaaagtgctgggattacaggcatgagccaccatgccagctcccaaacctttttttggacaagttcttgcttggtcacccaggctggagtgcattggcaccatcttcacacactgcagcctcaacctcctgggctcaagctatcttcctctctcagcctcccaggtagctgggactacatgtgtgcaacaccacatcaagctatttgttgttgttgttgtttagtgatgaagtcttgctctattgcccaactgggtatcaaattcctgggcctaaaacattctcctggttgaagctcccaaagtgctggaaatataggattgagccactgtggacaacattgtca

SEQ ID NO: 480714 - DNA, 1000 bp, Homo Sapiens; identical to SEQ ID NO: 307833

SEQ ID NO: 480715 - DNA, 1000 bp, Homo Sapiens
atcacaggacagcattgagatggggttgggtgtgtgaggggcccagcttattgcaattttgatggccctccttttcctccctcccccaagcagtgtgcctgttccacagtgggcacatcagctgagtcttagaagtgtatgttgatgccgctaaagaaatcacaagagacaaagttttggtgcgcctctactgcaccgcagggtcctgggacactgtgcgagacaggggaggtactttttttattttttgtagaggtggtccctgtcctccaggagcttacaatctagctggggagagacaactaatgcacacttaaacaatcagtacaattagcgattaccacaatattgaccacaactgctgagaccagggaaaagcaagatcagtgaggggcaaggggggttcagagaaagtgttttagtaaaggtgggattcatttacttttactgcttgaatagttccaaatcaagtgacacattacttttggagtagggtgggcttgggaggcatgtaggaggaaaggggcaatcgagagagcaaatgcagcgaggctggaatacaagtgccctgggcaagggacagcgagagggccccactgtatttcttaaccaccctccttcctcaactgtgccctccagtcccgccacacaggcacgcggtgggtgctgcaccaagattcagggcgtcggctggcgatgtcagaatgtccattctgctggctggtgcggtgttttgatttccatggtggggcctgctggcatggcccgggcttcggggctgggatggtgctgtcccgactttgtccagatcagaatgcggtgcctatgcccagatctcagggtctgctccccctatcccccctcctctctcgaccctgccccttagtgggaccggtgcaaaggggttgggaagggatctggtatcttcgtcattgtcggtactgcttctccgggggtctactggcccctcactgaccttgccaagtgctctggcgaggga

SEQ ID NO: 480716 - DNA, 1000 bp, Homo Sapiens
ttccactgagaatgggaatgccatcttggatctcttggccctactgccttaccctgtgtcctcctggatggaacactgccctcgccacctctgtgtcacactcacacacactcacactcacacgtggactccctgagctaagggctcagttgtggtgagagagaggaggcaaaacaagtgagactgaagcctgaggaaattgctctcatagtttatttctcagagcccagaagcctgagccagggtagggcacacactaggactctgtcctgggtacaagattccgcaaaaaatccttgattctctggacaattcttttaaactctttgccaatcttctctttagatttccggaagaaatcacccagcagggcaaatctcttgttatcctggggttgtgtacaggaagaaacaggttccttgtcggggatgtacccagggtcaatccaagacccctccccacctagacgcccctcttcgtgggcccccgcagagctttggggccccagttcaacctctggctgtgacctttgaagcatgtgattgaatccctacacccaataaaaagatgagaaaacagagtcccggagatagtgaggggctctgcagggtcacacagcccagcccagcaacactgagatgggaacacagggctgagagctgagtactcttagacagtggctctcaaactttacagaagccggaatctcctggaaagcttatcaaaatacgaatttctgggccctacccagagtctgtctgagtaggtctgagtagggcctgagaatttgcatatctaacgagtccccaggaagggctacacttggagatctaccgctctaagggattccagagccggccctggagatggaactcaggtttggggaagagccctgggtaggaggggctttctctgtcctgggttgggggagtagttaattgacccattggatggtccacactctatgcccccatcagcccctgcatcccagaacagccca

SEQ ID NO: 480717 - DNA, 1000 bp, Homo Sapiens; identical to SEQ ID NO: 119869

SEQ ID NO: 480718 - DNA, 1000 bp, Homo Sapiens
catcgtgatgtcttatttaaggggaacgtgtgggctatttaggctttatgaccctgaagtaggaaccagatgtcggatacagttcactttagctacccccaagtgttatgggcccggagcgaggagagtagcactcttgtgcgggatattgatttcacggaggatggtggtcaagggacccctatctgaggggggtcatccatgggggcgagaagggatttgactgtaatgtgctatgtacggtaaatggttttatgtactatgtactgttaagggtggataggtttgttggtatcctagtgggcgaggggtggctttggagttgcagttgatgtgtgatagttgaaggttgattgctgtacttgcttgtaagcatggggagggggttttgatgtggattgggtttttatgtactacaggtggtcaagtatttatggtaccgtacaatattcatggtgactggcagtaatgtacgaaatacatagcggttgttgatgggtgagtcaatacttgggtggtacccaaatctgcttccccatgaaagaacagagaatagtttaaattagaatcttagctttgggtgctaatggtggagttaaagactttttctctgatttgtccttggaaaaaggttttcatctccggtttacaagactggtgtattagtttatactacaaggacaggcccatttgagtattttgttttcaattagggagatagttggtattaggattaggattgttgtgaagtatagtacggatgctacttgtccaatgatggtaaaagggtagcttactggttgtcctccgattcaggttagaatgaggaggtctgcggttaggagtcaataaagtgattggcttagtgggcgaaatattatgctttgttgtttggatatatggaggatggggattattgctaggatgaggatggatagtaatagggcaaggacgcctcctagtttgttagggacggatcggagaattgtgtaggcgaata

SEQ ID NO: 480719 - DNA, 1000 bp, Homo Sapiens
catcgtgatgtcttatttaaggggaacgtgtgggctatttaggctttatggccctgaagtaggaaccagatgtcggatacagttcactttagctacccccaagtgttatgggcccggagcgaggagagtagcactcttgtgcgggatattgatttcacggaggatggtggtcaagggactcctatctgaggggggtcatccatggggacgagaagggatttgactgtaatgtgctatgtacggtaaatggctttatgtaccatgtactgttaaggatgggtagatttgttgatatcctagtgggtgaggggtggctttggagttgcagttgatgtgtgatagttgaaggttgattgctgtacttgcttgtaagcatggggagggggttttgatgtggattgggtttttatgtactacaggtggtcaagtatttatggtaccgtacaatattcatggtggctggcagtaatgtacgaaatacatagcggttgttgatgggtgagtcaatacttgggtggtacccaaatctgcttccccatgaaagaacagagaatagtttaaattagaatcttagctttgggtgctaatggtggagttaaagactttttctctgatttgtccttggaaaaaggttttcatctccggtttacaagactggtgtattagtttatactacaaggacaggcccatttgagtattttgttttcaattagggagatagttggtattaggattaggattgttgtgaagtatagtacggatgctacttgtccaatgatggtaaaggggtagcttactggttgtcctccgattcaggttagaatgaggaggtctgcggctaggagtcaataaagtgattggcttagtgggcgaaatattatgctttgttgtttggatatatggaggatggggattattgctaggatgaggatggatagtagtagggcaaggacgcctcctagtttgttagggacggatcggagaattgtgtaggcgaata

SEQ ID NO: 480720 - DNA, 1000 bp, Homo Sapiens; identical to SEQ ID NO: 307837

SEQ ID NO: 480721 - DNA, 1000 bp, Homo Sapiens
catcgtgatgtcttatttaaggggaacgtgtgggctatttaggctttatggccctgaagtaggaaccagatgtcggatacagttcactttagctacccccaagtgttatgggcccggagcgaggagagtagcactcttgtgcgggatattgatttcacggaggatggtggtcaagggacccctatctgaggggggtcatccatggggacgagaagggatttgactgtaatgtgctatgtacggtaaatggctttatgtactatgtactgttaagggtgggtaggtttgttggtatcctagtgggtgaggggtggctttggagttgcagttgatgtgtgatagttgagggttgattgctgtacttgcttgtaagcatggggagggggttttgatgtggattgggtttttatgtactacaggtggtcaagtatttatggtaccgtacaatattcatggtggctggcagtaatgtacgaaatacatagcggttgttgatgggtgagtcaatacttgggtggtacccaaatctgcttccccatgaaagaacagagaatagtttaaattagaatcttagctttgggtgctaatggtggagttaaagactttttctctgatttgtccttggaaaaaggttttcatctccggtttacaagactggtgtattagtttatactacaaggacaggcccatttgagtattttgttttcaattagggagatagttggtattaggattaggattgttgtgaagtatagtacggatgctacttgtccaatgatggtaaaagggtagcttactggttgtcctccgattcaggttagaatgaggaggtctgcggctaggagtcaataaagtgattggcttagtgggcgaaatattatgctttgttgtttggatatatggaggatggggattattgctaggatgaggatggatagtaatagggcaaggacgcctcctagtttgttagggacggatcggagaattgtgtaggcgaata

SEQ ID NO: 480722 - DNA, 1000 bp, Homo Sapiens
catcgtgatgtcttatttaaggggaacgtgtgggctatttaggctttatgaccctgaagtaggaaccagatgtcggatacagttcactttagctacccccaagtgttatgggcccggagcgaggagagtagcactcttgtgcgggatattgatttcacggaggatggtggtcaagggacccctatctgaggggggtcatccatggggacgagaagggatttgactgtaatgtgctatgtacggtaaatggctttatgtactatgtactgttaagggtgggtaggtttgttggtatcctagtgggtgaggggtggctttggagttgcagttgatgtgtgatagttgagggttgattgctgtacttgcttgtaagcatggggagggggttttgatgtggattgggtttttatgtactacaggtggtcaagtatttatggtaccgtgcaatattcatggtggctggcagtaatgtacgaaatacatagcggttgttgatgggtaagtcaatacttgggtggtacccaaatctgcttccccatgaaagaacagagaatagtttaaattagaatcttagctttgggtgctaatggtggagttaaagactttttctctgatttgtccttggaaaaaggttttcatctccggtttacaagactggtgtattagtttatactacaaggacaggcccatttgagtattttgttttcaattagggagatagttggtattaggattaggattgttgtgaagtatagtacggatgctacttgtccaatgatggtaaaagggtagcttactggttgtcctccgattcaggttagaatgaggaggtctgcggctaggagtcaataaagtgattggcttagtgggcgaaatattatgctttgttgtttggatatatggaggatggggattattgctaggatgaggatggatagtaatagggcaaggacgcctcctagtttgttagggacggatcggagaattgtgtaggcgaata

SEQ ID NO: 480723 - DNA, 1000 bp, Homo Sapiens
catcgtgatgtcttatttaaggggaacgtgtgggctatttaggctttatggccctgaagtaggaaccagatgtcggatacagttcactttagctacccccaagtgttatgggcccggagcgaggagagtagcactcttgtgcgggatattgatttcacggaggatggtggtcaagggactcctatctgaggggggtcatccatggggacgagaagggatttgactgtaatgtgctatgtacggtaaatgactttatgtgctatgtactgttaagggtgggtaggtttgttggtatcctagtgggtgaggggtggctttggagttgcaattgatgtgtgacagttgaaggttgattgctgtacttgcttgtaagcatgggggtagggttttgatgtgggttgggtttttatgtactacaggtagtcaagtatttatggtaccgtacaatattcatggtggctggcagtaatgtacgaaatacatagcggttgttgatgggtgagtcaatacttgggtggtacccaaatctgcttccccatgaaagaacagagaatagtttaaattagaatcttagctttgggtgctaatggtggagttaaagactttttctctgatttgtccttggaaaaaggttttcatctccggtttacaagactggtgtattagtttatactacaaggacaggcccatttgagtattttgttttcaattagggagatagttggtattaggattaggattgttgtgaagtatagtacggatgctacttgtccaatgatggtaaaagggtagcttactggttgtcctccgattcaggttagaatgaggaggtctgcggctaggagtcaataaagtgattggcttagtgggcgaaatattatgctttgttgtttggatatatggaggatggggattattgctaggatgaggatggatagtaatagggcaaggacgcctcctagtttgttagggacggatcggagaattgtgtaggcgaata

SEQ ID NO: 480724 - DNA, 1000 bp, Homo Sapiens
catcgtgatgtcttatttaaggggaacgtgtgggctatttaggctttatgaccctgaagtaggaaccagatgtcggatacagttcactttagctacccccaagtgttatgggcccggagcgaggagagtagcactcttgtgcgggatattgatttcacggaggatggtggtcaagggacccctatctgaggggggtcatccatggggacgagaagggatttgactgtaatgtgctatgtacggtaaatggctttatgtactatgtactgttgagggtgggtaggtttgttggtatcctagtgggtgaggggtggctttggagttgcagttgatgtgtgatagttgagggttgattgctgtacttgcttgtaagcatggggagggggttttgatgtggattgggtttttatgtactataggtggtcaagtatttatggtaccgtacaatattcatggtggctggcagtaatgtacgaaatacatagcggttgttgatgggtgagtcaatacttgggtggtacccaaatctgcttccccatgaaagaacagagaatagtttaaattagaatcttagctttgggtgctaatggtggagttaaagactttttctctgatttgtccttggaaaaaggttttcatctccggtttacaagactggtgtattaatttatactacaaggacaggcccatttgagtattttgttttcaattagggagatagttggtattaggattaggattgttgtgaagtatagtacggatgctacttgtccaatgatggtaaaagggtagcttactggttgtcctccgattcaggttagaatgaggaggtctgcggctaggagtcaataaagtgattggcttagtgggcgaaatattatgctttgttgtttggatatatggaggatggggattattgctaggatgaggatggatagtaatagggcaaggacgcctcctagtttgttagggacggatcggagaattgtgtaggcgaata

SEQ ID NO: 480725 - DNA, 1000 bp, Homo Sapiens
catcgtgatgtcttatttaaggggaacgtgtgggctatttaggctttatggccctgaagtaggaaccagatgtcggatacagttcactttagctacccccaagtgttatgggcccggagcgaggagagtagcactcttgtgcgggatattgatttcacggaggatggtggtcaagggacccctatctgaggggggtcatccatggggacgagaagggatttgactgtaatgtgctatgtacggtagatggctttatgtactatgtactgttaagggtgggtaggtttgttggtatcctagtgggtgagaggtggctttggagctgcagttgatgtgtgatagttgagggttggttgctgtacttgcttgtaagcatggggggggggggttgatgtggattgggtttttatgtactacaggtggtcaagtatttatggtaccgtacaatattcatggtggctggcagtaatgtacgaaatacatagcggttgttgatgggtgagtcaatacttgggtggtacccaaatctgcttccccatgaaagaacagagaatagtttaaattagaatcttagctttgggtgctaatggtggagttaaagactttttctctgatttgtccttggaaaaaggttttcatctccggtttacaagactggtgtattagtttatactacaaggacaggcccatttgagtattttgttttcaattagggagatagttggtattaggattaggattgttgtgaagtatagtacggatgctacttgtccaatgatggtaaaagggtagcttactggttgtcctccgattcaggttagaacgaggaggtctgcggctaggagtcaataaagtgattggcttagtgggcgaaatattatgctttgttgtttggatatatggaggatggggattattgctaggatgaggatggatagtaatagggcaaggacgcctcctagtttgttagggacggatcggagaattgtgtaggcgaata

SEQ ID NO: 480726 - DNA, 1000 bp, Homo Sapiens
catcgtgatgtcttatttaaggggaacgtgtgggctatttaggctttatggccctgaagtaggaaccagatgtcggatacagttcactttagctacccccaagtgttatgggcccggagcgaggagagtagcactcttgtgcgggatattgatttcacggaggatggtggtcaagggacccctatctgaggggggtcatccatggggacgagaagggatttgactgtaatgtgctatgtacggtaaatggctttatgtactatgtactgttaagggtgggtaggtttgttggtatcctagtgggtgaggggtggctttggagttgcagttgatgcgtgatagttgagggttggttgctgtacttgcttgtaagcatgggggggggtgtttgatgtggattgggtttttatgtactacaggtgatcaagtatttatggtaccgtacaatattcatggtggctggcagtaatgtacgaaatacatagcggttgttgatgggtgagtcaatacttgggtggtacccaaatctgcttccccatgaaagaacagagaatagtttaaattagaatcttagctttgggtgctaatggtggagttaaagactttttctctgatttgtccttggaaaaaggttttcatctccggtttacaagactggtgtattagtttatactacaaggacaggcccatttgagtattttgttttcaattagggagatagttggtattaggattaggattgttgtgaagtatagtacggatgctacttgtccaatgatggtaaaagggtagcttactggttgtcctccgattcaggttagaatgaggaggtctgcggctaggagtcaataaagtgattggcttagtgggcgaaatattatgctttgttgtttggatatatggaggatggggattattgctaggatgaggatggatagtaatagggcaaggacgcctcctagtttgttagggacggatcggagaattgtgtaggcgaata

SEQ ID NO: 480727 - DNA, 1000 bp, Homo Sapiens
catcgtgatgtcttatttaaggggaacgtgtgggctatttaggctttatgaccctgaagtaggaaccagatgtcggatacagttcactttagctacccccaagtgttatgggcccggagcgaggagagtagcactcttgtgcgggatattgatttcacggaggatggtggtcaagggacccctatctgaggggggtcatccatggggacgagaagggatttgactgtaatgtgctatgtacggtaaatggttttatgtactatgtactgttaagggtgggtaggtttgttggtatcctagtgggtgaggggtggctttggagttgcagttgatgtgtgatagttgaaggttgattgctgtacttgcttgtaagcatggggagggggttttgatgtggattgggtttttatgtactacaggtggtcaagtatttatggtaccgtacgatattcatggtggctggcagtaatgtacgaaatacatagcggttgttgatgggtgagtcaatacttgggtggtacccaaatctgcttccccatgaaagaacagagaatagtttaaattagaatcttagctttgggtgctaatggtggagttaaagactttttctctgatttgtccttggaaaaaggttttcatctccggtttacaagactggtgtattagtttatactacaaggacaggcccatttgagtattttgttttcaattagggagatagttggtattaggattaggattgttgtgaagtatagtacggatgctacttgtccaatgatggtaaaagggtagcttactggttgtcctccgattcaggttagaatgaggaggtctgcggctaggagtcaataaagtgattggcttagtgggcgaaatattatgctttgttgtttggatatatggaggatggggattattgctaggatgaggatggatagtaatagggcaaggacgcctcctagtttgttagggacggatcggagaattgtgtaggcgaata

SEQ ID NO: 480728 - DNA, 1000 bp, Homo Sapiens; identical to SEQ ID NO: 307841

SEQ ID NO: 480729 - DNA, 1000 bp, Homo Sapiens
tttgaggtgggtaccattattctcatcatcacgggcagaactgggattctaactcggagtctggcttcagcacctgcgctcttcaccacctatacttactcttgatgattataatgacttctaataatggttaacatttacgaggtaccgggccctgtgctaaactttttatttatcgccgcttcggttaatacggataaccattatcagccatcttgcagatggaaaaactaagtcttgtcagcacgtccggcttccaggcacccgcctttaacacgtgcgataccatctggcttccagaaaagcccaacagaagtgagatgaggccgactgcctggattagttcatcgggaagcgggtgagggtaaaagcctttctcgtttccgcattttaatgacgcagaaaggtacctgtggggattatcccatctcagggcagatgaggaagccaaggttcggggcgcggagccccagaggagaacgccgaccgcggcccggacttagagattaggccgcaggggagcggggcctcgagagactacgaccattgctccacttactcaccgagaagccgtcgccgcccgtagttttcgactttcccgccaggcccgacgccgctctgacgccaccgaggcgcgccatgacgtgacgccaacttccgcgccggaagtggaaggccgggcagcccagctgaaggcaataagctgggctcaccgctgcagcagagttctgtgctagccgggcataggggcgagagaaggcccagaggcgacgtcagagagaagcaactgcgccccggtgaagagaagctcgcccatcaccggctgggagccagctttcagtgaagatggcagggccagaactgttgcttgactccaacatctgcctctgggtggtcctacccatcgttatcactcttcgtagacatgatccgccactacgtgtccatcctgctggagagcgacaagaagctcacccaggaacaagtatctgacaggtca

SEQ ID NO: 480730 - DNA, 1000 bp, Homo Sapiens
ctgtttgaggtggtttattaatgtagcaagagataatggcaccaggatgaggccaaatgactcgatttctctacaccccacattttacaggtttcagagcccaagtcaggaggtcaagtgtgcatgcaagaggtggcaggggacagatgtgctgctgttcccaggccacctgcacagctggatggtggaagcagttcacttaaaggccatgagttactcgggaggctgaggcaggaggatcacctgagcctattagttggaggctgcagtaagccacgatcatgccactgcactccagcctgggtgacagagcgagacccccactgtccctggtctcttaaaagaaaaaacaaacaaaccaaaaaacaaaacagcttatgagcacctcctactaatttcctcagcttagcacaccctgtggccgttgtccccatcgtccatggcttcatccctcaactgatgctttcctatgtggacttcccggccagtgctgtgggacctcccctgtagggctggccagcctcatgggctgggctacccgtcccactcagcagtggctgcctggcctcccctctgtccctcctgcccagctcctaatgggcctcccataaaagctgatgcgtgggagccaagccacagctcgctgacctggggaagctgacagagtgacagagggtctcaaggactctccacccacaaggcgggaatggggatgctggcaaatctggtatgaaggttgagaccccgaggagaggcaggcctgggggaccgtgcagcagctgtgcccacctaggaccacagggctggtggggctggcggcttggtagagggcaggtgcacagcaaagttttcaccggtgccggcttgttgtcttccacgctgggatttcacatgaagttctagctaattgagtataagcatttctaaagaacccccggagggttgtttttctttgtgcaaacactccttttgtgcagagggtgttctgtggcttcttggc

SEQ ID NO: 480731 - DNA, 1000 bp, Homo Sapiens
acttttatttccctttatttaaattccctgtttcctgtatttaaatttaaaaaccaaggttctaggacaggtagcaagagcaaatgactttgatcagaaagaaaagtacatctcattcacctcagcttgtgattcatgaagtgtggagtcacctgtttaaaatcctagaaacttattcaaaacttgtttatgtctgttaggctgttgaactgctttccaagcactggagctcagggatttcacctaagacttctcatctaagagtgaaagcaggggtctagctctgccgagctagagagtggcttggccttggttgggtcatgactgtaatcactgccctgggggaaaggactcccttgtgttttgtaaaataccccttgcaaaatcaggtagcaggataagtcggcctctcctagaacagatgcaacaggaatgagactgaccacgtggctgcctgttttctaaatagattgggaggcttgggtatagccagggaatttttgtccttagaaacaatcagacctagattccagtatgaggtagaggatgaggcctttgagactggcagccccaccaccaggctgtctaattgatttctgattgagacatctgtagtgatattcaaatgaggacagacatcacccaaggacaacaagcattttcacaactgattaggaggaggaaaaatggaggcaattacttgcaaactgtctgtatgactaaaaccagtggtggcagcacccaggataaccagcaagatctcacgtggtaagtggcattctcacctggatggctgctgttacatgagtgtcatctgcgtgctggctctattctagctggtgttcaacaagcagacatcttagccttaccctggcaggttccaggcaggtcagggtcttctgccactaggggtggagggatcatttttaccaggtcagccaagatagagagagaggctcccctccgcccctccaaccctgcccactgcacagaggctcct

SEQ ID NO: 480732 - DNA, 1000 bp, Homo Sapiens; identical to SEQ ID NO: 307849

SEQ ID NO: 480733 - DNA, 1000 bp, Homo Sapiens
attcttgaaattcattttatcttttaacgtagctaccaaaaaactttaaattacagatgtggcttgcattatacatctattagcactgctcagatactggggtggggcctccactctgtcctgtcttcacaccaccccgtatagggtcttacaaagattctcagggtttgaaatatccacgcagtgacagttctcaagtttcatctccagcttactatatccaggtatcccgacttcgctggtctgcacagcactgggtcccccagcctggggcgagttccgcctgctgctcacgcatcacccgggtgactggcagtgcctgtgctgtgcttcccactccctccccgagggcctcacctcccctgttctccatctgccccagccctggctcccagagtacccatcggccagaggccctttccctccatccctgggctgggctccagtgtcgggaccacccagtctaaagcaggcacccatctctgccacatcgccctggcttccatcttgtgtcttcctcaaccccaggacatgaacccgagagccgggtgccactgctggctgccccctcccctgctggtgtgcacagcctctgccatgtgactgcggctcctcccagcacaggacagtggctcactccacctgggatctgggcttggcctcgtgaggcactttggccaacagggaggtaccaaaggtgacacaagcagaggcttgccctctccaggccttctggaagcctgagcccaccacgtgcccaagcctgggctggcctgtgggacgctggacccaggatgtagtctcctttactacaccagccatgaatgagctcattaggccccaccggccccagatcacagacgcaggagggacacaggcacagccagcagcagaagcatcagctgagccagcccacccctggcctacagaacatgccactgttccagcctctaagtttggggctggtttgttccttggccaaagccaactcgggttgttt

SEQ ID NO: 480734 - DNA, 1000 bp, Homo Sapiens
caaatgcaaacttagctttttattataatactcctttttcttacaattcatgcctgactgtagttttaaacttggaggttaggacagagacctagctgtcttgacacaggtctccactgtcacagaagcagctcaccctgcagaagcccctgactagcctcaggagactgtgcacactccctgctctgccctatcaatgtgtgtctgtgggcaagctcttcccctctctgggtctcagctctgtcatctatcaagtggaggctccgggccactggatataaggcagccattcacccagaacttttcaaggactcaggatacaactgaggcaaggccaggcctggcttcacagagctccctggtccagtggagaagagccaggcagaagtgccacccaggagacacagaagaggctcccaagctgaggctgtggccagggagggcttccctgaggaagtagcccctgggttaggtttgaagctggcccagcagagcatattctgagactctccaagctcttgatgcctgggccagttccccagagccagagctgcggttgtatggtctgagggtatgttagcaccagcctgggccccagcaacctagcatctctgcccgcaggctcctgctgctgcttcaaagctgtatgagctacttggagaaccttggctcagagcagatgatgccccctgcacaggctgcggggccctgcatgtccgtggggctcacggtgcggcgcttctgggacagcctgctgaggctgggcacgctccaccagcagccactcccccaggtgggtcccagcctctgtctcaggtgggtcagcctcagcctctatctccccactgtggtggccttcacacctcgccccagctctggcttcctagcctaccactatgtgcaccacagcctttactggctcccaccgccctcccaatcaagccccacacagtgtggcggttaagaacgcaggccttggggatcatgccttgctccctgg

SEQ ID NO: 480735 - DNA, 1000 bp, Homo Sapiens; identical to SEQ ID NO: 307850

SEQ ID NO: 480736 - DNA, 1000 bp, Homo Sapiens
aaagacagagccttactctgtgcccaggttggagtgcagtggtgctatctcggctcactgtaacctccgcctcccgggttcaagcaattctcatgtgtcagcctcctgagtagctgggattacaagtgtccaccaccatgtccagttaatttttttagtagagatggggattcaccatgttggccaggctggtcttgaactcctggcctcaagtgatccgcccaccctggcctcccaaagtgttgggattacaggcacaaacgaccgctcccggcctttttttttttttttttttgagacagtgtcgctctcattctgtcacccattctgtaatacagtggcatgatcatagctcactgcagccagaactcctgagctcaagcaatcctcctgcctcagtctccagaatagctgggaccacaggtgttccccacacccagctttttttgagacggagtctcgcgctgtcacccaggctggagtacagtggcacgatctcggctcactgcaacctccacctcctgggttcaggcaattctcatgcctcagcctcccaagtagctaggattacaggcaccatcaccatgccctgcccagctaattttttttttttttgagactgagtcttgctctgtcgcccaggctggagtgcagtggcaggtgctgaattccactctgttaatgatctcaataaacctctgcaacggttcattatccctctgtgaaaactaagtctcaacaagataccacaaccaagggcatttacctggcaagcagtgcattcaggattaaaagttggctttagctttatgtctttccactatacccatggccacagaaagaaacatgaaaaggtgggagcgacctagagccctggcctgggagttccaatccctgcatgtgccgcgtgacctttcttgggcaaaacccaccagctccgtgcttgtgcatctgcgaggccctgctgggaaggagtcacctgacaccttgtcctgtacac

SEQ ID NO: 480737 - DNA, 561 bp, Homo Sapiens
ctgcaggaaagacaaatcctagggtcccaagactgggattagaaactgtcgtgtgcacttcatctcctctcacttcctaccacctccctatatccactctgtggaacagccaccttgggaaacgccacctccccacaatcactctgggcttttttatttctgggcgctggatcctgctgattcccctaccaactgttattgccccagtttatcccaaagtctatgcatctttcaaagtgtggatcaaaaccacttcctccaggaagtcttccttgacccaacccacccttcaactagaaaggatccctctccccaggctcccatagaaattgatcccagcactcatcgttctatttggcatgggagctggctgtttggagtcctcatccttccaatattgtgatcccctagaaggaaggggccaggtctattctgtctctgggaacatagggaagaaagagtatggggctgaggtcatgagtgcttattggatgagacagacacattgaatccccctccagttaccctttcccagtatccccagacacaaacacacagtac

SEQ ID NO: 480738 - DNA, 1000 bp, Homo Sapiens; identical to SEQ ID NO: 307852

SEQ ID NO: 480739 - DNA, 1000 bp, Homo Sapiens
tttggaggttgagcagaggttactgagccagaagttcaagccaggctggcacctaaggagacttgtctcacttttttttgtttttcctggagacaaggttccctcttgtgcccaggctgaggtgcaatggcacgacctcggctcactgcaacctcacgcttcgggtccaagtgattctcctgctacagctctggcatagctgggcttacagatgcacaacaccacacccagctattttttttgtatttttagtagaaacgggtttcaccatgttggccagcctggcctcgaactcctgacctcaggtgatccatctgccttggcctcccaaagtgctgagattacaaaaaaaattttaaaaaatgttagcgaggcatggtggcgcatgcctgtggtcccagctattctggaggctgaggtgggaggatcacttgagcccaggagctcgaggatgcagtaagcagtaatcatgccactgcaactccagcctcagcaacagagtgagaccttgtctaaaaaaataataataaacaaacctgaagaaaactagtagtaagaaaaaatactcttcccttgaagaaaaaatttgcgtccataatctcatccctaaagaaccttttatactacaattttggcccttctctatctgatgacacgtgatccagcaagagaaagaatgttttcaaacatcatgaaactgggatttcctcccaagagcaaatttcagcactgcctgagcatcttggttttaggcttgtgttttgtaaacctatgtgtttgtaagagattttcaacatcttctcatgtcttctcacctatactccctagctaagaagttgggggtatggccaggcacagtggctcatgcttgtaatcccagaacttcaagagtccaaggtgggcagatcacttgaggtcaggagttcaagaccagcctggccaacatggtgaaactctgtctctattaaaaatacaaaaatcagctgggcgcagtggtgca

SEQ ID NO: 480740 - DNA, 1000 bp, Homo Sapiens
tcaattttaattagaatatggtttcctaccaatgtaagaattgtcaagtttattatgactactgattttatactcagtaaataaatttatgtaaacagtgtagggctaattaacgaactgagggaaattttttcatatataagctgataaaacattatatatgtaactaatttttattttctttttttaaacaccaggttgtcaccaggctggagtgcattggtacagtcacggttcactgcagcctccacctcctgggctcaagggatcctcctatctcagcctcccaagtagctgggtctacaggtatactctaccaccccagcttaatcatttttaatattgcgttttcttgggggtaagggaaataaggagttaaatgtaaaacagttttacttataaaaggctaagaatatttggtaagaacttggaataatcaaggaagcaaaacaaagtagattttataattttgctggatagttttttttgttttttgtttttttttcttttttggagatggagtctcactctgtcacccaggctggagtacagtggtgtgatcttggcttactgcaggctccacctcctgggttcaagcaattctcctgcctcagcctcccaagtagctgggattacaggtgtgcaccaccacacctggctaattttttatctttttagtagagacggggtttcgccacgttggccaggctggtcttgaactcctgacctcaggtgatccaccctcctcagcctcccaaattgctgggattacaggcatgagccactgcgcccggctgatttattttgttaaataagttaatgtgcagatctgaagttaggtaattatacacaggcattttcctgggacaaacttcaagtgccaggtacttgcactcttaatactgtcttaccatccagttataactggacaaaatatacacttgagacacggaaaaggtcttagccttaaacatgatgacattgtaagcttcttacagca

SEQ ID NO: 480741 - DNA, 1000 bp, Homo Sapiens; identical to SEQ ID NO: 307853

SEQ ID NO: 480742 - DNA, 1000 bp, Homo Sapiens
ttttttttttttttttttttgagacggagtcccgctctttagcccaggccggattgcagtggcacaatcttggctcactgcaagccccgcctcccaggttcacgccattctcctgcctcagcctcccgagtagctgggactacaggcgcccgccaccgcgcccggctaattttttttgtatttttagtagagacggggtttcaccgtgttagccaagatggtctcgatctcctgaccttgtgatccgcccgcctcggcctcccaaagtgctgggattacaggcgtgagccaccgcgcccagcccatctggattcttatttaaagtgtaaactaattttgttctttctactgcataggaaggtttataccactttatgcttagcaagtaattaaatttatatgtcagtttaaggccagtctccactattctaagtcctgctcctctaccccatcatcttatataggaaccttcatctttcaaaggtttatattaaaaaacctaagacaattgaaatcaaccctataaaaattatgctacaattattttaaaccctaacataatagtattatctttgatatcaatctgaaaatcaatttatgtcttatcttttgatagatattcattagtatgttctatcctattttgttacgtacattttggaaaagtttctcaatgttagaataatatttatacatactaactcctctacttaatccatttattcatcttatttattgtgtaatctattctaaaaatcgcattcgataatggtaatatattagcaaagaagacaaatactgccattgcccccttggacttttcaatctggtagtaataagtataagagttttctgaatgttataatctgatataatatacttgagaagatgtaatagcagagcaacccagcactgaaaaacttttgtatgagctgaaatgagattaataactaggatgttgagaaataataaagtctgtgaggtcaacttaacttggtca

SEQ ID NO: 480743 - DNA, 1000 bp, Homo Sapiens
gtgacactatagaaggatcacgaggtcaggagatcgagaccatcctggctaacacggagaaaccccgtctctaccaaaaatacaaaaaattagccaggcgtggtggtgggcgcctgtagtcccagctactcgggaggctgaagcaggagaatggcgtgaatctgggaggtggagcttgcagtgacccaagatcatgccactgcactccagcctgggcgacagagcgagactgtctccaagaaaaagaaaattgttaaaattgtagattttatgtctgtttttttttgtttgtttttttttttttttgcttttgagagtctcgctgtcgcccaggctggagtgcagtggtctgacctcgcctcattgcaacctctgcctctcaggttcaagagattctcgtgtctcagccacccaagtagctgggactacaggcgtgtgccaccccaagtagctgggactacaggcgtgtgccaccacgcctggctaatttttgtatttttagtagagtcggtttttcaccatgttggccagcctgttctcgaactcctgacctcaggtgatccacctgcctcggcctcccaaagtgctgggatcacatgtgcgagctaccgctcctggccactactaggagcttttgatgccccaaggtttgggggctggacatgccaccccactcttcctaatgctctcattttctttagctatgaggtgcccacctggcagcagctacagcccctgcagcagcccctgcccagacacctgcagcagcataaacaacccgagggactgccccaaagcactgccctgtgctgagagctgtgaatgtcagaaaggccacatcttgagtggaacctcctgcgtgccccttggccagtgtggctgcactgacccagcgggctcctaccacccggtgagaggccagctaggaggggccccgccctttccaggcccacatgtttggggtcagggcaagctcaggagaggcaggaggaaggctcag

SEQ ID NO: 480744 - DNA, 1000 bp, Homo Sapiens
gatcaggagttcgagaccagtttgggcaacatggtaaaaccccatctctacaaaaattagaaaaatcagccaggcatggtggcctgcatatgttgtcccaaggtgggaggatcgattgagcctgggaggttgaggctgcagtaagccaagatggtgccactgcactccagcctgggcgacagagtgagactgcaaactctgtccctgggttcaagcgattttccagcctcagcctcctgagtagctgggattacagttgcccgccaccatgcctggctaatttttgtatttttagtagagacaggatttcaccatgttggccaggctggtctcaaactcctgacctcagatgatccacctgccttggcctcccgaagtgctggaattacaggggtgaggcatcgtgcccggccaggagttctttatatattctatatataaatgcttcaacagctatatgttttgcaaatattttctctcattctgtgggttgtcttttcaattttttttttttttttgagacagagtctcactctgtagcccaggctggagtgcaacagcagggtctcagctcactgcaacccctgcctcctgagttcaagtgattctcatgcctcagcctcctgagtagctgggattacagcctcctgatcagctgagattacagtctcctgagcagctgaggctagccactacattcagctagtttttgtatatttagtagagatgaggtttcactatgttgtccaggctggtctcaaactcctgacctcaagtgatccgcctgccttggcgttccaaagtgctgggattacaggcgtgagcctctgtgcttggcctcctttcaatttcttgatagtgtcctttgatgagacctgggcctttttcaaataacctaagcacttctgggaagcttatcccctcccgggctgtgaatgaagaaatcaaggccttgtgagaagtcacgtgttctgccttttgagaatgggacaggagggat

SEQ ID NO: 480745 - DNA, 1000 bp, Homo Sapiens
gaattccacatcacctccgtcccccaagccctgggtggctctgaccccaacgaacacactccttccagcctggagggctctggctggccacaatgacctcatagcaacagccattggacactcggggcaatttcatgggagatatttgttctttggtcttgatgcagagagaattttttcctctctccctgtctccatggaaaccccagctacactgttggcgatcccccttcccaccccatgcttttcatgcccacagcggatggtggcagagctctgggcaggaggaactggggccagggttaagcgcggggcatggggaactgtccctgagcggggatgaaaggagcgcgggtccgcttgctccctgtccacccactcactggagctcatccctttagtctccctccctgcagcaaaccttccgcccctacccagggagcgccctgagcgcagatccagtcaaggagaaacagacaggtcaccagcggttaccaccccttcctccttaggctagacacggggagctggggggccgttgtcttctttaaggtctggacggagtttcttcctgccccggggaaaaaccaaggcccggccagcgccagcgccagccccgggccctgggagaccaggcgtcctggtcccttccttctgtctccggctcccgccccccaagcagaaacaggtccctgcacgcctccagcccagcccgcagcgcggcgcagctcggcgcagctcggcgctgggagctcgctccggacttctcgggattaacctgctattatgtcccggagcccttccctgcaatgggcttcctcagcgacctgtcagcccggctggactgcaacccgcgtccggcgcccctcccgggccaccgccccgcgctcgcacccctggcgccctcgagagccccgagccgcctaccggtgcggacgccgccacagccacccctgacgcctctgggcagggagccggacccgggcaggaggggaccccg

SEQ ID NO: 480746 - DNA, 1000 bp, Homo Sapiens; identical to SEQ ID NO: 307854

SEQ ID NO: 480747 - DNA, 1000 bp, Homo Sapiens; identical to SEQ ID NO: 307855

SEQ ID NO: 480748 - DNA, 1000 bp, Homo Sapiens; identical to SEQ ID NO: 119872

SEQ ID NO: 480749 - DNA, 1000 bp, Homo Sapiens
cgactggcgatagctgtaggaagtcatggcgaggcggagcacggacggagcaaccctggtctcagaagctgcgattcgcgggaggagcggcgaggccctcacctggcgccttttatgcccgcggccggtggaggggggaagggaggaatggtgtcaggggcggatatctgagccctgaggaatttgcaggctcctgagagcaaatatgggctctctccccattggtcaattccctcccctcccagagaccagaggcccctgccctccagaggtgccccgccccggtccgcgcagaagctccgacccgcactcccccactctctctctgcagaccctgttctggcctttcccccgtcagggacatacttggacacccctgtccctggaagccacattctgagcctcaccctttaagatcaacccagagtttgacaccactgggaattacagtccctctggggtcatattcctacacacccctgacccagtgattttgtttttgtttttttggagacgagtctctgtcgcccagactggagtgcagtggtgtgatctcggcccactgcagcctccatctcccgggttcaagcgattctcctgcctcagcctccggagtagctggggttacaggcacgcgccaccacgcccagctaatttttgtatttttagtagagacagggtttcaccatgttgaccaggctggtctcaaactcctgacctcaagtgatccacccgcctgggccgtccaaagtgctgggattacaggcgtgagcccctgcgcccagccccagtgattaaccattcagagtgctccctgttaagagccccttgcctgcgatcctaaccagcccgccccccacaaagtgcattcacagattcctgccctccactggagattacagcctctcagaaccagcttcttgggaacacccatgcccaactccccttttgtcccctctgacaaaggcaccagttccggatgagggcacatccgggcatt

SEQ ID NO: 480750 - DNA, 1000 bp, Homo Sapiens
aaagttcctggacgcagggctgatggcttgtggtctgctcaggccccagacttcaccttatgcagacagctctatggtcattaatactgaaggcatgtgtgctttttttgtgttttgtgtttttcttttaataatcagacaatagtttacatctgtgcattggcgaggagtcatgaagaagagcatccaaacaaagacgagagaagccagactggcaagtgggctggctggaaaagaggagagaagccagacacagtactttgtctttagtctccatggataaaaatgcttaaagttcaccgtggggagaagggaggggagggaaaggtcttgaaggattcccagtggatacaaacaatggtcatttttgaagccagtttgcatttagtctcacactctcttgtcttaaaacacttctgaagcacaaggcttctgagagagtagggcagttgcaggagcagcaggagggggctggggtgggactggggtgtagggagaggcctgaaggaccctcctggccccacattcctcaaggcacctaacaaggaagcagaaccctacctggctagaggtccatgttccagaatcgatgggttctactgctgtgcccagtcaacaggatacctaagctttgactttgggtcactaaagattgtttctagacaaaagccctagctcacaagtctgggggcagcttgggactttgtttaggccaggtttaccagcttggtgtgagaatagcatcagatattggttacagtggtgggatacattccaagactcccagtggatgcctgaaacctcgagtagtactgaccctacatatacatgctttttccatgtgagaactgagatgactactacgtgactaagggtggggagtttctacagtgtggatatgctagacaaaggcatgattcacgacctgggcaggatgacgagagatttcatcatgctgctcagaatggcacgcaatttaaaatttatggattgtttattt

SEQ ID NO: 480751 - DNA, 1000 bp, Homo Sapiens; identical to SEQ ID NO: 307857

SEQ ID NO: 480752 - DNA, 1000 bp, Homo Sapiens; identical to SEQ ID NO: 307859

SEQ ID NO: 480753 - DNA, 1000 bp, Homo Sapiens; identical to SEQ ID NO: 307860

SEQ ID NO: 480754 - DNA, 1000 bp, Homo Sapiens; identical to SEQ ID NO: 307861

SEQ ID NO: 480755 - DNA, 1000 bp, Homo Sapiens
aattctaaggtcatgacaatatcagttgtaaatgataaatgaatttttatttaggaagagttaaaatcatatttgaaataaatctaatcattatgatttgatggcttttattgactatgtatattcacatccttcttaatgctttcacataatacattttggttatctcctaagcaaaaaagtaaattacattttatgataattacaagggaaatgattattccagatcatagtttttcagaaatgtttattaaaacattttattctattttatattaaatataattatgatgaatatttagatataccattcaaataaggttcttacattttttaaactcaacaatgtcaaaagccactcaattgtcaagttacagaatacttaagcacattttctaaatcaaatttttattactcctgtgaaaagcatcattagcaaatgtttcataatacagttttcagaaaagagtctcttttaatcttaccttctgctacacaaatagcccataacataaggcaaataatctttgctagaagtctcattttttggatcttttaagaggacatttaccagctaactctgttcacaacgtccagttctcctcttccaagaattgtgattagtgcaggaaagaacttgctgcaaaaggaagttgaaactagatgctccgcctatcagaaacttttgcaaagtaaataaaaaatcaaccacaagccacaagcccagaaatgccagaagttaaacccaattctcactgcactcccactaaatgttaatgctgtgaccggctcttggactttttcttattaagctagggaaattctccgttggaaaatgttcatgttcttggtatgtgcaaatcagcagctggtaatatcctctggatttcataaacccttcaattattcaaactctattcgggtctattgtgtataaacctcagaacaggaaataagagaaactttaaaagaaatcacatacaaaactttggtttaggca

SEQ ID NO: 480756 - DNA, 1000 bp, Homo Sapiens; identical to SEQ ID NO: 307862

SEQ ID NO: 480757 - DNA, 1000 bp, Homo Sapiens; identical to SEQ ID NO: 307863

SEQ ID NO: 480758 - DNA, 1000 bp, Homo Sapiens; identical to SEQ ID NO: 307864
  misc_feature (12)..(12): n is a, c, g, or t
  misc_feature (24)..(24): n is a, c, g, or t
  misc_feature (87)..(87): n is a, c, g, or t

SEQ ID NO: 480759 - DNA, 1000 bp, Homo Sapiens
acatgaaaacccagtgcagtctgatgtcttcagatgttctctaaaattctgtatttggtcagagctgggagtgagatcagggtgcttgcacatttctgctccactgctcccgattctgctttgctgccttggagggagagtagatttagatctgggggctggtgggggccatagccttggcagcttgctgggctaaccagtacttatatcttttggtcttgggcttctcaaagttcacgacagacataggcactctcacagtatcaagcccatttaccgtcacctcacaccaatactcgccccaccgtgtgataggctctgctggtaactttaatgtatgtggggcaaccacaacaccaagattcttaaagaagtggcgggcaactatttcagggttcagctcccatttgacattgttcttcatccctacctccaggcgacagctttttagaaatttcactgtcgcctcacctgccttggtctggatcttctctaattttccttcttgtctcagcaatttctcctcttcaaacagcttcttgttttcaggggatgcatatacagccagtccctgaggaaggagtcgattccggcctaaagatttcttcactgagaccaggtcaccccggactccaacattctccaccgactgcgtcaggatgagctccaggttttctttgggccgatgcttcgtgtcctccaccagcttatagacgcgatgtcgccggtgcaggcgcggcttccggccctccccggccagcggtaccttccaccagcgctccacgatgaccgtgccccgattttgagaaaggctgaagttgcaggccaggtcaggggcgttcccttcatgtcgcggccgcagtagctcctggacgcctccccgaagcagccgtccagcgcccgcccgcagcagagctctgcccggggccgtgacaacgggcgccgccatgtacacaggcacagatcctcggccgattcaaacccagcctcgtacctagcc

SEQ ID NO: 480760 - DNA, 132 bp, Homo Sapiens
ctctaatgtggttccagttgagtcaccatatttcttgtgaacctccaaagcactggaagacttctgggcctcgcgtggctgcaggtgaaacatacagccaatcactccaccctggagtcttggtttcctccc

SEQ ID NO: 480761 - DNA, 1000 bp, Homo Sapiens; identical to SEQ ID NO: 307865

SEQ ID NO: 480762 - DNA, 1000 bp, Homo Sapiens
ttttggaaaaaaccttttaattaggagtttcttaccaagttatgatttaatatttatcagatgtgtaaatatacatgatagcaatttttaaaacttgtaaatagttggccttacaaaattacaacacactgtaaataaatccttcccacattttatacaaactacatgattttgatatacaaagattctgtttttattacactgacaatgtacaacaaagactatttacaatgcaaaaagtatataaaccacaatttaacagtctgctactggcagccactatagtttaggaggtagctttaattaaacgaaatgaacagaagccacatttcccaacttgtgttctaaaaataatttacataagataaaaattcattatatgcacagtatgtacagtttaattattaaactgcaatctagctggatttttttagtatattcagaataactaatatggcagtgggtttgctattgatttagcacactgttcaaaaaacatattgaacaattataactttaagactccacccagtaataggtctaaagcccatagatgggaatcaagtaaaatttttaatttttaaagacacaggactaagctttattctttcttcttctatttttattaataacatattatcttgtttaaccagagttcaacctctgagctattgaataggctcttttataaaaaatagtatggggaagatgtatggaaatttccatttaatagcacaggttcaagataatccagctcactaagaaataaacataagtacttcgtgtcataattactccccgtttcgtctaattaaatgcaagtattgaccacagtttactttctatataatccaaactattgctaggtgacatcccagcaaattggaaaatattagtagagccaacgatattaggaagtattcattaatgagaacattacatgaagccaccaaatccctcagatactattaaacctccacattagttagtagtttagcca

SEQ ID NO: 480763 - DNA, 495 bp, Homo Sapiens
cgctgctgggatcgctggtgccgccgccgccgccgccaggcgcccgctcgcatgtggctcgcgccgcgtctcaggccgcccggcggatcccgggcccgctccaaagccgccccgccccgccccgccccgcccccgcccggcgggtcccacgccccgcccccgcgtgacgctacggccccgcccgcccgccgcggacaagtcaggacttgcaggcgcgcgccgcgcccccccctacctccgcgccgggggtttccctgcagcgggggacggggcagggcctagcccaaggcaaggaggacccaggcgctgtgcggcggggtgtggggagatcgcccagacaccgggacagtcggacacacacactgactgggacccacagatccacacccccagcgatgcgtacacagaccgaccgacgggcgttccagggtccacaaagtcacgtgcaggcagagcccagaggatgtactcacagacacaaggccacagtctcgc

SEQ ID NO: 480764 - DNA, 1000 bp, Homo Sapiens; identical to SEQ ID NO: 307866

SEQ ID NO: 480765 - DNA, 1000 bp, Homo Sapiens; identical to SEQ ID NO: 119873

SEQ ID NO: 480766 - DNA, 1000 bp, Homo Sapiens
gccttgcctgccaccatgtaagatgtgccttttgccttctgccatgattgtgaggcctccccaaccacgtggaactatgagtccattaaacctcttttttttttttttaagataaactacccagtctcaggtatgacttaatcagcagcatgaaaatggactaatacagatacttttcaaaaagattagggattaattaattaccaatacctactcttggagatacgattttcttttttcttgatagggcaaatccagtggattccaattgttctttatagagaaaatgtgacttctgtcaactccacttaattaagagtttaccttggattttaatgttgggagcaagcagagaaaaaaagaacaaacatcctccaaagggaacaagaatgcattataaactgagtgaaaagtcagagacaaatgcccaatgtgatcctcaagataaaaacgaaaatggccattgttgatcaaatggcattagttcactaagaaaatggtcctggaaattaattttgctaaaatgtctttgatgaaagcaaagtaagtacagaatgagaataacaaagagttggagaataatatattaattatcacagtagataaatttctggaaatctgactggatgaacaaagttaaatttccataagaacatacttcaggaagtaatatcacaaagatgtgtctgtatatacatttataatatatgtccatttgcaataaacaatatgtctgaagcttcctgaaggtaatggctaagctgatcctatttcatgtggtcttctcttgtttagcaggtggaaatagacaatacatagtcattcagcaggctgttgttttcatatgatacaaagtaaagttgatataactgtttagatggaacaatcacagcatggcttactttaagagaaaacccaagcttcccgagtttatatatgatttattttttcttcatctatattaagcaatagtaaaactaagccttgatagggggacact

SEQ ID NO: 480767 - DNA, 1000 bp, Homo Sapiens
  misc_feature (15)..(16): n is a, c, g, or t
  misc_feature (91)..(91): n is a, c, g, or t
  misc_feature (140)..(140): n is a, c, g, or t
tttttttgttttttnnaaggcaaaagaattcttagtcccataaacccaagtgccatgaaggctccaggcctgtaaatcttttttttacatncagtgttggcctgtgtttctttccctattgtttaggaaatatatttccnttaaaacatatgaccttatgctaaaacagtatttctgatttcaatatcaacctattttctgttctgtataaaaataactttatttataaaatatttttaagtactttaaaacatatatgttcaatgatctattccaataacccaaagtctgcacataataaatcattccagaaaaaattactatatttctctaacatatagactaggcttaattgttcttctttatctaatattgtaattaggtagtagcatgattaaaagatctttatatctgcttaaaaccctaaatttctaactatgtttcctaacattttaaatacaattacaatttttatttttttagatgttgagatattgacggttcttagctctccaattatatgccacctctccttgaacatggaataatcaatagtctaagttggccccaaagactacccctccagcaatagtttcgcttctacataattccagggaatgtcactataatagattttactctcattatttggtcatgttacatagcacacttgaccttaaaatagagcacaatttaatcacatgagcctttctataagcagagagtttgtctagttgaaagcagaagggaaatcagagaaatctgaggtgtgatatggattcaatatgagggcagttctttattacagaaacggaaggggcctgtggcataatctgatagcagcctggaggaggtgaggtcactcccagctgactgatagtgaggcaagagggacctcaatcttacaaccacaaggaaacaaatgctgccaacactctgaggggcctttgagccaatctttttgtagtcaggcctccagatgaggatgcagttggccagc

SEQ ID NO: 480768 - DNA, 1000 bp, Homo Sapiens
  misc_feature (40)..(40): n is a, c, g, or t
gcctttgcctgcccccatgtaagatgtgccttttgccttntgccatgattgtggggcctccccacccacatggaactatgagtccattaaccctctttttttttttttttttttaagataaattacccagtctcaggtatgacttaatcagcagcatgaaaatggactgatacagatacttttcaaaaagattagggattaattaattaccaatacctactcttggagatatgattttcttttttcttgatagggcaaatccagtggattccaattgttctttatagagaaaatgtgacttctgtcaactccacttaattaagagtttaccttggattttaatgttgggagcgggcagagaaaaaaagaacaaacatcctccaaagggaacaagaatgcattataaactgagtgaaaagtcagagacaaatgcccaatgtgatcctcgagataaaaacgaaaatggccattggtgatcaaatggcattagttcactaagaaaatggtcctggaaattaattttgctaaaatgtctttgatgaaagcaaagtaagtacagaatgagaaaaacaaagagttggagaataagatattaattgtcacagtagatacatttctggaaatctgactggatgaacaaagttaaatttccataaaaaacatacttcaggaagtaatatcacaaagatgtgtctgtatatacatttataatatatgtccatttgcaataaacaatatgtctgaagcttcctgaaggtaatggctaagctgatcctatttcatgtggtcttctcttgtttagcaggtggaaatagacaatacatagtcattcagcaggctgttgttttcatatgatacaaagtaaagttgatataactgtttagatggaacaatcacagcatggcttactttaagagaaaacccaagcttcccgagtttagtatatgatttattttttcttcatctatattaagcaatagtaaaactaagccttgatagg

SEQ ID NO: 480769 - DNA, 1000 bp, Homo Sapiens
gaggccctcagcaaactcagatttggagtcaaacagacctgtgttcaaaccccaaagctggggaaactccaggaagtaactattcctgtgagcctcagttttctcatctgcaaaactggaagaaaatagccacaacatcgtgctgtggtgaagattcaataaaatgatgtgtacaatgctggatgcaggagtttgatgaatattcacggagtgagtgaatgaatgaatgaataaagattcagcttatagagggagaaagacccctaggttttgccagtcagatttttgtttgtttgtttatttgttttgagacggagtcggactctccctctgtcgcccaggctggagtgcagtggcacggtctcggctcactgcaacctctgcttcccgggttcaagcaattctcctgactcagcctcccgatagctgggactataggcgcatgccaccatgcccagctaattttttgtatttttagtagagatggggtttcaccgtgttagccaggctggtctcgatctcctgacctcgtgatccgcccacctatggcctcccaaagtgctgggattatcagcatgagccactgcgcccggccttgccagtcatttttaagatacaagaggttgtcctggtgtggtggctcacacctgtaatctcagcagtttgggaggctggggtgggaggatcgcttgagtccacgagttcaaggccagcctgggcaatatagggagaccccatctctataaaaaataagaaattagccagacatgggatatggtagtgcaaggtcagggtctcaagactatcctggctaacacggtgaaaccctgtctctactaaaaatacaaaaaattagccaggcatggtggcgggcgcctgtagtcccagctattcagaggctgaggcaggagaatagcatgaacccgggaggcggagcttgcagtgagccgagattgcgccactgcactccaggccgggcaacagagtgagactccatcta

SEQ ID NO: 480770 - DNA, 1000 bp, Homo Sapiens
gtgaaatcatcaccttctaagacttattctccctgaaaaatacttctcttgcttaccctaaaaagtagcacaaacatgtgacttggtttgtgaaagacaaagctgccagacatattgaaccactgatctcagaaaactaacagctgggaaacaaaatcatccctgccctatggtaaactctcctctagggtcaattaaatgactccctagaatgctaatgcacacatattatgtgactggtatcatactgaaatctatattgaaagtcatgaagcaggtatcttgagcgaaggcttctaagaattttcaaaagctgatatgcaaacaaagtattcagtcatgatgatgttacaggcagcgagcacacatcccagttcaaactgagtcggtcccagttcagacctgtttcccagtgtagttattattaagaccccctttttctcactctcaaaagccccaatgtggatggtaagttacacagtcaacttgatggaatgtacatttgcctagaaaggtaaaaggggcatagaaatttcattcatccctaagaaaaacttagtcctcaggatcctgattccagatacaagagaatttgaagcacataaaataaaagcactatttatttatttacctatttatttatttattaagtagagacagggtcttgctatgttgcccaggctgttctccaaccactgggctcaagcaatcctcctgcctcaccctcctaaagtgctgggattacaggtgttaagccagggtgccccgctgaaacaaactatttttaagcgtttagtggaaaggcacaaaacgttttgtcgaaaatgattaaaatctatgtcatcattaaatattaattgtacttaattgtaacattttaagggaaatgttatgaatgacactaggctatgataacctagttcatcttcttgccatttttccatatatgaaacttcagaaccaatcattagaagatcactaagaaaaaaaaaatcgccaa

SEQ ID NO: 480771 - DNA, 535 bp, Homo Sapiens
aggatgaataaatttagaaatctaaagtacagcatgaggactgtagttgataatactgtattggatactgaaacttggctaagaggatagattttaggtgtgcttgctatgcacacaaaaataggtaacaatgtgagctaatggatgtgttaatttgcttgactgtagtaatcatttcactatgtgtatgtgtatatatatatatcaaaacatcatgttgtacatcataaacatataaaacaataaaaacagaaaaactagcaaagagttgaaaatagtcagggacctctattgttgcatattgcatatgcaggaagttacttactttaccaccaccaaatcccagatccatgtctcagggaagtactttcgtacggtctccgtgtgaggctcttcaacatgcaccaggcgtgcatggcctcttcccattacatctgactctgagtgaggaagaagacattacaataaacatacagataaagcttatgagagaatgtaatagttgccaccaaaaaaaaaaaacaaaaaacaaatc

SEQ ID NO: 480772 - DNA, 1000 bp, Homo Sapiens; identical to SEQ ID NO: 119874

SEQ ID NO: 480773 - DNA, 1000 bp, Homo Sapiens
taggatccttgttaggtaggagcagaaagcttagaaaagtggtctcctgcagttacgtggcaaacacatcatgtaagtgataaattgggtatgcagttgaggagatttccaagtaaaatgttgaggatgctgcctggtttcttcttactgcttataatatagtgtgagagaagagagataaattgagaaagagactggtttttaaactgttaaaattgaatcaggacttgatgattttgaaaattgtcagtctccccacatggaaaaagatgctgaaattaacaaatggcttctgagcatgtggcatagggtgtaactgtacagtcttttgtgattatgcataaagatcaaaggatgggagtagcaatgagtcacacagaggtctgttgcaagagattacaagggtgtaccatgcagaacctctccaccaaaccttagggcccttgggaagcttcagtgagttaccctgggggccatcttggcaggagctgaaggtagaaaggtagagtttatctctaaaagattcatgggtatggctcttgacaaatcgactatgagccccactgaaacccacagaggacaggcaaagggtttgggaaagctgtttcacccacagtgctggcagattggtctgtaggggacagagtgcaaaatgaaagaagactgtcagagaccccaaactctgctgtcaagaagaaggctgataaaactacttggctgcaaacacgtggatctttcgtgagaaaagaaggatgacccagaggcagaagcccagaaggcagagccaagagacatggaatcttcccacatcttaaaacctgtttagggaacaccagcgtctgtccagctggatttcagaaccaccattccttcatccctcccctgctgcctctttctgaacagcaatgtctcaagctttacccaccattgtgtgttgcatatgtagggggcagatagcttgtatctttagttttccagatcagaggaacatccaaagaaa

SEQ ID NO: 480774 - DNA, 1000 bp, Homo Sapiens
tggaaccgggcaggaccctggaggaaggtttggatcctaagggcagaatctggccagccacaggggccaagccttggcctctggccttaggccctgggccaggtgccaggccaaccaaggccattcggcttctcacctccagtgggtgctgaccgtaggggctaggctttggttaccactcatttttaccccccattcctgccccacttcccataaaagacacttccaaaatgctgatgcttccagagaataagaaacattctgaaaaggaaaaaacaaaaaggcctgctggcatataaacttcaaaagaaaaaaaaggtacaataaggagaccttatctattccttatccattgagtagttgtagtttttaaataactataagaacacttggtcttatgtttataacattacagtaacattaattaacacaaattaacataaacaaaattaattaaccataattaaacataaacactaaacaatgataaacatttagttgtagtcaaaaatcatcatacctcagtaaaaacatactttttttttttttaaagaaaaactccaattactctgggatattcttaatccttattttagtagctgagtggaaggatcttttccattaaaataaaattctgtcccaaaaatagctaaaatggaaactgaaatatatgaaccatttgtgacactataaaaactacttgtcagagccaactcagtttctcatatctcatatttttaatattgacttcaggccttaaaatttctatttatctttctttaaaaatataggttctatgccagggagaacatgaacatttcctttgcaagtagcaaaacacaagtaaactttcacgacagctgcaccggcataattcatcttaaaatatttaaaacatcatgcaaatttaacagcatgggtacttttattatacagaatttaataattaacaaaaacaacttccattctcatggcacttttataagaggtaaggaaagaa

SEQ ID NO: 480775 - DNA, 1000 bp, Homo Sapiens; identical to SEQ ID NO: 119875

SEQ ID NO: 480776 - DNA, 1000 bp, Homo Sapiens; identical to SEQ ID NO: 307874

SEQ ID NO: 480777 - DNA, 1000 bp, Homo Sapiens; identical to SEQ ID NO: 307875

SEQ ID NO: 480778 - DNA, 1000 bp, Homo Sapiens; identical to SEQ ID NO: 307876

SEQ ID NO: 480779 - DNA, 1000 bp, Homo Sapiens; identical to SEQ ID NO: 119876

SEQ ID NO: 480780 - DNA, 1000 bp, Homo Sapiens; identical to SEQ ID NO: 119877

SEQ ID NO: 480781 - DNA, 1000 bp, Homo Sapiens
ggatcaatacttacgtcttgatgttctcatggtacaccttggtatctgatggctggttatacagtggctataaaagaaatcaaatatttatgtataaaatgttgtacatatgtctatgaagagacaaagaaacataattttaatgtaagcacaggtaaagtactaatggatctacacaataacatgccctaccaaaacctccaaacttttatttttttatttacttatttttttaaattatactttaagttctagggtacacgtgcacaacgtgcaggtttgttacatatgtatacatgtgctgtgttggtttgctgcaccaattaactcatcacttacattacgtatttctcctaatgctatccctcccccatgccccaccccctgacaggccccggtgtgtgatgttccccaccctgtgtccaagtgttctcattgttcaattcccatctatgagtgggaacatgcagtgtttggttttctgtccttgcgacagtttgctcagaatgatggtttccagcttcatccatgtccctacaaaggacatgaactcatccttttttatggctgcatagtattccatggtgtatatgtgccacattttcttaatccagtctatcattgatggacatttgggttggttcccagtctttgctattgtgaatagtgccgcaacaaacatacgtgtgcatgtgtctttacagtagcatgatttataatcatttgggtatatatccagtaatgggatcgctgggtcaaatggtatttctagttctagatccttgaggaattgccacactgtcttccacaatggttgaactagtttacactcccaccaacagtgtaaaagcattcctatttctccacatcctctccagcacctgttgtttcctgactttttaatgattgccattctaactggtatgagatggtatctcattgtggcaaaacctcctaacttttagattccctgagtaactgttaatcccatctcctgtca

SEQ ID NO: 480782 - DNA, 1000 bp, Homo Sapiens; identical to SEQ ID NO: 307880

SEQ ID NO: 480783 - DNA, 1000 bp, Homo Sapiens; identical to SEQ ID NO: 307881

SEQ ID NO: 480784 - DNA, 1000 bp, Homo Sapiens; identical to SEQ ID NO: 307882

SEQ ID NO: 480785 - DNA, 1000 bp, Homo Sapiens
ttctgagtctcctgtgtgtcactctgctgcagagacagagccgtcccatgtgtgcaatgagtccgaggtctggctgtctggtttctccactccctgacttgttctgtgcattctaatcctcaggaggccaagctcacagaccagcttcccctcatcatcgtgtgtgatcgttttggctttgtccatgaccttgtcctatatttataccgcaacaacctgcagaggtacattgagatctacgtgcagaaggtactgctggctccctggagtgacacccggctgcctctgggccccagtcagtggcagtcttcccctcagaggctgcctgtaacacctgacatttcagagactatcattttgaagggtggtgggttcgtgtgctcagactgccagagtagaagaccacagtccaggcagctgaaacaacacacatttatttctcacagttttggaagctggaagtccatgatcagggtgtcggcagggctggtttctggtgaaggctgtctcccacgcttgcagacagcctcctggctgtgccctcacagggcctttcctctgtgcatgtgcactcctggtgtctcttcctcttcttagaaggacactagtcccattacattagggccccacccttgacattgattaccttcttaaacaccctctttccaagtagaatcccactaggggttaggacatcagcaggtgaattttggtgggacacagcgcagtgctaaacaggagccctttcagggttttgcccaaactgtccacgtcgtaggaggcttctaacaataacttgtgtttgcaacactgaagttacttgaccttgactaccctaggtcaaccctagccggaccccagctgtgattggagggctgcttgatgtggattgttctgaggaagtgattaaacacttaatcatggcagtgagaggacagttctctactgatgagttggtggctgaagtagaaaaaagaaataggtaaggtgtccttacttg

SEQ ID NO: 480786 - DNA, 1000 bp, Homo Sapiens
gagacacctgatccatgaacatggtatctttccttttatttaagcctttttgtcatcatggttttacagtttgcagcaaacagaatgtgcacatattttatattatttttatttttttattttattttttttggtgctattattaagggcacttttctcaaaattttcaattttcaactgttacagatagattatataaatatgagtgatttctgttacgttgaccttatatctggagaccttgcttaaacacacttattagttctaataactttcctgtagattccctaggattttctatgcaatcatgtgatctgcaaagggagatggtttcatttcttcccctctggcctggatggtttttcatttcttcttgccttctggcactggctttgacctcaagcacaatgatgacagggtggcaagagtagacactcttagcttgttggaggggacattctgatgcttaacacatgacatcctattcccagagtctccagttttggtgatagtgtctcggttcttgagcactttccagaagaaggccctaggagagtcaggagcccatggaagcatggccacagggcaggcagagcagggcccagctaagtcgctctggccgtgcaggagagagggctgcagctgctctgggcccacccagatgcactaagggccctgctctgctaagaagtccttggggctgggggcagcactggtagactcctgagaaatggaaccaggagtccaggtagcatggcttgtgaacagagtttgactcttgtagccagtcactaagctgggggtttaaagttatgtggccgggcacagggaacttgataagcactcaaccagtgcttctcatggccctaaacagacatgcaccctatacgaggagaaactgccctgcagaatggggtccaagcatcaccctctagctctgggtcctctggtgggcttggctgcaaatgtagccttgtgctcaccacagtcaactgcacat

SEQ ID NO: 480787 - DNA, 1000 bp, Homo Sapiens; identical to SEQ ID NO: 307883

SEQ ID NO: 480788 - DNA, 1000 bp, Homo Sapiens
gttgacatgatcaaatatttagaacacaaagacattaagaagagaccattcctctaagatgggaactagaattacatttctctaagttaatacatagaaattcataagcaatgattttaaaaatgtaggggcagttaatgtacagctctggctactagccaagggctaactggcctgaggaaatgaaagaacctcaacaacagagtctgtgatgtgtctggttgatctagagaacacgagccctgtgtgtagggagtaattcttccagcttcagttactgtggctggctgggctgcccacactgctcaaatacagttaactttactttggctttttggtttatgtgtagacttgggatctgtgcacagatttcctcaaaaaaactaggctgactgattctcttattaatgtttcttcaccactggctgtggactttgatctttattttcaggatgatgcgtagcgttcctttatggagacttttaagtcgaaagccaaagccttaattaagatctttgcaggttagatactcctgagctgaagataacagagtaagaaaagtggtaaaagaaaaattaaatgcacttcttttacctatcatttttatggtagacatttgaaatttaccctttcagtgattttgaaatatgcaatactttattattgactatagtcgccctgctatgcaatagatttcaaaacattcctcctacctatctgaaactttgtaccctttgaccagtaactccccattcccttcctccccggccccaatctctttctacactctacttctacgagttcaactttgttagatttcacataaagtgggacatgcagagaaccttccttttctgattggaggagctatagcccaaaagagtggagcaaaccgtcacgctttcttactttcttaaatcttcgctgcttggccgcgactgtgggtgcagttgtaggaagtgcacggcagagcagggtaactacaacaccaagtttttgg

SEQ ID NO: 480789 - DNA, 206 bp, Homo Sapiens
ctgaaaaaacacaaaaacatattcataggttttgaggtgcaaagtagtagctcacttagctggagaataacaacaattctgtaaagttgtctggagtttatttcatttacccttcacaataatccagagaaatagcaggttaactatcccctatttttacttttagatttttttaaagtttttaatttttttttttgctttggttg

SEQ ID NO: 480790 - DNA, 1000 bp, Homo Sapiens; identical to SEQ ID NO: 307884

SEQ ID NO: 480791 - DNA, 1000 bp, Homo Sapiens; identical to SEQ ID NO: 307885

SEQ ID NO: 480792 - DNA, 588 bp, Homo Sapiens
gacaagagcactcacccctccagggccgtccctgcaaactccacactgcccttaggcatgcgactctcaagttaattacctaacaagtgcaggttggtctccaggcgaatggcagactggaagaggagctcctcgctgttttccagggaggattcggcttctaggtggctttgcaaccagcaggcatactcttctttactcagaacctatgggagatacattgttgagtgctgcaccgggcgctgctcactgtggggcggccacctgcacgtgcaccctcgcggagacacccccactcactctcttggcgatgcacaaggtgcgcaggccttccgccgcatacacgttgaggtaattctgagttttgctccgaatctttttttgatgcctccctctggcgtcaactaggttggagaataagcagaaacatgggtaagaactggcgcctgtggaatggtcttcagacactccgagatttaccccacgtctgttcgttacttgcgaatagagcacaaattttcatatagaattcaaagcaaaaatgagctgttatgttttaaaaaagagtctcatcaatatgtttgactg

SEQ ID NO: 480793 - DNA, 1000 bp, Homo Sapiens
tcaagagaagaggaattcacccaactcataggtatttattggtacaaatccatggctggggctcggctttaaaaggacttatctcagattccttctatggaacgaagttccatcaaagccaatttaaaaggcctatgtgaaactaattattcttgctgtactgtatacaaataattaaaccaagtataataaagcaaaccagtcctactatgatctgtcttttaataaaaatgggaaactggagagagaaaaattatgtttcaaaaactatggctgggctcagtggctcacacctgtaatcccagcactttgggaggccaaggtgggcagatcgcctgaggtcaggagttcgagaccagcctggccaacacggtgaaacccagtctctactaaaaatacaaaaatgagccgaacacagtaacacgtgcctgtagtcccagctactcaggaggctgaggttggagattcgcttgaacccaggaggcggaggttgcagtgagccaagatcacgccactgcactccagcctgggcaacggaccaagactctgtctcaaaaaaaaaaaaaaaaaagtacatctgttgttaaattctagtcttgcctgatgtttttcagtttttattattttctgcagtttggattaaattctaacttttctggctacaggtctccaaaataatgttttcaattttttcctctttcttttccattttcccccattcttcctaattggtaatcactgaaacctaagctctgctttcttaaagccctgcaaactgaagactagacaacttaaacttcagaagaaaagagcagtagcctatttatatgtactgttacatactattatgtttcagcaggtgctgcctccaaggccccgaaacagagagtgctactgcgaacaaatcaacctcttccactccactgctgcttttggtgccccataacgacgaccccctctcagcaggaagtagccagaaagattacgactccccatctcc

SEQ ID NO: 480794 - DNA, 1000 bp, Homo Sapiens; identical to SEQ ID NO: 307886

SEQ ID NO: 480795 - DNA, 1000 bp, Homo Sapiens; identical to SEQ ID NO: 307887

SEQ ID NO: 480796 - DNA, 340 bp, Homo Sapiens
tttctactgttggcatcaaatcgcttgaaatctccacttgcaaattccacaaaaagagtgtttcaaatctgctctgtgcaaagggacgttccactctgtgagttgaatacacacagcacaaagaagttactgagaattcttctgtctagcatgaaatgaagaaatcccgtttccaacgaaggcctcaatgcggtccatatatccacttgcagactttacaaacagagtgtttccaaactgctctatgaaaagaaaggttaaactatgtgagttgaacgcacacatcacaaagaattttctgagaatgattctgtctggtttttatttgaagatatttccc

SEQ ID NO: 480797 - DNA, 1000 bp, Homo Sapiens
tgtgtttagctttaatgtctattaaataggttggaaaaacaggccaagtgtagggacctgactcctgcaaagggcctaccgcagccctctgcactcaagcagcagccccatccagaccaggagtgtgttctgttctcctggcaggcagggctgataggtgtaggatggcgtctgtttcctttggagtgtgggctggtcagaggagaaacagcaacttcctgctccttctcactgtgtcgttggctcaccatagaccacgtcctgcattccctctgattctctcatggggagagccctggaccttctggtggtgtcccagctgggtgggttcaaggctgctaccccgcttggggcagctggcctgcagggaagggccagacggcacctctcagtggagactgaatcttccttccttcaggaggctgcctccagggaagacctggggtccttcctgcactcagcgctggctggctgtcctgttcatgcagtggaagacattacagaagaattcatacgagaagaacatgaagcctgtggagagggcagccttcagcaagctgggggacaggcccttgaagaagcccagggcgccttccttttgcagcacctgcttggcacagtccatgaggcccttgtatctccgtacctggggagaggaaagggatgaaaatatggatgcccgctctgctcccatcaacacagcccctggcacatcacagatcttaagaagtacttgctggacaaagaaatgaatgcaaaatagcaaattattttattttttcgttgaggcagagtctcactctgttgcccaggctggaatgcagtggcacaatcttggctcactgcagcctctgcctcccaggttcaagtgattctcctgcctcagcctcctgagtagctgggattacaggcacacaacaccacgcctggctaattttttgtatttttagtagagatgcagtttcgccatgttggccaggctggtcttgaactcctgacc

SEQ ID NO: 480798 - DNA, 566 bp, Homo Sapiens
accccataaatttatacaaattaaaaaaatcaggctgggtgcaggggctcatgcccataatatcaatactttgagaggctgaggcaggaggactgcttaaagccggaagttaaagactaggctgggcaatatagtgagaccccatcctatgaaaaaaaaataggaaataataaaataatttttacaaaaaaaaaaaaaaaaaaaagtacattttctggcctgcgtgccgtgacttatccaacctgtgaactgattgtgatctgcttggtaacttggtttggtgtaaactgctcttaaccctttgctgatgaagaaaataatcatataagtggaactatttgcatctatgtgtgcttctttttttatgttgtcatcactcattccttcccctgtcctattttggaggctctcaatggatcttctaacttataaatgtcaaatatatttttgtattagattgtgcctatgatgagagaaatctttaatgtatattttatgtatgctgaacacatttttataatttgacacacttggaggcatggtctagtaataataatgtaatatgt

SEQ ID NO: 480799 - DNA, 1000 bp, Homo Sapiens
tttttttttttttttcttaacaaaccctgttcttgggtgggtgtgggtataatactaagttgagatgatatcatttacgggggaaggcgctttgtgaagtaggccttatttctcttgtcctttcgtacagggaggaatttgaagtagatagaaaccgacctggattactccggtctgaactcagatcacgtaggactttaatcgttgaacaaacgaacctttaatagcggctgcaccattgggatgtcctgatccaacatcgaggtcgtaaaccctattgttgatatggactctagaataggattgcgctgttatccctagggtaacttgttccgttggtcaagttattggatcaattgagtatagtagttcgctttgactggtgaagtcttagcatgtactgctcggaggttgggttctgctccgaggtcgccccaaccgaaatttttaatgcaggtttggtagtttaggacctgtgggtttgttaggtactgtttgcattaataaattaaagctccatagggtcttctcgtcttgctgtgttatgcccgcctcttcacgggcaggtcaatttcactggttaaaagtaagagacagctgaaccctcgtggagccattcatacaggtccctaattaaggaacaagtgattatgctacctttgcacggttagggtaccgcggccgttaaacatgtgtcactgggcaggcggtgcctctaatactggtgatgctagaggtgatgtttttggtaaacaggcggggtaagatttgccgagttccttttactttttttaacctttccttatgagcatgcctgtgttgggttgacagtgagggtaataatgacttgttggttaattgtagatattgggctgttaattgtcagttcagtgttttaatctgacgcaggcttatgcggaggagaatgttttcatgttacttatactaacattagttcttctatagggtgatagattggtccaattgggtgtgaggagtt

SEQ ID NO: 480800 - DNA, 1000 bp, Homo Sapiens
gtttaaagagaatttattctatagagtgcattcttgcactctataggtgacagaaaaacaaactgtgctttaaataccaaacaagtaaatcagaaagcttattttctatttaaaatatatctaagacacacttatataaaaagaaaacagaccctcctaacatgtaacattaccgttcgtggcaattgttctcaacctttcactctccttttgaccttagcattaagctcctttgctcacttctgagctctcagttacagttcttgaggtggcatcctaaccaatttgcactatctttcaggtgaagcgctggatatttaccagataattgaactcaccaaaggctccttggaaaaacgaagccagcctggaccatagcactgcctggaggctctgtatttgctcccgtggagcttcatcggggtgggtgcaggctcccaaactcaggctttcagctgtgctttttgcaaaagggcttgcctaaggccagccatttttcagtagcaggacctgccaagaagattccttctaactgaaggtgcagttgaattcagtgggttcagaaccaagatgccaacatcggtgtggactacaggacaaggggcattgttgcttgttgggtaaaaatgaagcagaagccccaaagttcacattaactcaggcatttcatttattttttccttttcttcttggctggttctttgttctgtcccccatgctctgatgcagtgccctcttcattttcatcttcgccatcctctcgaagaaccatgtctaggatgtttcctttgatcttgaagtctcgtgaggtgctgagcttcatgtgctgcatcaggttcaccttggacttcttagaaaggtggatgagaaatttttcatactgttctatggcaaagatgaggttagggattggcttggtttcccgaagaactctggccatggctgtggcaacggcagcaggtttctcctttttctctcccgtatagttcaggctcttact

SEQ ID NO: 480801 - DNA, 1000 bp, Homo Sapiens
aatgactaaatttttaatgatttatatccaaaggaaaccctttataaccctcatcagcctaatcattttattctaaagttgcatagtaaaatattttaacctattcaatggtctagttcttgttatcacttgcttgagaaatagaacacatttcatggaaattaaacactgaatttagcatttccactaatatgactatgaggaaattcagaaagaggaagagacaatgagacatctttcacttactattctgattttgtttttcacaaaacgttttgtgaagttaatattccacaaaatcattaagtattggagttcaaatcatgcaaagtcattggatattttaaacatgtacttcaactaagcctaagccaaacatcagtgaagcaatttacatgcaagacacaaattttaaagctatgcttatgattgaaggcactccagctaccaacttattttgagatagtatgaattgagaaggtcatggagtcagaagatagccacggttcagatggtcaattacctccaccaccaccaggtggcgtaactgagagtagttaggctgtggcctgctgagcacaaaaccatcactcttagaggaagggttggggattatatcacacagtaggcccttagtaaccattttattgaataaatgtgttgtaagacagggagaagccattattccctcaatgtgtaggattacaccaggtcaagatggtccactcagctactaccccatttctttgcttccatttaggagaaaatgtatctcctcccattttctcttgaaccagtcaggctttcacatgcaccacttcaaaacgactattttcaaagtactaatgattttcatgttgctaaatttaatagccatttcccatttgtcatctttcctgacctatcagcagcatctgatacaactactcacctcccccttgaaatgctttatccacttggcttctaggaagtattacttaccttccttcctcctacctca

SEQ ID NO: 480802 - DNA, 1000 bp, Homo Sapiens
atgggacttgtctgttatgcatggtaagtgggctataaaatccagggagggggtgagggtgaaggctgtgcccccatccccagaggccctggaggactttaaggcaagatcggagtccctggggacagagtcacatgtgaatgctccctcagcggccagctgtaggtggtggagtgaaagaagcactggacaggcagccagctctgcccttctctgaacttgtgtcccagtggggtggggctggctttcaatgcccttgaggtggcccagcaggaaggcccacagcagggtcccagagctggactacctgggctcaaattcaaattttggctatgtgacatttggtaagtgacaaatgccctggaactcggcttccacgtgagtaaatgtgcattaatatgaggattacatgagtgaatggtatgttaaactttcagagcagtgcttggcatgtagtaagcgctcagcagaggtcagctgttgtagaaagtaaaagttcctcttgaaagtttcccttcttgttaaagaataaatcgtaagtgttagaaataatggtttcttttaaagacgaacttccttcaaacctccttgctttatgctaataactctttgtcaagccctattctatgtaactgttagacgtgctcacaggcacatagtacgttctatgtccttatactttaaccaagatatctgtgctggacgtgctcacaggcatgtcccagctcacagcctataccccttccttatttgggaatattattacttttctaagtcctttcgtaagcaacttcctcttttcctttatccttccattacttttacctatttagaaaaattttaaacagccaatcgggttttagtttagattgtgcggtctggcttctgccaatggacataggacacagtagcagggacaaactgcataagggctaacaattgcttccctcctttgttcaggtgtcctctcactattgttccatctgcgatgagcaccctt

SEQ ID NO: 480803 - DNA, 1000 bp, Homo Sapiens
ggcacttaatacaaaaaatttaaataaaatacacatcttcagatgcacatacacacacataaacagaaatctctagatggtcctaataacaatcaaatattaataaagcataaattttcactaatcctaagagatcaggtcaatatatcacaagacaatgggttgtacagttgaaaagaaacaaaatttagtacttcattgtgaggagaaacatcagattgtaaaatacactgaagctaaacacatgggtacaaaagattttatcaacattacaagtgaagtttaactatataaacagagaatgaaccagtagcttaggtttacgtcactctcgaggatgaaatcaggtgccatacatagatcaaaaatcaattagtagctgtgcacagtgactcatccctataatcccagcactttgggaagccgagatgggcaaatcactccaggccaagagttggagaccagcctgggcaactcgcgaaaccccatctctacagaaaaacgcgaaactcagccaggcgtggtagagcacacccgcagtcccagccactcaggaggccgaggcgggagggccgcccgagcctgggaagttgaggccgcagcgagccatgattgtgtcaccgcactccagcctggataacagagcgagaccccgtctcaaaaaaaataaataaataaaataaaaatcaattagtgagtaactcagactcttcttactgatctgagtcattcttcttcaagtttggtaaagtttactgtaaccttctgaaactttctgaaataaattattactcagtgcttggaaattataaaaataaatatccttatacctccaggaaatataataaaaaataaagaaatgatgacatgaattaagcttataatattaatatgtttcagattagatgtaacataagtttggaaatattttataatcatatttgtttctattcaaggtttgaagtactgagtcactaaatctgtattttaagctgtttaa

SEQ ID NO: 480804 - DNA, 1000 bp, Homo Sapiens; identical to SEQ ID NO: 307890

SEQ ID NO: 480805 - DNA, 1000 bp, Homo Sapiens
ctagcaataagcatgtgctacctttattaaactctggagcagcgaggtccaggatggccatgggggcccccagctcggcccccacacatgaagggctcccagaccccccttccctgcccccctgcagtgggagcagtgagatgcatatgaagccagggtaccgcctcagccattaggctgagaccagtgccagcccttaagaggctcctgctctcgagggacgtggagttccggctcggccctcccagctcggccatgctcgccaggcttttcgggctttttactgctgaaaagcaggggtgcaggccatgatccccttcactgtgtcttgtgagcccacagaatgggctctgccttcagaacaacgggtggatgccccaggccagagagagcagggcctctggctggggcttaggccagaccaccaggaacctcttgaggagcctttcctgcctggtgcctgcccaccggactctgcgtgaagttgtgaagctttcaggaggttgggtgttggtggatggagggagtcccatttcaccagagggcgggcttgtttcctctttctgtcctggggtgtgggcgagatcttccttcagagccgccttcttttccctgtgggcccactccctcccacccccttgggaaggggaggtggccctgcgtcagctcttgagcaccactcctcgagagctgcctcagcccctgagggtggacgggaggctctgctacaggggttcttccacaggctgtagaagaacacagccacttccacagctgtgctgtgttgaaagccacaggggcctgggtctctcagcctcacagggcatttgggcactaggaagtccgcgggaaagcaggaactagcacaccttgcagggcctggggcctttgggtcctgtgcaggggcagagcagaaggcaggttggggaccacaacccctgtctctaccagtgagcgagaaggcccattgtgtttcgaggcccatacaggaagctggggg

SEQ ID NO: 480806 - DNA, 1000 bp, Homo Sapiens
ccttttttcttttcttttttcctccttagcagattacctgatgagcacaagggcgatgctaggaaaattcaaaaattccccaaactttgtcatttggaggagagagaaagatgcggatgatgccccacatccaaaagtttcttcaaagtctgtggcaaaataatggtagcaccttcagaatcttaaatagggatgttttttttttttccttaaaaaaatcacatacactgtgagagacaattgcgagcaccagcgatttcacagtgggaggtagcaaacgtgggcacccccagcccgaggatctcgccgcttcccacgcctggctgctccttcccatcctctcacctctttcccgggtgaaaaaaaaatagtaacgcaccttctttttgtttgtttaaataatatatatatacacttctgtctttccttttctccttttttcatgtctcctttctaatattgcacatcaatagctccctagcagggaccagctgacgagacgcccccttccctcaagttggcttgaatgtggggctctttgggcaggaagctggggagggaacggggtggccgcagagctgagaggccacggggctcaggcaggttgcaggtccagcttactctggctggctctttggttggtctttggggctaagctgggatccattgttcccaaggacaccctatcccctcctacccccacccacttctactgggcagacaacagctggggtctgcccaaggacccttgggcaggggagctgcctctcctggagccatctgcccctcagtaccctccccttgcctcttcctcttccctcctccatgaggcctagagtggccacgaggtcagaggtcagaggaagcacgcaggtccaacttccaggcggtactgcttccctgatgaggcaggagggaggttgtccacactgatgatgggcagctgttgggggtcttgggtccggaaggtgaagagtgtctgatgccagcggccatcttg

SEQ ID NO: 480807 - DNA, 322 bp, Homo Sapiens
ccacaatgcggtagaacggccgattggtgcagccacccagggcaaggcggatggttaagtggcccccacggtaggccttgcagaggagagtagctgtagaaaagcagctggttaggacacaaaaaacagcacaaaaaggacaaaatgacacagacggcacaattcccttttcccactgaaatgtctcacttccaatccattcctgtcaatccagtttagatgctactcttctttgtgaaacccctcttggccactccagccagcaatgacctcctcctcatacccaaacccaccccgcatgggcttgccattcactaggctc

SEQ ID NO: 480808 - DNA, 1000 bp, Homo Sapiens; identical to SEQ ID NO: 307893
  misc_feature (90)..(90): n is a, c, g, or t
  misc_feature (102)..(102): n is a, c, g, or t
  misc_feature (136)..(136): n is a, c, g, or t
  misc_feature (215)..(216): n is a, c, g, or t
  misc_feature (221)..(226): n is a, c, g, or t
  misc_feature (277)..(278): n is a, c, g, or t
  misc_feature (281)..(282): n is a, c, g, or t
  misc_feature (292)..(293): n is a, c, g, or t
  misc_feature (297)..(297): n is a, c, g, or t
  misc_feature (363)..(363): n is a, c, g, or t
  misc_feature (376)..(377): n is a, c, g, or t
  misc_feature (423)..(424): n is a, c, g, or t
  misc_feature (426)..(426): n is a, c, g, or t
  misc_feature (436)..(439): n is a, c, g, or t
  misc_feature (444)..(445): n is a, c, g, or t
  misc_feature (448)..(449): n is a, c, g, or t
  misc_feature (451)..(451): n is a, c, g, or t
  misc_feature (454)..(461): n is a, c, g, or t
  misc_feature (464)..(464): n is a, c, g, or t
  misc_feature (466)..(473): n is a, c, g, or t
  misc_feature (486)..(487): n is a, c, g, or t
  misc_feature (496)..(496): n is a, c, g, or t
  misc_feature (539)..(539): n is a, c, g, or t
  misc_feature (544)..(544): n is a, c, g, or t
  misc_feature (557)..(557): n is a, c, g, or t
  misc_feature (586)..(586): n is a, c, g, or t
  misc_feature (589)..(589): n is a, c, g, or t
  misc_feature (637)..(637): n is a, c, g, or t
  misc_feature (675)..(675): n is a, c, g, or t
  misc_feature (715)..(716): n is a, c, g, or t
  misc_feature (741)..(741): n is a, c, g, or t
  misc_feature (762)..(762): n is a, c, g, or t
  misc_feature (809)..(809): n is a, c, g, or t
  misc_feature (817)..(817): n is a, c, g, or t
  misc_feature (846)..(846): n is a, c, g, or t
  misc_feature (848)..(848): n is a, c, g, or t
  misc_feature (945)..(945): n is a, c, g, or t
  misc_feature (989)..(989): n is a, c, g, or t
  misc_feature (993)..(993): n is a, c, g, or t

SEQ ID NO: 480809 - DNA, 1000 bp, Homo Sapiens; identical to SEQ ID NO: 119878

SEQ ID NO: 480810 - DNA, 1000 bp, Homo Sapiens; identical to SEQ ID NO: 307895

SEQ ID NO: 480811 - DNA, 1000 bp, Homo Sapiens
ctgcaatgacaaaatcataatttggggtcaaaaagtgttttgacaatcaaaatactagatatacaaaatacaagacagtagcacacagaaaaacttcataactaaaaagttttcagccaatatagtcacatgtaacaggcaaaaaaaaaccaattaaaattatgtctgacatattttactaaagtttccttaaaaatcaagaataaaaatcatttttattcaaaagaaaatcaccataaatatgtactacataagaaataacaacaaatctagcactgggcgcagtggctcatgcctgtaatcccagaactttgggaggctgagacgggcagatcatttgaggtcaggagttcgagaccagcctggccaaaatggtgaaaccctgtctctatgaaaaatacaaaaaaattagccaggcatggtggcaacactgtaatccagcaacttgggaggctgaggcatgagaatccttgaacctgggaggtggaggttgccgtgagctgagatcgcaccactgcaccccagcctggacgacataagtgagattccatctcaaaaaacaaacaaacaaacaaacaaacaaacaaacaaaaaaccccacaacaaatctatatttacagtttggaaaaagaggatttaactttaacacattagccaagtgccttagaagcaaactcttccttttagtaatagctgacatttattgagtatcagctgtctgcgggcactgttgtaagtactttccatgaattaaataattttttagagagatggggtcttgctatgttgcccgggctggactgcagcggctattcacaggtacgaacatagcacattacagcctcaaattcctggactaaaccaatcctcctgcctcactcggcctcccaagtaactagaactatgggcacatgccataggacctggctagaactaatttaatccctcccaacaacctatgacataagtgctattatttatctctattttacaaataaaa

SEQ ID NO: 480812 - DNA, 1000 bp, Homo Sapiens; identical to SEQ ID NO: 307898

SEQ ID NO: 480813 - DNA, 1000 bp, Homo Sapiens
gcaaaacaactttttatttaaaaggccaataatgagaataatgagttgcacaagaatgaaaaccttatcccttccaaaagatcggcctatacattatgtataaagttagaataattctaaatacaaaatgccaaagaccagcgggtccactccttcctctcctaagccatcttgacagtttcacatttcagcttccagacgtcatttctgttgcttttaagggtgcttacccagccgtggtctgtaccagacagggtagttggcacagcgtaggcactgccagcaggcccttgggagcttggcgaggtgggagccttgagaaatagctggctcggacccatggcggggtttgtgtgtcaactccctggtcctcagagaatccgagccacgggagagcaaacgctgcttccaaaaccaaaggaggaattttgcaatcgtttagacgggttataatagaatctcattcagatcttgaaggttatcggtgctttctgcaggtttttattcctcaaaaatgcagccaagctttgctgtgcttatcttggtggatctgagctaggttggtctatcttttcctaattcaattgccttttttttgcaaggaagggggtttctggtccatcggagggatcaagggcatggtcctcacgtctcgtcaggagacaaaaatagacattcagcagacagaccacagccagcgcatgcgaccagcgtcgtttggctattttagtctcttcttaatacacagacaaacgagcaaagaaaaagctactttgtccaacaccgggccctgggttggagtttagccctgcttggctctgcccgctagtctcagtcaggtcactcaccccaggcctgcgggaacggtggtcttggtggtcttctctggcccttccacctcttctgccttgtggggaccacccaagccctctcccgacttgcccagaggctgcacgcctctctggcatcacagtccgcacggagcctggctgtaaggctc

SEQ ID NO: 480814 - DNA, 1000 bp, Homo Sapiens; identical to SEQ ID NO: 307899

SEQ ID NO: 480815 - DNA, 1000 bp, Homo Sapiens
aaaaacagacaccctcccttcacctccccctgccacccaacatgtatttatttctaattttgtgaattatctatttctgtcttttgcctatttttttttctggatgtcattcctttttcttattaattggtaagagctccttatagatgaagaggctttgatatacaatataaaataaccatcaatagcatcccttttaatagaccactgtataattttttctcttatttagacatctaacagaaagatcagaactctaataaagactgaatttaagagagatgggattattgatcttttcactctcaataactttgctactctaatagcagattccttcctaaaatctctaaaatacttcaaaacatttctttagctggtttaaacagggaatagtacctgctaaataccaacaaaacagactatagtaatctcatccccagatcaatcatttatgtacttcctggggtacaaagaagcaggatgccttacctctacatgcccactacaggacttgtatccagagtatatacagaactcttaaaactcaacaacaagaaaacagctaacccaattttttttaatgagagggaagggcaaaattctgaacagatactttaccaaagagaatatatgggttgcaaataagcacatgaaaacgatgctcattaccgtcggccgtcagggagatgcaaatcaaaacctaaccaggtaccacttcacacccactaggacagacggctataatcaaaaaggcagaaaatgagttgctggtgaggatgtagaaaaatcagaaccctcatacccggctgggggggaatgtaaaatggcacagctgctgaaaaacagtctggcagttactcaaaaagttaaataaagaacggggccaggtgtgttggctcacgcctataatctcaacactctgggaggctgaggcaggaggatcacttgaggctgggggtttgagctcagccttagcaacatagtgagactctctaac

SEQ ID NO: 480816 - DNA, 1000 bp, Homo Sapiens; identical to SEQ ID NO: 307900

SEQ ID NO: 480817 - DNA, 1000 bp, Homo Sapiens
tttttttttttatttctaattttattatttttgaacagttaaaaactcaaagtacaatgaagtttacaatgaaaaggctcactcctgggatccttatcccccaggtatctagttctgctccttggagactaccaatgtgatcaggttcttccatatatgtcttcagagacagtctaccatatacaaacaaataggaatacatacacattttttcttcttatacatcaattgtagcatgccatacagtttgacaccatgcttttctcaataaacattattatgccttagagatcttttcatctcagtacctaaagcacttcttcattcctttttccattgggcaaattagtttcaccaatcctctgtaatttattatctaaagtgagacattgagaatgaaagcaccattaataattatccaagaacagcaggtataaactggtagtgttcaaaaagccaaagcatatggttatcctacctatggcagatatttaggttgcttccaattctttgacattaccaagttgcaaagaatatacttgtaaatacatacttttgcacatctatgtgctttgtttggtaggataaatttctagaagtggaattgcagggcaaaaggttatgtatatgaatttaaaagtttcacagactgccaattgctgtacataaagagtataacaagtcacacttccctagcaggcatagagaatgcctgccctacttattgaataatccttttcccattgtgatcccgtctttataacaatgttttaagccctcacatgtatgtactgaagtcttttttctgggtgagtacataccattgatatctagttgtgcattcagttctgtactacctttcaaaaacagttaatctaggtttacattaccctttcaaaaatttcttagcaattttcaccaccttatttttccagatgaactatgggatagtttatctattataccccctcagaaattttaacagtggcagcattcaaca

SEQ ID NO: 480818 - DNA, 1000 bp, Homo Sapiens
tttttttttttttttttttttttttttttttttttttttttttaagacaaagctaaaacatttatatgtggtgatgattaaaacaagaacaacagactttaaggggaatgggcttctgaaggttattgtaatacaaaaagtatggaaggtcccactttgtataaaaactgtgatgtaaaatttctggtatagtttaaaaagaaaagaaagaaaaggccccagagaaaaacaaatattttcgcacagctttttttttttttttttttttttgagactgaatctcactctatcacccaggctggagtgcagtggcgcgatctcagctcgctgcaacctctgcctcctgggttcaaaagcctccctagtagctgggattacaggtgcctgccaccatgcccggctaatttttgtatttttagtagagacagggtttcactatgttggcaaggctggtctcgaactcctgacctccggtgatctgcccacctcggcctcccaaagtgctgggattacaggcctgagccaccacgcatggcctgcacagtatttcttaatgtaaaattgtgtgatgcttatatcattaaaatcaacttatttattttatcttttggctttcaggtggaattttagaaaatacctggcaagtgaatagttctgaaagtgcttcctcttaagttctttggtataatttggtcattttgatagtaatcaacccattaagtaggtactttaacaccctcatatcaattaaaatggaatgtggagtacagatatttagaaaaccatgactgaggaataaattatatttttgacctcatggaaaacagaactctaaaattttacttatgtttctgtggcaaagatagccatactgcctatgaagacatctctaactttatattaaagaaatgttctataaaacatctctttctgattattagaagtaactgttctatatacttttttaaagtagaagaggcaagtttcaacttgaaaaaag

SEQ ID NO: 480819 - DNA, 1000 bp, Homo Sapiens; identical to SEQ ID NO: 307902

SEQ ID NO: 480820 - DNA, 1000 bp, Homo Sapiens; identical to SEQ ID NO: 307903

SEQ ID NO: 480821 - DNA, 412 bp, Homo Sapiens
aacaacaacagcaacaacattttatcagcatggcaaggaaatgacaactccatttcaattaaaggatcattgtccattctcccccagttcccattagtgaggaatggggttcataatgacagagtgaaagtgaggcattgagggagaaggcaaaagatcacaaaagaaagcaggaatacattgatttctaaaccaaatcctaattttaaaaactaattttaatttaaaacattcttttccctaggtcacctcctttcctctcagtgtggttgtctaaatatgcatataagcaaaattttcataaaacaacatagaaaaaatgaaaaaattgttttggggctgatttggctctaagtctgcatgttagcatcagtgtccctctatgctgtgaggtacaatattgcccagagta

SEQ ID NO: 480822 - DNA, 1000 bp, Homo Sapiens
tttttttttttttttttttttttttttttttttttttttataatttctccccctctttgatgagcctctttatttttttccaacctttctctcatccactagccagattatgcatttaaatcagagcagacgcacccacagctatgtatggtgaacttcctctaaggcagtaagaggttaccaggcgaacatagtaagcatggctaaaaggaataagagggggagggtagtggggtgaacaaatggagttggaagcattagccagatgcttcccaaggctacctggtagctgtagtgtgcagaataattgacccacttcctgacgtcagtcttgtcttctacagagatagatctcacgctggctttggaggcagaagttgtgggcatgctgaactcgacattcacgtgattggcaaatctggaaggcacttcccggtcagagccgagttcaaggtggcaaaagaaacagtgtgggtgaccggaagctgagtttttgtccggcagtcggtttatcctccacacaatggagttgaaggcatgctcgtacttggcagttcccagagttactctcatgacaggctcagagccagaaacactagtggagccaaaacttgccccccggttcactttggctttcaaagacttttcccccaggacactttccctgcggaagtttttcacccactcactgggcacagggtaacggatcatcacattctcacagggaacctgagtgagggggtcacgattggcggagaagccagttgacatcctcagccagctctgcacctccacctctgccccattgacacttgtggccgtcctgagtgtgaaaggcaaggtcttctcagcaaacactgtcctgaaccgcattagctcaaaccggcacgcatccaaagggttgaacagaatgacccgtgagttgtggaaaacatcctcatccacacacccatggaaacggcactcatggagcttgatccactttgtggtggtggtgggc

SEQ ID NO: 480823 - DNA, 1000 bp, Homo Sapiens; identical to SEQ ID NO: 307904

SEQ ID NO: 480824 - DNA, 1000 bp, Homo Sapiens
ctctggtgggccactcacttccagcagtgctccagggagctgtggggctggattttgagcttctgggggcagagcagcttggtgaaggcccggcggaagctgtggtggcacagagggtagaggacagggttgacagccgagttggcccacaggagccagaaggaggtttcgtaccagtagtcagggacgcagtggccatggcaggcggcccggatgatcatcagcagcgtgtatggggcccagcagagcccaaagatgctcacgatgacggccagcgacttggccactttcctgtcccgagacagccgaaagcgctgggtgaagctctgggacaccatcttcatgcgcttctccagcgaggccgaggacgccgacggcttggagcccctcttgagtgagcgcggcctctcagtgcccctcgaggagctgccggagctggaggtgggtgaagccacggagccgcccccaccgccacccccgagggtcgcctccccggcctcagcgcctacggccacctcacccaccccatacctgtgcagcggcatggcctccccgtgccccttctgccagcagccccagcagccaggcggtgggggtggtgagggctgggcctcgggagggggctcggggccggctgcctctcgagccccatccagccggaggcgggtgcgcctctggatgttcaggtagatgctgaggttaaagaaggtgacgctgaggaagggcgtaaagaactccagggtggaagccgtgatgaggaagtaccagttgtagaagaactcggcatagcagtggccctcggggatggagctgcccccggacaggtactcccagctcaggatggctggtccgtacagcaggaaggccagcacccacaccagcagcatcttccgcactgcccgccgcgtgtcaccctgctgggcccggtatgagacctgcagaagggcaggctggtcaggggcggggcggaaggaatattgggctgggtgcgcccccgtag

SEQ ID NO: 480825 - DNA, 1000 bp, Homo Sapiens
ggggaaattcctcactttagtaacgttaatttagtttggagatatggttattgactgagtaagagaaaaaaaacacagatgaagcaaaacctaatatccaaattagaaagagtaaaaacaaaacaaaataaataaatatttaaactgcacagttccaaattgtagccagcaaaaaaagagtggcatgtgggggaaattaggaaaggaaagatgaagcttgaaagggctagaagtagaacaggagaaaaggacatcgataaaaagaagaaaaaggggaaagggcatcacacatgaaaggatccagcagaaactcacatgcaaaggacagctgtggagagggcgagagagaaacatgaaagagaaagaaaaagtgacagaaaatgaaacccaaggctctacccattttgaagcactggtctgattaaactcagatcttcaattggctacaggatatgggggccttttgttgttctattagctaattaattgctgtttgcagttctccaaaggtaaacttagtatcacccactgaatggtacagtcacaagaacccaccatgggctgggctcgattaaccagaacaatattaggccagatatggccatgagtcagagatggattaaccagaacaatattaggccagatacagccatgagtcagcaattccagtctatattcctattactcctgctaagggggatagagaggaatattaaaattactgcaagtattttcatagttagaattggaattaaaaatagagttaaacatgaatacaatagctagcatcaataatcttaaggaagaagaatatttaaatagaaagcatgatgtcttgaatatacacacccaccgtgcctgccactgggcagttgcatttatgaatacaaaataatagaaaaaaactcctttagtggtttttggaaaaatatttttttcacagagttttacatttgtagaataaaatacaaggatttcgtttaaaaaaaaattaggtgaa

SEQ ID NO: 480826 - DNA, 1000 bp, Homo Sapiens
catcagtcactaacacaggaccagcagaggagacagctgctgacccactctccagggtgtgaagaggaggtggcaagcagcgactcatctgggaacatggggctggggcacaaatgctgcctcagcccaggatgaaaacaggactagctgtcacgtgcgagagggagggaaagtgagggctggggggagctgggtgtgcaggagacttgggaaacccagtccagagtcagacctctcaccctaccctctcaggcctggctcctccaggacctctgaagtgccctgagaccagtggcacacacctccccctagtggtcaatccagaaactgcagcagcatcctctgtatctcctcccaggctaagtccaacaacagacatcccctggtccccaggcaatgccctcagtgagccaggctggggagaggtggggggagggggaaaagagagttcttctgtgggaacataacgattttttagggggaagaatttagggaaatagagttctgagcctgtagcagataaatcttccatcatctccagtcccattcaagcagccgggctgttccttattcataacctcaagggagggatggatcaaggtggaaaacaggaaaaagggggacaggacccctgcacctggtgtcagcctctgacgcttttctgggacttgagaggaatcagagaggatgctattgctgcttacgtggtgacagaggaaggcccctctgcccctccttccactggcagactgagtagggccacagggtggtgtgcaggggagttagaggggggcactcagggctaaagggccaggtggtagactgaagccacactcgggatgtcccagcctcctgccttctgcctccaggctggtctgcaccacctccgtgccacagtggctgtccctccagtgggtccctgtgtacccacctatttcggaggagggccccatcctgggatggtgtggacagtccagaggtgggcagagtttgagttggt

SEQ ID NO: 480827 - DNA, 1000 bp, Homo Sapiens
tacaagaattgaggtgtcttcttatctttcttatctttgatcatctatattttcttttgttcaaaaaatatttactggggccttcattggtcaggtttggggccatgggcacaggatgcaaagattaatataggaaagagtctttttttaaaaaaattatttatttatttatattattattattattttttgagacagaatctccctctgttgcccaggatggagtgcagccccaggctctacctcccaggctcaagcgattatcatgtctcagcttcctgagtagctgggattataggtgcgccaccacgcccagctaatttttgtatttttagtagagacggggttttgccatgttgggccaggctggtcttctgacctcaagtgatcctcccgcctcagcctcccaaagtgctgggattataggcgtgagccactgcgcccagctcgtctttttttcccccctgaaattagttttaggtcatgaaaggagtctgctttattgaggcatccacatgctggctgagaagaaaaaaaccattgattttaaggtgtggtacaatgtggtagatgctttgacaggtagataggtgcagtgctttaggaacccagaagagggaggcagaacttctagttattgtttggaagcttgtacattgttatgctttatacagtggttgtatagtcccaaagactttgattgcatgtttataggtattccctatattaacatgttttgggattttctacatcatccctcagttcctgggtaggcagtgggacctacaggttaagagtaggggacctgtaggtaggtagacttggatttcaaatctgggtccctgcctgaccttccagctgggtgacttagataaattacttagtcttccacaaccagaaaggagtgtgcaagtgctggggttaaatgacgtgatggatgcaacacatttaatgatgcctggcatgtagtaggtgcttatatgtatatatatatgtgtgt

SEQ ID NO: 480828 - DNA, 1000 bp, Homo Sapiens
tttacagcccagaactaaccaaatccatcatatcctcaacttcctccttctcaaaagataaactggccctcccctaaggacattgcttcccctgaattcctctcaagtgtggctgattttctcttccgtcttctgggcccagcacactggtctgctggttcttctaccactccaggaaaatctcttcagagcctttgcaaggatataccttttgcctggaattcaaatagctacctctcttacttcttaaagcgcttcctcaaatggcatctcctcaataaggccacatataattacccttttaaacctctagccctcccactccaccatacataggactcctaatttccctgtcctgctctcctttaactatttttccatgacaccaatcaccttagagaatgccatgcaatagacttacatattatgtattttgttcattgtttatctgtcccttgcttaatttcaaattccccaggggcagggatccttggctgttttgcttgagtaaggtatctcaaggtctacaacagcaccaggcatgtagtaggtactccagtaaatatttcttgagtgaaagaatcaattcgtaccacaatattatgaggaacacacaattatttttctttttcagacaataaagctgaaacttagacaatatacataatgtattaaaggtcacactacttgtaatggaataacttggattccaatccaagccttctccctagagcttacacccactactccacccccactggtgtttgccagcattggatgagggagaggaagattctgaaatgaaggaggaaataggaaggtggagaaggggctagaaataaatctctgtgtgccaagctaagcagtttaaactacattccatagcagaacctctgaattgaatagtgacataattaaatctgtatcttagaaagataattcaaagagctgctaactggaaaagcgaaagccaacaaaatgctagtggaaagaaatacca

SEQ ID NO: 480829 - DNA, 1000 bp, Homo Sapiens
gcggccgcgcgctcttatagccgcggccccgcccttcgcatcggctgatgtcaccgcgggtggccaatcgggaggcgccgccgcagagccccgcccggcccgcaggctccgcaccgcgcgtccccgcccgccgcgcgcaatgcggcgcccctcccgcagccaaggatcccccagcgctgggccgggcgcggtctgagggccccgcgcattcgaaaggaggggctgtctcccagagagctggctgtgggggcgccgggctccagggaggacaatggccctcttggccctgggaaccccgcccccagctaccctctcggttccgcccttgcgacagccccaccctgcggctttgtacggagggtcttttttccccacgccggtttagagaccaacccgcaccatcccagctccctgtcttttggcagacaaggtgctctgagcttttgccggttttgggtgggggaggtaggtaaaggctggcccaggccctgaacccactgagaagaaacaaagcgtcggatcagagctcggaagggcgcgaacacagaggggtggcggcggccgagagcgagctccgtgggtcgccggcttccgcagtgggcggggagggggtgggcacccgacctcctccaccaaggggctgccatgagcgtccaaaggagctttgtgggcccgggcgcgcacagcacctggacgtgccactgccggtgcgcatccgtgtcaggaattgtcacaaggacgcacaagccaggcaagaacccggccagggtgggggagggtgggcagcggcttctatctgactcactctctgaggtcggagtctgcgtgcaggggggcctcgggggagcgactggagatgcgtttactggtcagagaaggaagggagcaaaggactcgccggcacggcactgacctcctcctgggccagatattacagtgccaccaccttagaacaagggccttctgatacttcagtaacaaaaatccttcaggaagggtc

SEQ ID NO: 480830 - DNA, 1000 bp, Homo Sapiens; identical to SEQ ID NO: 307907

SEQ ID NO: 480831 - DNA, 1000 bp, Homo Sapiens
tttttttttttttttttttagtttgtcaacatgtaatgccctgggtttattttgtgagaattctatcacaatttttccaggtgggattaaaaaccttaaggataatgtatgccattggactgggcattcagacttcggtactgacaaagcactagtagtagtctgttaagtaccattctcttcacagaagagaggtcaaatatttccaaaggaaggcacccgatatttgtggttctggccttgcagccttctggagaatcttaaaaggaaaaaagctggctggctgtttttagaaactggaatgatgatacacgtacagcaattactgcattcttctcccttatatccttttcgtaagaacaagtaaagaatgaagtcttttaaacaattcgacaataaaaaagtacaattttttttgtgctaaaaaaagggcaagacaacataaactccagttgtaaggactccatttgcatacttgatttaacactttttggtgtggaaggaaatgggactactgggctgttcgcagagcagcaacataatattagtgctttaagtaccagaaaccacccacagctttgtgggcaagttggggatggaaagattcaagagacttcatttttagcttgttacttgtcctaatgatagtagaccaggaagatccccatttaatagtacattccccatttttaaaaaaactgatgccttttttttttttttttgtaaaattctgtatgtatgtcaccattttttttcacatgatacacagaaaactcaaggacccagaggggaaccaagttatgttataccatttacaaaataccaaggagtccacagctacctaacacatttactacagcacaggaaccaatgaaggtacagtgtacaaaaaactgtaaacacggcacaataaatagataaaacagcaggttccgcaccatgcacatgatgtgatgacacttcatctctatacaatctcacatctcacactctttgttgc

SEQ ID NO: 480832 - DNA, 1000 bp, Homo Sapiens; identical to SEQ ID NO: 119879

SEQ ID NO: 480833 - DNA, 1000 bp, Homo Sapiens; identical to SEQ ID NO: 307909

SEQ ID NO: 480834 - DNA, 1000 bp, Homo Sapiens; identical to SEQ ID NO: 307910

SEQ ID NO: 480835 - DNA, 1000 bp, Homo Sapiens; identical to SEQ ID NO: 119880

SEQ ID NO: 480836 - DNA, 1000 bp, Homo Sapiens; identical to SEQ ID NO: 307912

SEQ ID NO: 480837 - DNA, 1000 bp, Homo Sapiens; identical to SEQ ID NO: 307913

SEQ ID NO: 480838 - DNA, 1000 bp, Homo Sapiens; identical to SEQ ID NO: 119881

SEQ ID NO: 480839 - DNA, 1000 bp, Homo Sapiens; identical to SEQ ID NO: 307915

SEQ ID NO: 480840 - DNA, 399 bp, Homo Sapiens
tttttctctcccctcaatgtcatgttgcctcaccaaggcatttagatctagcagaagggccttacccagtgcttggttatgcaacttccaaccccagcttctaggtcacagctacttaccagcccgcaccaggatatcattcaatacgtagacaagggggaaagggccagtgccacagaacgtgcccctgacgtcatccatgtccaatgtccataccatggcccccccaaaatgctctcgccttataaaccatgcctgtaaaagtaacagtcagtcaacctgctgtacttgtcagtctctagactgggtacaatggcaaaaaactgaagatagtccctcaggaagcaatgtagctgggtggttaggagtgtagccagcatttgaatctagcttttactg

SEQ ID NO: 480841 - DNA, 1000 bp, Homo Sapiens
gtcagctggaattcgcggccgcgtcgacttttttttatagttggtgttcttttaataaacacacttgcatagttatattacaatttggtaaaaataaaaacagattatctcatgccaagcgtgcccagcatttgcacaatctcaatacctttaatactataattttcaagacacacaaaataaaattttaaggcaaaaacagcactttgcaacaatttaataatttattacattacagtagcatcacagcagcattcaataatgccactttaggcaaaagtctttcagtatttccattatagattctgtttacaagaattcataaactggtaaaagtcattctaagaaaactggcaaataaagctttggactggaattggtatttctttctctacttttctttcccccagtttctttcttttaaactacagtatttatattttaaaatgttttatttcaaaacatttaaatatcagttacatttttaatagttatattattttaaaatgactctttaagataaagttttagagaaactatattatggatagggctgatttacattctcaaattttctaaaaatcagctttggttttagaactgatttttttcatttctggaaaacctaaaaggtttaatcaaataatttaaaagtgattattatacattgcaattgcaatctttaaacaggtattttgattctttacctcctacagaaattcaaatttattcagttgaactcacattttaaaattctatgtttctgatgaactctaaccttctaatgttgccttctaagcaaattgaaagctgacttatactgaatgaggaagagaacaaatacttggctgaatgaggtattgcaaaagacagcatgcacttttaagaaagacttaagttattatgtcatatgatttccattctttttatctttttcttaaatacatgacaaaatacctacacaaagagtggtatttcagttaatatagtaaatttattt

SEQ ID NO: 480842 - DNA, 1000 bp, Homo Sapiens
gggtgagtgacaactatctgaggctggtggcacaggtggtaaaagaatttaccaagacagttgtgggtaaagaaaggcagatttactagagaaagtatgaaaatatgttgcaagagtgcaacgggcaaggtagcaaaagaggggctgactgccaggaaaagacaaaggcttgctgggaattttttctatgtgctcccctctcaccaccaggctggacctaatcctgcaggaacttggccaacaactgacaagtgacctgcaaagttggtcctgattttttggagaagaaaataccttagcagttcatgactgacttctgatcattgactttgacctcatatgaaaagacctacacaatctttcaaatcccttcccccaggaatggctcttcattgctggcatcctttgtccattcttcttggtagaacaaatccaacctttatctctacctctttctctctcttctctgtagcattgtacacattttgaagatgaaccccttttcctttctatgtgtgtttcataatatcttgcccatcttccacctatgagacttccctatcagtgccaaacttactagtaggtatgactccccaaaacacagctttccttttcctttagtgtcttactttcagggatactggagagtgcacctttcagtaggcctgaactagaactaaaacagtttatctatagcaatagaggctacatgtacttctctccagcaacatcattcctttcttttatccataaatgactaatgataagttattttcaatttctcaacttttttcttttcaaaggtacatgctgagtcaacataataaatcagtataggcactatagcagagagccttgaaatcagatagacctggctcaataagggtcaactatttatagttataaaatgtttcttaacatgtttctaatgcagctttctcatttgtaaaattagaataatactaatagctacctcattttcttagagtcaagaataaag

SEQ ID NO: 480843 - DNA, 1000 bp, Homo Sapiens; identical to SEQ ID NO: 307917

SEQ ID NO: 480844 - DNA, 1000 bp, Homo Sapiens; identical to SEQ ID NO: 307918

SEQ ID NO: 480845 - DNA, 1000 bp, Homo Sapiens; identical to SEQ ID NO: 307919

SEQ ID NO: 480846 - DNA, 1000 bp, Homo Sapiens; identical to SEQ ID NO: 119882

SEQ ID NO: 480847 - DNA, 1000 bp, Homo Sapiens
gctgggttgagggagtgtatagggaggcgaggcaggtgctcccagcggggatagccatccttgagcgtcctctcctgggtgctgagaggctggcagggcctggggagcactgaccagcacccagaccccagcccatggtaacttgtgggcaagtccaagcatcccactgaccactgcccccaggggatgggagaggaagcaagtagagagtctgaggaccctgacttctggcttcctctgcagctgctccttgacaagcacatggggatgaagaggtatgaagtggctggacgccgagtgctcttctactttgatgaggtaccaccagccggggttggtggaggaggcttccctggtgtgcatgttggtgagggtgcaccggtcactgcctggtgtggctccctgcaagtatcttgtaccataaaaaagacactggggccgggcatggtggctcatgcctgtaatcccagcactttgggaagccgaggtgggaggatcacttgagctcaggggttcgagaccagcctgggcaacatggcgagaccccatctttacaaaaaatataaaaaagtgcccaggccctttggcttacgcctgcaatcccatcactttgggagactgaggcaggtggatcacctgagatcaggagttcaagaccagcctggccaacatgacagaaccctgtctctacaaaaaacacaaaaattagccaggtgtgatggcacgctactgtaatcccagctatttgggaggctgaggcaggagagtcgtttgaacctgggaggcggaggttgtggtgacctgagattgtgccactgcactccagcttgggtgacagagcaagacctgcaagaccttgtctaaaaaaaaacaaaaaaaaataagacactgggagaataaattccaggcagagttggccatgctgacagctctgtgccctcggctgatggcagttggtagaaaaagcagggaggggccgcagtggatattatccatctgt

SEQ ID NO: 480848 - DNA, 1000 bp, Homo Sapiens
gagtctcactatgttgtccaggctggtctgaaactcctggcctcaagcaatcttcctgccccggcctcccaaagtgctgagattacaggcgtgggccactgcgccggacctgagagtgatattggctggatccatgggaagtcctaggtggaggaactggaacttgagctgggtttgaagaatggggagtgggagtagaggggtgggaagcatttggtgctggaaggaagtgtcatgaacagagttgggaacccacagtgacagtgacttacgagcaggcccatctgcataagtggaaagtttatggcaggggaacatttttttcctttttgaggatgattcccaggggcagaatcaacttatccttggggcttgtggcagagctgaggtgaccatttcatggactcccccatgttgggccaacctggatgtaggaaggtctcttccacccatgaggtctatggaccaacaggattttgattctgggtttgttgttgtctttgtagttgttgttttttgagagggagtctcgctctgccacccagcctggagttcagtggtgcaatctcagctcactgcaacctctgcctcctggcttcaagtgattctcctgcctcagcctcccgagtagctgggattacaggcgccagccaccacgcccggctaatttttgtatttttagtagagacggggtttcaccatgttgtccaggctggtctcaaactcctgaccttaggtgatccacccacctcggcttcccaaagtgctgggattacaggcatgaaccaccacacctggcctaggcttctgatttcttgtaccaccggtgtgaaatggagaaggtgaaggcagtgactgtcctgacatattcttcgtatttatttattttattatttttttgaaacatttttacatgtttatttatcaaaagtgaaaaagcatacaattcaacacaatttcaatagcatttgacaccacccctgtggatcctgtacatggc

SEQ ID NO: 480849 - DNA, 1000 bp, Homo Sapiens; identical to SEQ ID NO: 307924

SEQ ID NO: 480850 - DNA, 1000 bp, Homo Sapiens
aaaggaagaaacatccaaattaattttgcaactttaatgtaacactgatacccaaaacatgaaaacacaaggaaaagcacaaaatgaaagcaggaagagcaaagagagcttcatcttgcatgccacctccgactgacaggaagaagccgcctagggtgctgtgtcgagaaggaatctgagaggaggcgctctggcttggccagtaagatcgctgcagttcgtcaacggtgcctataaaagcacaagaaaccaaagtgacaacatccgtggacacacgcgaaccagggaggggtgtacgtaacaaaataagtgtccgtccatgctgttgccgttgcccccagcgcccccaccccggccctccctctgacatctcacccccctccgcagccctcctgcagagtctcatttctctaccgaaactcttactggatccaggagaagaagctggcgccagctctggcagcatttctggtccggatggtggagctggtgctggggccatctaggacgctggtgctggcccctccattggtgccactgctgacgccagctctccacgtggccctcctgttggcacggttgctattcagaatgtactgatggtatctggcccagaaagcaaaggggatcctggcccaggcatcgccaaaatctccgtcctcatcccaggtcaggagctcgacttgtatgtcatcccagctccaccgtccaatcagcgcttcatccccgatattcatctgggccctcatctgggccctggcatgttcctcggccatatccacatccattgtcttgaaagcatcatccacagcctccaagaaatgagccttccattcccgggggtctcggttctgattctgaggagggaaagggcaggcatagacacagagctaccccacactggctgagcacccgcgcccgcctcaccccctcccgtgtgctttgtgcaatgatggcaaaaatcaggaccacagggattgggggctcctactctcctgtg

SEQ ID NO: 480851 - DNA, 1000 bp, Homo Sapiens
ttctttgagacagggtcttattctgtcgctcaggctggagtacagcagcgcagtcatagctcattgtagcctcaacctcccaggcttgagccatcctcccacctcagcctctccagtagctgggactacaggcatgtgccaccatgctcagctagttttttgtagagacagggttttgccttgttgcccaggctggtcttgaactcctggcctcaagtgatcctcctgcctcggcctcccaaagtgctgggattataggtgtgaaccactgttcccagccacttctacttttttgctattatgaataatgttgctatgaacatttgtgtagaggtttttgtgtggacatgtgttcctagttcccttgggtatatacctaggattggaattgctggatcgtaaactattttatccttttgaggaactgccaattgttttccaaagtgactacaccatttttcaatcactccagcaatgtaggagggttccaatttttctacatcttcaccaacagttattgtcttttaaatgttatttctttaatgaaaaaacttcatttatgcacataacacacacacacacacacacacacacacacacacacacacacacacacacacacacacacacacacacacacagacttataatggaaagccgaaagtctccagccctgtttcacccctccttagtccaagtcccattcccagcaaaccatcttccatttttatttttagtttttccagtgactatcattataattccaaagattgcttgattcattattttttcttctctttttattatgaaaactttcaattatgtataaaaggagaatagtataaccaaccccctgtacacatccccagctgcaacaactgtcaacccatgaccacttttacccactgttttttgctttatcagtgttagatgtcatacattgatttccctattgaagaaagagaatttacctaattctatcacttccaaatttttatag

SEQ ID NO: 480852 - DNA, 521 bp, Homo Sapiens; identical to SEQ ID NO: 307925

SEQ ID NO: 480853 - DNA, 1000 bp, Homo Sapiens
cattggcgcaagagcagccgccagttatggctcactccctgggagaaaagagagaaaaagtaaggtcagagacttgggtgatgagtggccacttagtagcatgatgttcatcagactggagttgtatgctgttgggggtgatcaacactgctggttacctactcaatagccatgtacccttttccttattcatgcattcatttgctcacttaacaactatttattgaatttctgtcactcttctaggtgttgagaatatagctgtgaacaaaatagacaaaaatgtttgcccctatggaatgtgcattctagtgagagagttgggcagaagcaagacaaatgtgtttgtagaaatctaattccgcacatgttctgggaaggtgggctgcatcctcatgtgtctaagcagaatatagcaatccagttcctctttacagtggcagatagaggagtgaccatgagataccaccatggccaaggaataggatgaggatgtcaaacagcagaggcggagtttttaggaacgttcttcctctctgacaaatgatccaaacaccacaaattgttgttgctcacttgcctctttctccctgacaggatgtgaggaagtgatgtttgaggccatgagagtcatcttgggaccatcgggaaggccaagaaaatgccagcctagggccttgctgtcactaagctgctgagccaactctggaatcttctttctcccagacttattattatgggaaataattaaatgggctttgttttgcttggctttgctttttttttttttttttttttgggcttacatcacctgttgtggcagttcttacttgcagctgagaccatccctaaatgatatggaggaggttataaggggacacaccagaggcacataaagcatgaaataaatctagcatatctttttagaggaaaattctcaagtgagaaggggattatgttattggaaaagcatattcgttattttacttttctatttgaa

SEQ ID NO: 480854 - DNA, 1000 bp, Homo Sapiens
agggaagtccggggctcgggcccacggccccggtgaggggtcacagggccggtcccccttttgacgcccgcccacaggtcttccttgccagcccaggccagggcgggggcgtgggtacagccggccagagcccttaatctccccaagctgattagggtccttaattaggtagggaggggcgggctagtggaggatgagagcccctactgcgcctttctggggtgggatctgtcctggcttccaggtagtcagccagatcctttcccctccatgccttccagccccccacatcaccctcatcaccaccacccctgcacaaaagcagccgcagcttcccctttcagccgtcggccacactgccctgctcagcccagaaagtaacaagtgcctgcccgtggacagctgtgggtaatccgtcctggagaagaaacactgatcccagtccctttccttacaatcttctgtttccagttctgccagctaagttcaagctccatcctttggctggcaaagtctatatcccagagaccaaacccacaccaagctgacacctgcctttcttctttcacttctcttctctctctcgccacacttgattccctgacctctgcttctccatgcctagaaaaccaccctcaggaagtaatgaaaagagctttggcctccgacagacctgggttccaagtccctcttgctgatttttggaccttgggcaattgcttaatctgagggttgttgtgaaaatgaatataattgcccggatggcaagaatagctaacaattttagagaagagtataatggaagatgccctgcacaaaagcagccgcagcttcccctttcagccgtcggccacactgccctgctcagcccagaaagtaacaagtgcctgcccgtggacagctgtgggtaatccgtcctggagaagaaacactgatcccagtccctttccttacaatcttctgtttccagttctgccagctaagttcaagctccatcctt

SEQ ID NO: 480855 - DNA, 1000 bp, Homo Sapiens
ccagtttataagtttggattgcccctcaagaaaagaggaagactgcgttcttagattctaccttaggtgttttatgaatgcgttttcacagcttagtggatcttacccagcgtaatggtgttgtcaaacaagggtggatctaactcttcccagatgtcaatatattccttacacgggaagtagaggtgggataaaacagaaaaccaggattggtggcacgggaacatttactgtcacaaataaccatcctggaattaaaagttaaactacaataccctaggtacagtaacgcaaccatctgattatcaagtatatgtcaggttcatctctcactacttttatatacgtaatactgagaaagctaaaaatgcatattctgttcactgccagtttttaaagcagaggcaagagcctaaatgcaaagggggaaaaaaaggtcaacttttctattgtcaagagtgttaataacctgcagctataaaactctccctctttcctttgacagtgtcgtagagattaataacctccacagttcaaactatactttcttgacattttctagtgactgagaaaagctacattgcaggcagagtatcactaactggaatacagccttggggagtgttgaggggaggaggtgtgggccaaacaatgaacctgagaagagaacaaactggcagggaacaattcttacatttggagagagggcttcaggggcttgtttaaattatgaatgagtgaatctttattatgatatttagttcatttttccataattttgaaagttgacatctagaagagaaaaaaattcttcaggtttgtcccaaagtatttcactctagaagtgcatgtggcaacagtaacatgatgggtaaattagacaaataaaactttgtctaaatataggcaacataagaatgaaaatgtctatatcccagaaaaatttagcctgaaatcagtattcaggaaaggcactgaggtcttcagtagtgagagaact

SEQ ID NO: 480856 - DNA, 1000 bp, Homo Sapiens; identical to SEQ ID NO: 307928

SEQ ID NO: 480857 - DNA, 1000 bp, Homo Sapiens
cggccaccttccagttagataagtaaaggccccttgggtcgatccctgttcttcctgcaatactagcttagagctagcacactgtaggcactcaatgatcattgggattaatctcataaatgtcagtaactaatgaggcactgtacctaaaatttcttctgttgctggagcatccagcaaccacttctagaggagatgtgtgatcaaaccaagggaaggactcccagactctcatcccttgctctgtgttgagctgttgaatttgcttcctttatgactgccattgtatttctagggtttatgttgagaatttcaggggatgtaaaacagagcgtcttctttggttacccagtaagaggcaagtttgagaaacgtgtcttcaatgattttgcactgctccgtaagagccctgatctgtcacctcaatctgggagtcgtttctccagccccatgtaaagggtttctaaaattcattcctgacatgtaaaggagggtgcctttaaatcaaaatcttatggcagacacatttgattgcacaacagaccatcctatcaacttgtttctgcttcctaactaaccaagttctttgtgtccctcaagaaagaaagatggcgcatacagaggaaagcaaactccaaacatcaatcaagcttggccgcataataaaagttccttatgaaacaaaacatcaactgcaaaagaaaattacatcggaaaaaaccctagcattatttgatcttgttttaaatcgaaagttttggacactttagaaaaaaggcagcaagtgactttttaatggattttatccacaggaaaatgattacaaccagaaaagctttaaagtgtcagctggtgatgtattttttctttatcacttttagttttattcagaaagaaattgaaggcatatggcaaagtgcatcattaatttcttattaatttcataatatgaaggcaaccagttaaaatagtagtgtacaactttaaattaccgaactca

SEQ ID NO: 480858 - DNA, 1000 bp, Homo Sapiens
gtggtcttcttcccaggccagcacgctccatggagagcctgcagaggccaggagaccacctctgggtgcaaacagtaatcaacatttcatagaggcattctatcattacagagactgttacaaacaccttatttgagtcttgggctcaggggaaggcaacttaggtgagacagttaccatcaattccattttacaactgcagaaatccaagttcaatgtttaagtgacttctggatacttaaatcagtagactgaatgtcagttctacaaggtcagagacacagtctcttggggtcttttcttcttcctttttctattcagtgctgcagccccagctcctagcaacatgcgtggcacacggtaactgatgaacaactgctgactacaggagtggcgtggctcactcacagggccacagagcagcagcggatttgacaacttctggtgctaagtgtcatgtttgtgataaagcagtagagaaaaaaacgaattaaccctaagtaaagtgcagggctgaggagaagacagtggttaaagcaccaaagtctcctcctagagagagaaaagctatttttttattttctttatttatatatctatgttgcccaggctggccttgaactcctgggctcaagggatcctcctgccttggcctcctgagcagcttcaactacaggtatgggccgctgccttctgctgaaagctgagagaagaaagctctgacaagtcgggtgctggcagcaccatgctatgacttggaattttcttcaaaactttctattctgtggagaagccagaaaatggaatgcactacaattagcaaaaaataccttgtggagagatttagagcccaatcataatttacatttgcagatacgtagatctctaagtgcatggcttctgccctgattactaattaatgaggtgcaaaactgcctgccggaaggaaacagtactgattatgtcagtcttatgggacagagcagctctccagtctagg

SEQ ID NO: 480859 - DNA, 1000 bp, Homo Sapiens; identical to SEQ ID NO: 307929

SEQ ID NO: 480860 - DNA, 1000 bp, Homo Sapiens; identical to SEQ ID NO: 307930

SEQ ID NO: 480861 - DNA, 1000 bp, Homo Sapiens; identical to SEQ ID NO: 307931

SEQ ID NO: 480862 - DNA, 1000 bp, Homo Sapiens
tttttttttttgccaaagggaattctttattgtaaacaagatataaagtacaacaaaagaaatattgtgcaaattgtaagtcacaaggattttttttaattaaaacttttgttttccaagggtccaagttttgatgtcagaaatctacacccaatatacaaaaacaatgttaaatgggaagatatagtgacatttttcactatatattttaagcaatgtacttttgttttgccactgtgtatatcatccactatataacagaataaaagagaaatactgttaacaaaagtgaatgttctaataatttttctacccaactacctccacatcccaaaaaactcctataaattaacaggacaacatttgtccacctgtgaataatggtcactaattttctaattcaatgaagcacacattatatcctcataacatggaggtactttgctgatgacataagccatctttttcaagaagttatctaagattcttaatatcccttctttacaatatatatttcatcttcagttttttttctaaacaaagtgcagtgtatcttagagtctacagaaaacacgttggtatacaattttcaaatctacacaagaaactgcaggcaaactaaagttcaaagcataatgaaatgcctagatacagtcatttgttaaactttcaaaacaaaaatgcaaaaacaaattgtagctatgcttcaaagcaattaaattaaggaggattccaattctttggccctcttagcaatatacagtcgttcaattccaaatattcacaatagtgtaaaaatgatagttctagatatatttaatcactacatccacgatgttgactggaaagactaggaataataaagaagataactctagaaaaagatgacaatatttgtaataatacaaactcattttacatctccatgtctgtaccgtaatgtttatttccttccagcctccatattcttgaaaccagtgctttagaagaatcacattga

SEQ ID NO: 480863 - DNA, 500 bp, Homo Sapiens
ttttatatatcaaaacacttctacttgtttctaaagacactgtaacagaaaaaaaaaaaaaccgaaaatcttgtgcatggttcatccatagcatgtggaaggaatgcctgctgaggaatgatcctgctccaagccgcctgaggctggaatgtcctgatccaccaactttctcgtaagtgaggtctcttgtcacacacaaggtacctcacacttacacacacacacacacaccgcacacacgcaagcttccatcttcctccagtgcaaacaaagtcatgtgcattacccagaaatgagtgagccagatggctggaaaagcacatacaatttatttaactctgaaaatcaaatcttccctcatgatgttcccacctcagggattagaagcaaattaaaaatctctaggggctcagaagccttctataattttgagctctgagcagttgttggatgacacaatggaacaggagaggtctttcttggtgaattaccctctgatc

SEQ ID NO: 480864 - DNA, 1000 bp, Homo Sapiens; identical to SEQ ID NO: 119883

SEQ ID NO: 480865 - DNA, 1000 bp, Homo Sapiens
aaaaaagtattggtaattgttaaaatttcggctttttaaaaaattggaggtcaatagttcactggcacacactttatattggtgccatctttaaggtattttaattaggtaacaaccacggcaaaaaatacatcattcggtataactttatttactatttattgcacataactcagggtctttaattgctaaccaccgaaggttcaaaggactacttttccatgaagtttaacattaacattagtgaattcatttactcatgtggtgttttttattgtaaacatctgaatgattcacattgccgtagatcctgaactcataagcgtggaccatgcacaggctggcagcaagccgaaagccactctgcaagcaaacagatactctgcataaagaggaaattcatagcacaacattgaatgtccaacctaagtcatctcagaattatacatatattgactttttaattcacatagaatctggaactcaactggttggttggttggtgatggggttgacctgatttcgggagaattattcctgaaataattaaggaaatgggggttcaatctttcttcttagctgcttgttcctccccagcaccttcaactttcttctcctcctcttcagcttctttggtttcctctccttcttcaccttcacctccttcttcttcttcttttgcttcttcagactcttccttggcagctttaacataaaaagaaaatgtacaaaatgcaaatccagggtaagtccagtcaaaacatgtctgcaaaggttttatttgcaaacacaactgtcagaatgctaccaaaacctcccagctccactctctccaaaagcacatgtaacagacaaagcttgccatgaataatttgccactgaacacatatttaaatcgaatgagatcacttctaggtatgggaagctctgctcctctccaagacttaacctcaatatttctttcattatgtgtctggtatctatttttgttctttaggac

SEQ ID NO: 480866 - DNA, 1000 bp, Homo Sapiens; identical to SEQ ID NO: 307936

SEQ ID NO: 480867 - DNA, 1000 bp, Homo Sapiens
gtctgccaattcttgacctccttttgaatgaagccgcctttttcattatcaggcactcattcccactcatatttttgggataaactattaatgcctccagttcttcaaacattggctcttcattgtctcaatcaaacttttttgtttttatttttttaaatttaaaacacccttttctctcagagagttggattttgtaatggaaacaatggctttaaggacagtagttagctatagatttacaaatgtctacttaaaatccaggagccaatgaattgtgtgtctcatccccaggcccaagagcaggctgcatagacagctctttctggcgcttgaacggtggaggtgtggagccagaggctgtggggagaagatggaaaaagccccaagctcagtgtcaaaacacacaccctgccgtagctctctcctgggctaggtgggattgtgggtgtcacatgcttccctgtgaagagactaccaaacaggctttgtgtgaacaataaagctttttaatcacctgggtgcaggtgggctgagtccaaaaagagtcagcaaagggtggtgggattatcattagttcttgtaggtttgggataggcggtggagttaggagcaattttttgtgggcagggggtggatcttacaaagcacattctcaatggcggagagaatattacaaaataccttcttaagggtgcgggggtgcgggcgtggggtgggtggggagaatattacaaagcaccttctcaagggtggggaaggtgtattgtcacaaggtcaattgatcagttagggtggggcaggaacaaatcacaatggtggaatgtcatcagttaaggcaggaactggctattttcacttcttttgtggatcttcagttgcttcaggccatctgggtgtatacgtgcagggcacaggggatatgatggcttagcttgggctcagaggcctgacagtgggtaatttccactctctttgtctgtagtttctgaatttctta

SEQ ID NO: 480868 - DNA, 1000 bp, Homo Sapiens
atatttgttgagtgagtgaatgaatgaatgaatggtggacattcaataaataattcgataaataaataattggtgatcaaatgaacaaatggggcaggagttctaaggatctaaatcagactgccagaagagcaggggtaaggtgtgatcaagtttgggaaccgcaggcatggaaagaaaaaagttcacagacactattcagaacttttcgtgagtgtgtttattaactcttactccccacgggcaaggctgggttttggtgagggaaagaaaagaccctcattgaggacattgctgggtaaaaagccttcagagagctacctactctttgtgggtgtggtaatgggcagccttcagcgcaatggctaccagggatatgaattcttgaaagtcgacctgttcatcttgattagcatccaggccttggaatatttcatcaatgacagctttatctttgatattctaggaaaaaaggacaacagagaccttgagttcagaacctccacacaagaccctttcttaggcctcttatccctcagagctcgggttgtgaaggcccaggcacattaactcattagccaacactgtgttggagaatccagtgtaacaaaacagagaacacaatggtcatgaaccaccctggaattaacaaggcttgacctggaaggtactcttctgctcactcattcaacccctcccgtgccctgcctctctccattttacatatgaggaaacagactcagagagaggaactgagtagagccttaagtgagttattgagagagggaagcaaaggacctctcccacagcagcggggagagcatcctttgggagctcaaactggggccaaccccaccccagtccttgtcccaccatcctctgccaggccttgccactcccctcagtgcagggtcatgggcaagtttgcagtgagaggggcatcacctaccttgatggtgtttgcaagctcctttgtaagcagctgcttcagctcaccctt

SEQ ID NO: 480869 - DNA, 1000 bp, Homo Sapiens
gtgatgccaagttttccagtgcaagttcatttattcaagtctttgagcccgaaagagcattataaagttttcttatctccttttcttgattgtgaactccctgggagcaagaatggggtcaagttttgagtatggcttattagtaatgatctatataattactgacaaaagaaacataattttcattaaatatttgtagaacctactttttcctaacatcattgcttgccattttatgagttgttttctgcacatcaaagaaaggcaagatgtagtacaaatgctgatgtcaaatgtcagcattttaatccttaaagtcatctcttgattggtgtgttctttctttatttatttttaataaaaaattgtatttgcttagaagcattcagaatgtcaacaaaatggctacaactttttcttttctttttttttttttttttgcaattacagagtggtattcacttaacaacagtcattttatataagctgcatcagagacaactgaagatgaaaaaactaccatccccatatataactaatttgtgccatgcactaacaagaacctgcttttaatttccatgccagtttacaatccccatactgtactaggcaaggttggtggctattgaaaataccaccaggacagggatatctaaagacacatttggtagtgtgttaactatacaaaaaaaaaaagacattgtacagtttaaaaacaaatcttacacagccttacatttcagtttttttctttaaaaggagtgagttatgtacaggttaaatgctttatagacgagaaaaaaaactacactagaaccaacttattcatcatcatcttcatcttcctcctcctcattcttatcctcttcatcttcctcatcttcctcctcttccttctttttcttgcttttttcagccttgacaactccctttttttgctgcagcaggctttcctttagcccgatatgcagcaatatccttttcttacttttccttcagc

SEQ ID NO: 480870 - DNA, 1000 bp, Homo Sapiens
actgcttagtgggcccttcccagtcccatcagcctggtgtggtttatgtaaacctcaagactagttagacacaactttctagaagcctgccctgatctctcaggcagtttttagttctatcttcatattcccagagaacactgtacttagattcatttgcatttttctcattgtattgcaatggtgagcagaggaaagagcatcagatagtcctaaatagttcgaccactgaccacctgctgaccatggaggagtcacctacttacaggctgcagggttgttgtgaaaattaaataaggtaaaataggggaaattattgtgatatagtagagtggaagggacttaaaaatcatttagtcaacttgacacttcttctgagacttttttttttttttttttttttgagacggagtctcgctctgtcgcccaggctggagtgcagtggcgcgatctcggctcactgcaagctctgcctcccgggttcacaccattctcctgtctcagcctcccgagtagctgggactacaggcgcccaccatcatgcccggctaattttttgtattttttagtagagacggggtttcaccatgttagccaggatggtcttgatctcctgacatcgtgatctactcgcctcagcctcccaaagtgctgggattacaggcgtgagccaccccgcctggccagagactacattttatacatataaaatctcaaggcatttacttgaaatttcttgacgcagacaatgtaatataaaatgagttgcaaagttcggagaacgctagagccagctaactccttgatggcattgcattgctaggtctactttcttgccctagcaaaaatggcagtttcctttctggattactccctcctcaccttctgttagtttcagagtgacttgttgataactgccaaggtccccagaaagcgcctagccaaaaaggttcttcacttctctttaaagatgtgcactccctaatacatgaaacagcat

SEQ ID NO: 480871 - DNA, 1000 bp, Homo Sapiens
  misc_feature (466)..(467): n is a, c, g, or t
  misc_feature (549)..(549): n is a, c, g, or t
ggatcccccaaaactcagggtctaggtccctgctggacacttggagcccgccccactcctcagcctccgggactttgcccttttccagagctcctcatctgcaggatggagccagggccctaaggaggcccatgtgtgcctccgaacaggcacagctcagccccaaggggctgcccaccttgtagggcccagtgtgctggcaggacctcgaaacaccaccaggccagggcccttactcaccgggagagttcaggaccaagacggtgtggtttgtggcctggggccacacaggggaccaaaaagcaatctccacgggcggtgaggggcacttgtacttttatcacggacaacgtgcccccatccacatccacaaatcagtgctgtccaggccaaacccactaatccctgtccagctgctgccctccgagggcctcgcccacgcttctgtcacattgtcactcgccannacaatgtacagcagctgttcccctcttacctgacgtttaaaagcacatgccagttgttaacacttacaacaagggaaaaacnaacaaggggaaagtgaaactcgctgggacgcagccgcaggaccacgtttctgttcctgttggggtgcccgggtgggtttcacaggtcgcctccagttctgcaggctgaacccgtctgcttgggcaccccgcactgcctgcttcttgggcactctggggcgacatggaaggaattgcacttgtctcaggtttcatgcacgcagtcaggagtctgcaccaagaacggtccatcaacgcgggagtcctccccgggaggggcttccgtgcctcccattctgggcacttccagactttctgcaagaagtgctgtccttgagtcattgttttgtcccgaggctgctgcgaggagggggacaggtgagcacgtgttggagggtggggacctgcgggacagcttcagtccaggcacagccgcaggtcccggctgccctgctttccctggcccaagaaga

SEQ ID NO: 480872 - DNA, 1000 bp, Homo Sapiens; identical to SEQ ID NO: 307939

SEQ ID NO: 480873 - DNA, 1000 bp, Homo Sapiens
ccgcctcccatacacatatatatgaaatcaaaatctagacacatataacttggacatccaaagaggactgctactcttcatacattcaaaaagagttgttgaaatttctactcatgaagcagctcttgtaggcagttcggggatttgaaaaactcagggacttcactatccagcttgcagatgaccttgtatatggccttcttccaggaaggatcaacatctttgcctgcgataatggcattgaaaaactcccgtaatgtgatctgagccacttccaggaatctctctggaacctcaaagtcatttgctttattgtagtgcatgttcagagccctgtacagctcacagtctctggttatagacagctcttcagtactggtgaccccatcgttgatggcttgacgtgcgtacttctccatctgaatgtagtaaaactcacggaaattgctaaaccacttgatgagctgagaggtaatgcatctgttgaactttacgtcggagaagtaggtcttcagcatattggagctgggataacgggtataaaaaaacatgagctttgcttttttcaagtgattgggtgacaatccttcctgcattgcacttcccgaataaggtgatatttcagacatatcttgaagatcgccgcactcggactttatgagcgacaaggagagcccttcggcggtgctgggcgggtgtgctggtgaacaagggtggtggctcaggtggtgagatgacatcttggtcctcagactcgtggtatccctagttaagtctaaggattcaggagaggctctgtcttttccagagaaggagccggagggagcacctaatgggctctgaaatggataggccatcaagggaagggggaaggggtggcggaaggtggacgtggtgaagcccgtggtggcagagagaggcgactggtgcaggggctggtggtggccgcccaccaggccggaggcagactggtcagaggagtttttgcggacaaccaggg

SEQ ID NO: 480874 - DNA, 1000 bp, Homo Sapiens
ttactttgctctccaccctttgttcttggaaggcagagaccctgccttttgccctcatacttcacaccaggcagccgcttgtgccgaccacacttaatatgctgagtgccatgggggacagcacatcagcgggtgttctgatgtcttgtgagaactgtgacaaatttatgttgagtaataactaggtgctggcactgtattgtgtcatttaatcttcacaataacacagttaattaggtcccaccgttttctgaatttcatcaatgaggaaatagcagcaaagaggaggtaacaaattcggtgcaggtgcttagcccaaagactaataatacatttcaaaatgtgcttacatttattgtgcacttactatgtgccaggtgcaacgctagccctttgcacgagttgttccattttaccctttctctgatccttttaggtagattctagtattaccttcctttttcagaagaggagaccaatggggagcattggaatgatttggttgcaagcatactacactacttgtaaactgcagacacaggcttaaaaaaagtgaaaaactaaccatgcaataaagaatggaatgaaccatgaagctgtttctgtggccagtcatgtttttgaagcatatcccatgctaatttctagaacagaagaaacacacgtgttcttgtgtgtaaacccagtccatggaagagaccgtctgcttgtccctcctgatctctgggcccagacaaccagtagtcaccattccaagtgaggggtggctgcaactctacagccccgttcgtctctcctcactgtcaaagctgctgagaccccagactcgacacttgaaagaaacccatgtctgtgaagcacttgtggaccattcaagattgtggaagaatcactcaagagaaggagataggtgatgggatctagcttctgatggtttctattttattgaatgtctaatagggcaagaatttgaaaaacgagaatgtttgtcatgcaggag

SEQ ID NO: 480875 - DNA, 25 bp, Homo Sapiens
ctggttttattttcattttcctaaa

SEQ ID NO: 480876 - DNA, 20 bp, Homo Sapiens
aaatgcccaggtatagccct

SEQ ID NO: 480877 - DNA, 22 bp, Homo Sapiens
cctgtgattgatatgccacatt

SEQ ID NO: 480878 - DNA, 22 bp, Homo Sapiens
ggatgtattttccagctttgga

SEQ ID NO: 480879 - DNA, 23 bp, Homo Sapiens
ctggaggtcaatataccacagat

SEQ ID NO: 480880 - DNA, 1000 bp, Homo Sapiens
ctgccggatggaaggactttgttttttgtgatggacttgaatgtgagagggaatgagtcttttgtgtgtgtgtgtgtgtgtgtgtgtgtgtgtgtgtgtttcacatgtgggatggcctggagggtatacttttttctagtcttatgtgttttttagcatgggtgatgtgggagagattgctagttgtttatcaatatcagtgtcttttacacaaatagaacttctgatttttagttggacacatgttccctttgaataaagataacaattgcagccagctgtggcagaagaaaagtgtacaccttccaggtggtatccttcttttttcattttcttgagttagaattcagacatgccaatgagccatcttggacatgcaggtgtaaacaagcactctaggaatggtggttctgagatagaaggcctcctggacagcctcataggacagaactaccatatcagccctggactgcctttccagggtgttttgtgtgagataaataaatttagatttgcttaagccattgtaaattcgggtcttcgttacagtagctgaacttacatcctaactagcaagtggtggaaggagaggaggctaatcaatgtaacgggatgttacacatacaagaaacttgctcaataggtgccaagaaaaggtggtgaatagtggatagatgtggactacaaggaggttcccagaagcagcagtattgtctctgttaatgctacagaggtaaccaagcctttaaggaacatattagaagtatagtattcccatgtaatgcaatacccagaaatgcattgtggagaaaaaacaattctttatcactgaaactcaataaacaacttaaggtattccctagaagaaatgattaaaactccatcccagtactgtttggctgaccttaagatcaacttgatgtttagcatcccatatttatagagtttagattttaaagaggaaggattaatgaacatgtttactgactgattaaaagaa

SEQ ID NO: 480881 - DNA, 1000 bp, Homo Sapiens; identical to SEQ ID NO: 307949

SEQ ID NO: 480882 - DNA, 1000 bp, Homo Sapiens
gaattctgaggattaataggattgatggggctaattcaagaactagccactggttccaggctgcccttccatgtggggggagtcaggtgctgggagctcatggtgggcaccgggcgatgggagcacttccaggggcagggagtgcagaggcgtggaagctgcagaaaacaagggccatgtccctctcaagatgaaagggacctgtaggcctctacacagtcttgcaacgaccctcaaaagtttctgcaaaatgcacatttctcaggccctgccctaacccagctgggagatccctaagtgctgcctgcttggcatctgtgacggtgccaaggcagggactgggagggaagccgcgtgtcccagccctgcctgcacccaaggatcgaagccccagacacatagtgcctggcagagggaggatgggatgaggaccttggacccacgtctccctccagacccacaaccatgtctaaaaggagaaggggggagcagaatcatattaatttggacccatgggatgagtgttttattcatgctgtttccaggaagggatgtcagagctggaccagtcgaaacccttggaggctttttttgcagttggccacaggggcgttggaggcctgcttatgggtcctcgatgtcgagaaactcctgcttggggggcgccgcgccgcggtaccacgcacaggagccgtcacttctcttgatgcaggcgaagaacttggcctggtgcccgttgatgttcttctctgtgacccagtccatccagaggcactcgtccggggaggagatgtagcacgggatcatggggcagcgcgtgatctggggaggggcacacggagggggacggagtcagggacccaggaaggggtgggcagaggctgctctgggggcatgtccagaacccggcaatgtgcctacctgtcatgtgcagggatggcagcctctcccgagacccacggttctgcaggagaggcagctggcctgcgagggggtctaa

SEQ ID NO: 480883 - DNA, 1000 bp, Homo Sapiens
tttgcttcttatttctaaagttatatatctaaacctacattaatgatacatctatgtacagtatttagcagtgctgtgctatggtacttttgtacatgctgggttttattactaattacaaaaagaaaataattacataaggcatatatatgtacagtggtttgtcttcagctcacctgggccctgtaactgccacacccacatgggggcaagcacctcaccctgtagtagatgaaatgaattgggatccataaaactgagggctccactctgtgtctcactgaatgaataaataggcaccagaaaccttgcttgtcatatcccaggtaaaatctttgacacacctttttgagtgatctggtattgtacaacacatgcaggtaagtaactgaaatctccaggagttggatgtgtagtattttgggaggagaccaggcttgggccacaaatgagggcactttgcactttcatcaaatccatgtctaccttgtcaatctgaataactgagagagggcaggtagatattttacaccttgaagatttgttttctggtcatgtaaaaattaaatataaacaaataaagaacaaagcaagagagacagaaaaagaaagagaatgagagacaaggaaagattgtgttggggggagaagagaagggtttgcccagctagggcactaaactttggattcattctccaggtttgccacatcaccatttctttctgtttgctcttcgaggttcttttcttcctcttcagtctccagttctgcatgttggttgagtttgctggatacagaccaactcaggggcagctctgccctgctggctaactcggccagctctttggcactaagggatggggtgctggtctcataggtctcatggaagctgttgtagtcaacttcgtagaacccatcctccagggtcaggacaggtgtgaaccggtaaccccacaggatctcactggtgatgtaggagcttcgagcttggcatgtcatc

SEQ ID NO: 480884 - DNA, 1000 bp, Homo Sapiens; identical to SEQ ID NO: 307951

SEQ ID NO: 480885 - DNA, 1000 bp, Homo Sapiens
tacaggaactataggagagaaaacaaaaacaatgtgccctctcccaagaacacagagcatttgctaggagttttctggcatagcctttactgtggctacgctttctcctcttaggcaccagcccatgtttctgctgccttttactggactctgaagtcctcaaggatgggacctgcctatgcatatctgcacatccaacttggtactggtgcctgggacatcacagaccctactggagttcagagagtgggaatggcttggagacttcctggtgtcctaaaatatcaatttttaccgtttcaaaatagaaattaaggatagtctacagaagatgaagctttttgtaaaaaaaaaatcatatcctagaaaatgtatctcgtaaatctttttaaattttcaaaagaaaccagtgtagaaacttgtgatggaacatctcagatacggcaatataataattttgcaaattccattatttaggttactgccatttctaagtcacagaataattcaacagtaataaatatcatgtaacagaataatttaacgcactgattgctactttgatatttatcatcagctttccatttcagaaaacatcacagaagtacaaataaaatctgcttttctgaatattccaaaaggcagacagcagcttatataatttccgttcttcagaaaacagtaattagattatgtaaacaactgtccgtaagagctaaaagtaaacttggaggttcctgaggattactgaacttatgcaacatgctaactttctaagactaaaactgggaagttccacagatgttaaagatttttgtgtgtgtgtgtaaaatgtgaacataggatctatttacatagttggaattgggaacagtttttaacatgttctgaatcagctttaaatgtttatgaaataagcttacatttgtcttatccaaccatttataatctttattctataattctccaccagtgctagaattttcttcccaaatggcct

SEQ ID NO: 480886 - DNA, 1000 bp, Homo Sapiens; identical to SEQ ID NO: 307952

SEQ ID NO: 480887 - DNA, 1000 bp, Homo Sapiens
ttagcacttaaatatattcagattttattaccatcgtctatagaaatttaacactagccatctgtgcaactgtcctctgaggcagaggaacaccatacgcaaatattacacactaagaacagtaccacattcgacaagactctttcttgattcagtaaaccaagcttgacaaaccggccaacccaaggtgaatgattacagttatagggtacaggggaaattatcacctagtgaatattacaaacaatattaaaatgttacacagacttacaaaagttctgcttttttttttccctaagactgtatgtatatgtgtgtgtgcgtacacaggttcacaatatggaaacctgtaccttacagcactcttgaggtttcagcaaagcatacattatagacatatttgccatacagtgcaattttattgtataagccatgaataatagtgcacttaaatccaagagtcacattcaaatattatcaagagaacaatccaaatacccggctattgaagaaatacacattctttgtttttataaactaagttctgcaactacaacatttttttgtgtagatggtattagatcagtaaggttttaaacaatgagatttagggtgcattttgtagaataattcacctctccaaagataacgtgcattttaaaagtgaagcaaatgtcttggccagacaaacacaggcagtgttgtacaactcagttttattacaaatcacaaatatagttaatccttagacctgcagacggttaaagagaatggctctagaagtcagtaaactctcatcagaattactttgcaggacaatgtagtgtttacagtgagcctcattatcttccactaaattgggcacaaattactgttccacagtgtagttcaagagctggaacattaagtttcttaaaaaggatttagataacaggttcaggcattttaatatccagtcctagaatttcagagggtctcttctgggactattggtttaaag

SEQ ID NO: 480888 - DNA, 1000 bp, Homo Sapiens
ttgaggccaggtgcggtggctcacgcctgtaatcccaacactttgggagaccgaggtggctgggtcacctgaggttaggatcgagaccagcctgaccaacatggtgaaaccccgtctctactaaatacaaaaaattagccgggcttggtggcgcgcgcctgtaatcccagctattcgggaggctgaggcaggaggattgcattgaacccggaagccagaggttgcagtgagcctagattgtgccattgcactccagcctgggcaataagagctaaactccttctcaaaaaaagttttaaaaataaaataaacaagggccctcgtgacttcataatcaaaagaagaatgatgcagagagatttgggacagagattaaatacaacagttaatcgcttggaatttgtgaaggcagaggtgtacgtgaatttagggtaaaggtaggtgaaaaggcaatgatgagaggagcagagactgaagagtcgcactcacagcctgcaaactaataccagctagcctggcctgactaatcgcttcttccccactcctccccaggacaaaaatccctgaacaaacagatgaggtttagcagaactgactactctctgggtcctttaaacaaagtggatttgtacacgttcccttggccacccagcaggctgcactgttcactcaaagcagaaatggccctcagcatccagtcgagtttagtactggctgtcattggcagatctgctccgtttggcctcttctacaactgtgattgccacgtgtgctgactagttggtgacagggtctggtagacccccagctgcttcccctccccactcccactagttatagagcagtaggaacataggcactcatttctattgggtctctgttggctaccttctatatacaccaagatgactggccttttcactgtttgattcattcattcaaaaaatattgatagtattcttggtgctagaaatacagtggtgaataaacagaagaagcc

SEQ ID NO: 480889 - DNA, 1000 bp, Homo Sapiens
ctttttctttataaattacccagtctcgggtatataaaagcagcatgaaaatggactaatacaacattcttttcaggatcggtcacctgatcaacaactaatagccttataggctatttgtgtccctcccaaaatttatagggtgaagtcctaacccacagcatctcagaatgggactctatttggagagagggtctttaaagagataatgaagttaaaatgaggtcattaagcgaatctagtaggactggtgtccttctaacaagaggagatgaggacacagacatacacagagagaaaccatgtgaggacacagagacgggacggcatctccaagccaaggagagagtcctcagaagaaccagccctgccgacaccttgaccttggacttgcagcctccaagatcattgcaagaaaatgcatttgtgttgctgaagctgcccatctgtggtattttgttactgcagcccaagcaaactaagatgtaggctttttacatttcacctagtccaggaggccttctttttctccatacccttgacttcccttttgtagctcttctttttttaaaatttttaattatttgtgggtagatagtaggtgtatatatatttatggggtacatgagatgttttgatacaggcatgcaatgtgtaatgatcacatcttggaagatgggatattaatctcccctcaagcatttatccttcatgttacaaacaatccaatgactctcttttatttttgagacagagtctcactctatcacctaggctggagtgccgtggtgtgatcttggctcactgcaacctctgcctctcaggttcaagctattctcatgcctcagcctcctgagtagctgggattacaggcatacaccaccatggccagcaatttttgtatttttagtagaaaaagggtttcaccatgttgtccgggctggtcttgaactcctgacttcaagtgatccgcctgcctcagcctcccaaaatgctggga

SEQ ID NO: 480890 - DNA, 1000 bp, Homo Sapiens
gatcaatttaatggggtttttgaggacttttatcagctgttaggcttttcttgaggagcagccaccagaatttcctgtctgattgtagaagccaatctgcttttgatcttgtacatggaaaaaataagtgttttgtaagtggtttgttttgttgtttttgacacccttcctgatgatacccactacattcttggcctttgaggaccacaatcacaaccggcgcaacatctccacagaatgaacaacagtgatttttagttttttactctgacgatcatattactgtatattgtcctaattcagacacaaatgagatatcccttgctcttgagataatctccaccaactatccagacaaatctcagctacttggttgctccagctgaaggagatgattgattacggaaggtctgatgtgactctctcacttcatcatcagcaagtgtgtccccaccagggagacttttctaacatttcacatggagaactgtgctgatctctctgctctgtatcctacctgccctaacttccttgtgtgccctgcttaaaaagtttttaaattgacagatgatatacatacatctacagtgatttccaggtccctttcttgagtcataactgagagcccagagcccatcatctcataagtatggataggtttacttttgcctacctgcatgaagtgtctctgactgttctgcccacttggtctcatgagagcttcctgcagtttactctcatcagcttgccttcactccttacagataaactggtaagaaacctgaatgtactgcccgttgaagggtgtatatttttatctttcttcctctccatccaagatttgctgtaacagcagttgtttgtgtttaaaaactaaaatataaaaatatgacctacgtggccaaatcccacaaggctgtttacttccttatttactgaatcagaatctgtcagcacaatgtagaattctgagtgtcagcagatactgaaaattaaatgt

SEQ ID NO: 480891 - DNA, 1000 bp, Homo Sapiens; identical to SEQ ID NO: 307953

SEQ ID NO: 480892 - DNA, 1000 bp, Homo Sapiens
agactggctcatgttcctagtcatcagatgggatcatggctaatgtttccaatatggtaaccattaaaaattatatatttaggcacacccctcatatcatttaagtctgcctttgagaaacatgctggatggctcttcatgtttgaaagaaattatattgttgcccatgagaaaataaaaatgcacacagagtaaagagcctaagaatgcacttactgaggagtgagtcaccgtgtctcccaatgtccccacccacagcggaaatccgcactccctgttttgtcagtatccctctcgcttttgatctgatgttttcggctgttcatgacagtgttctccaaaaaaagatgcacagagggaaggttttctctctggtcccaacacgtgtattaaagtcatatttcatgagtgaaaaattcctgatggaccactaagacgcaggtattgaatcagtactgtgtgcataaactcctagatatgggcagctttgcttgcataagaacttcaaaattgagtcctggccgagtgcggtggctcatgcctgtaatcccagcactttggcaggccgaggcgggtggatcacctgaggtcaggagttcaagagcagcctggccaacatggtgaaaaccccatctctactaaaaatacaaaaattaagccaggcatggtggtgcacgcctgtaatcccagctactcgggaggctgaggcaggagaatcgcttaaaccagggaggcagaggttgcagtgagccgagatcgtgccactgcactccagccgggtgacagagcgagacttcatctcaaaaaaataaataaataaataaaaataataataatttaaaaaaataaaaggccgggcgcagtggctcacatctgtaatcccagcactttgggaggccaaggagggtggatcacctgaggtcaggagagttcaagaccagcctgaccaacatggagaaaccccgtctctactaaaaatacaaaattagccgggcgtggt

SEQ ID NO: 480893 - DNA, 1000 bp, Homo Sapiens; identical to SEQ ID NO: 307954

SEQ ID NO: 480894 - DNA, 1000 bp, Homo Sapiens; identical to SEQ ID NO: 119885

SEQ ID NO: 480895 - DNA, 1000 bp, Homo Sapiens
gacgcttcctcatccaaactccgtttaagttatgtcaacctgttctctttcacagcacactgctgttttcctctgggtttctctttttacaatttgagacccaggcactgcatatgtatatctatatctgtacatacatgtgtctgtgtctatgcatatatgcatgtatgtatccacctatctctatctatctaccttcctcccatctatctacctatctcttttctatctgctatctatctatccatctatccatctgtcacctatctctatctcctatctatctatctatctatctatctatctatctatctatctatctatcatctatctatctatccagtgatctaatgtctgtttaatacttttctcctcttgtttatgaaggtaggaaacagtcttggtctgtcctcaggtataaccctgataactagccagtacctagaatagagtatgtgtttaataaatatgtgttggatttacacaatgactgaaccaatgtgtcagtgacccctattttctaatagaaacattggttatcaagcagatttaatgcttgcatcgatatgatgtgagcgaggtaaacgtatgacccttccaagatcaaaggtcttctttttctaaagttactatcctatggacttgttacagtgctttgacaactgtgaaagacaatgcaactctaatgtgattagtttgccatattttccctctctgatatttgatatttaaaagatcaaaccttaaacaagatcatctaatttgagaatgatttttctcctgtattcattcccatgcatggaggccactgggatctacggatgaacaacccaggaccccaggtcccaggaagtgcccaggctagatgtaggggagagatgaggaaaccaccaaccgcaactgagtgggatgagggctaggtgaattcacaagccactttatatgagcaagaggcagtggtaagatcttacattcctaattccagatttcccaggtgagt

SEQ ID NO: 480896 - DNA, 1000 bp, Homo Sapiens; identical to SEQ ID NO: 307957

SEQ ID NO: 480897 - DNA, 1000 bp, Homo Sapiens
ggacaaatttgaaactgggtgaaaaattgcaacttcttagctttaagttctcctttaccaaatatctctgaagtttattccattctcatgttaaaaaaaaattgtaaccaaaagcagcattactmctatgtatcttagkagtgaacaataaagtgcatcatytttcccacacagataataacmaaattcttatttaaaaatcaattaagaaacctctaattaaaggggcagtgaatggaaacagkagacttggcctaaatatgcttgtggagcagctgggggcctgcatctgtcatgggtaaaatactttactcatttgtgggaagtgggtccccttttgtwggttgtcagggctcaatttagtccctgaaaaagatgtcaccctattattttatgtggtcctcagcttaaaaaggtgtctaactgtaagtactacacctctaaagagagatgttagaaataatcactgccttggaaaaaagattctaataaagcaaattttaaaaacaaatacaaagccaaacttctcctaagcacaagagtttgaatatgtagaaggtcattttatttgttttttgtttgttttgttgagtagtagaaggaaaagatcatatgacttcatataacccacatggcatctgggagcactttgctcttaaaatttaagtagattggtcaagcttccattccatacatagtctcaggctcaatccaaagatttttataacttttcagggacatgggtccttgtgcttatttttctgctcctgtgaatgttttgtttgtttgtttttccttttttggtcgtttatgattttttttccckgatattgtctctattctgtactgygtgtgggttcagaaatgaagttcaccttcttgccttgatttctgcaaataaaaactcaacccaatcataaaagcctctgtatgtgtagaggattctactggatgtctggagagacaaaaagaattccagaagtagatattcattcagcac

SEQ ID NO: 480898 - DNA, 1000 bp, Homo Sapiens
gctatgggtcattgtttaatgggtatagaattgcagttttgcaagatgaaaagagttccagagatggatgctagtgatggtagcatgaatgtatttataacacacttaaaagtggttaagatggtaaattttatattggtgtattttaccacaatgaatacatttggaaaaataactattgattttcagagctttttggatttcagaattctagaaatgggatctcagaccaatacttggatataggggctaaccttttaatcctaatgmagttttaaaaataaggtactcaagttttctgtgccttactttcttctatcaaacaaagtatggcatacatcttcaaattagacaatgaaatgctcaaattgttacctcctctgtggagtttttttattattcagataacttatcaagaatggttgaacagattatccaaactaattttggtttccaacgggtacgtctctggaaagaatcccttgggttggcactgagcactctgacttttctccgtgatcatgatcttcagcagtaccatgaagacagcagaactcaaagttccaaggaattttcatttttcaaccaatcttcttctgtcttttctccactgacatcttccattgcaagtagatcatctttagtgtcttccagtcaaggggaaccacatagtcatcaggcaacaaggattccattggaacgcctggagatccaaaaagctttactaattgaaaggcaaacccttgtgataatggtagctcaagggaacggtagtcagtgcttgttaagtcttggctgtcctcagctggtaattccttaggttcttcccatcttttcagctttctatcaaacctttcatttaaaaagtgaaaatcagaagtgactcccaaagagcacgaagtatcaggatgactatgtaaaatttctggagaaataaaccctgcatcatttagtttattacctactcttgtctgagattcgaaagtcaaaaacagtttct

SEQ ID NO: 480899 - DNA, 1000 bp, Homo Sapiens
tttttttttttttttacctttttaaaggccccatctccaaatatggtcacattctaggtactaggagttaggactttaacttatatacatttggagagcatacaattcaacccctaaaattctgccatctgscccctcaaaattcatgtccttctcagacacaaaacacatccactccatcccaacagcsccaaagtcttgacccacttcagtatcaactctaagccccaaatctcatctaaatatcatttagatcaggtacaggcatactcaaggtttcaccctgaggcaaaattcttctccagcatgaacctgtgaaactagacaagttatttgcttccaaaatacaccactggtgagacaggcataggataaacattcctattccaaaaaaatcagaaagaaggggtgatggatcctaagcaggtctgaaacgtataaaggcaaatcccattagattttaaggctcaagaataatcttcttcagcttcattctccatcttcccacctaacaggggtggcagccctgtcttctgagcccaccagtgtggtagcccacctccctcagcsctaagaagtagcctgcgttgactcgtcaggcctgagccctctgtcctgtggtagcaatagtagccsctttgccttctcaataatcttcagggtcattcttccctcttcttgaagaacacatgttcacagccagatagctctactgacccattttatagaatctcaagaaatccaacagacttccttcatttttatccctctgttcccttcggtaccagccagcagcatttccataggtataaccccatctctatcctggcttctgctagttgctgccaagatggctgattggatccacaagtcacatatccctaattgctttaggaaatggttgtcttgcaacaactttgatgttccctccagaacatgctaaatttttgcaatatggatagactgagaattttccgaatcttcaggctctggttgcttt

SEQ ID NO: 480900 - DNA, 1000 bp, Homo Sapiens
tggctcattcaaaattctacaaagtttttttaaaaaatagctgggtgtgctggtacacgtatgtagtcccagctacctgcctgtagtcctagttactcaggaggctgaggcagggggatcccttgagtccaggaattcgaggctgcactgagctatgattgtgtcactacgctccagcctgggcaacaaagcaagaccccatctctaaaacacacacaaacatcctcactgaaattccttactgtatttgacaattaaaaagaaaagcattactatttttcttgtatatattatactttagggcaaccctagttggcagctttgagagaagttcttcattacagaagaattccattaaacatggaaggaataactaaactaaaaatcatcactttgcaattctgaatgaaataactgactcaggaaacaatttattattggataaaaccatcagatataaggttaatagggaacttgacagcagacagagggaagaggttgtccctgtgcagctactgattaagctcaccattactaagaacaggacaaccaaatatctgcttgccaaaaaaaaaaaaaaaaaaaatgttgaacctaatcaagcctctaatctagagctaatttccattcacagaaaacaaagaagaggagcaagttaaatggttaacaccragaagcaaatagacaactacagcatgtggaactttctacaggacaaacaacatagtttctgcaacaatttaatggtatgagggttaaaagaaggaacatgctatggattaacttaattaaataaaacaaaatgcattttgaggacttcgtttggatcccaattcaaacaaaataactgtgaagagattttttcgaacaacagaggagattcaattacacactgggttacatgatctgaaggaactggcatttttttaaatgtgtgataacggcactgaagtgaaagatgtgattagtaaaaaagttattttgaaatgtataaagtatg

SEQ ID NO: 480901 - DNA, 1000 bp, Homo Sapiens; identical to SEQ ID NO: 307959

SEQ ID NO: 480902 - DNA, 1000 bp, Homo Sapiens
tttaaaagtgtttggcagtccccctcctctctctctctcccgctgctatgtaagacatagcttgcttccctttggtctctgccatgattgtaagtttcctgaggcctcctcaggcatgtggaactgtgagtcaatgaaacctctttccttcataaattacccagtctcaggtagttcttcatggtcgtgtgacaacagactaatacacccagctaggaagtggaggagctggaattcaaactcaggtcttattgactccagctgtgtccacaaccatgccctcattaactctcccctgagtgggccctgcccttcccctaagatcaggccattccccacatcccactgtctccacaaactcttttcgggctcttgttgggctgtgggtccttggagccccactcactccgactctgagacttcagcccaggtttctgctcctctgaagtctgagcagaaatcggaatattaaacttactgatgctgttgctaaaaatcaggctgaggtagtggcaccagcacgctgcttccagcccactgagcttcatcctgcttctcgggagaagaaggggtccaggccctctctaccaggtactggggcccaattctgcctgggaactgagtcggacaggcactgggttggacatccctacaggcccgggcgtctgctcacttgtgatatctgtaacagtggctcacacttctaaacaaatcctcagggccaagctcagctctccggctccacatctactggttcatttaatcctcacacccactgtattagttccctgttgccactgcaataagttattacaaacttagtggcttaaggcaaatgtattatcttctagttctgtagggtggagggctacacaggtctcactgggctcaaatcaaggtattggcaggactgagttcctttctagcggcttccatatggaagtatgtcctcctctgggacctggagggcctaggcggcaggctgggcctcaggggctta

SEQ ID NO: 480903 - DNA, 1000 bp, Homo Sapiens
ggccgcgccgccgcccgcccccgaccaggcggggtctgcaggggacgaggggttcccgccccaaaccccggctccctgtccgcaggccccgcccctgcagcgctccgccctgcgtcccgccttcctcgcactcccctaccagctcccagctggggctggcagcgccgccagggcacgcttccggtcatctgtgcaccctcccgccttgtagacttgatttccggtcccaccgccaggttccgggaaccaccgggtggtgacgtcacatccggcgtgccaaactcgcgtggccggcagtcaaaaccccgggtaggtgcagaatctcgagtaggtgcacgtggtacctacctcgagacccgccccctcatcacggaattgcctgagaaagccagtcctggcgcccagatcttcaccttattcatccatccagtcagtcacgccacccaatagctgttgctcaatacttattacacgaatgaaatctaaggcccaccacatgatcctctgggtgtctctcctggaatcctcactataatactttgagatagataagaaaccaaagttgacaaaaattatgtcattgccacagggcagttttgtgtcctttctggacacccgattccagcatctctagtgtgtcctctggcccacatttcttcaacagatgacaacaggggtgccaaggaagtgttttaactaccaggaaattgattggaaatagttcctgagctggggaattccatgaatgcatccccttcctcctcacaagcacaagccatccttctcatttttcctttaaaaaaaaaaaaaagggcccggcccagtggctcatgcctgtaatcctggcactttagaagcccaggagtttcagatcagcctgggcaacaaggcaaaaccccgtctctacaaaaaaaacacaaaaattagctgggtgtgatggcgcgggcctacagtcccagctacttgggaggctgacatgggaggctgaggctgtggtgag

SEQ ID NO: 480904 - DNA, 1000 bp, Homo Sapiens
tccctgtctagtgggccccctcacctctgccttcagggcgcattagccctgagccaaggcggctttgatggcggccaccaacttcagaaacttgctttctgtgtccacgtagccatcgcctttctagggaggggaggaagagggaaggggtgagctgggaccgagacaccaacctcagccccaaccccatgctagccccaaaaccaggcaggacggacagacagacataccttcttagagtgaatcaacttcccggctaccatcacttcaaagaacccggtggcctggggagttccctcgccgcactgaggaaagggggtaggggagatgttggaggggctaagatgtcctcttggggagaccctccccttcccagggggatgagaacatgggtgaagggcgtagggctgacctaacccccctgcagtgccatccaggcctaacggaccgacacagtggctgtgctcaagtctttctccccatcccaagactcacgatgtccaggcggccggggaactcatcttctaacttcttcttgagctgaagatactgaaaacgcggtgagaggtcacagcaggggtcataccagtcagccccctcccaatatgcactctacccctccccagctcccaggaatgcccccccgggcatccactctgcttaccttggacttgtagcctcaagcgccactggtaggagagtccaagacattggggcccaggggagagagggagaagtgggggatcggggagaggagggtagacacaggcggtgtggggagagagcaagatggggccaggaagaaataaagaggaacacagatgaccaagcagaagaggtgacagatgccctcaagagagaagacaggcaccagccaggcagagttttgggacacagcacagggggtggcgcggggacacacagagacacacagaaaaccaacaccaagcaagagacagagaagggggaggggaaaaaggggagagaggagacaaggaga

SEQ ID NO: 480905 - DNA, 1000 bp, Homo Sapiens
aggtgtggctccacctgctgacctgtcatcacccccttgaaacaaggtgctcacctccctgagcaaggtgccacccccaacctcgtggcagaaatgtgagcatggcacatgcctccccaacttgggcctccgagggatgaaaacagaggaagcaaggattggtgaggtccctttttctttggcatgtgggagggtacattcttaccttcagtcttcatcaattttcctctccttgactactggcagatcctggactccaccctgtgctgaccaggtgtgtatccctctgctgacctgaggacctgcctcagaccaagggccccacctctctgagatatgggaggcagaaagtgaaggggcactacatggacacccctcatgggatgccaaaggctgacagatgaagcagatttcaggggtgcctcctctctctgggtttcctccaggtattcagatttactcctgacaaggcctatccatgtctctcctgctgaactgtggatgagttttgcaggccacgaccaccatctcccagagaaccccaactaggaagtggggagctgcctctctttcctagagtcctgcttggggcctccaaggaccgatggcaggggcaggttttctacctcagggataattggttgcctgagtcctccctctgggactcctccctgggttgacctgaggctccactcctcagaccacaacccactccttgctgacaccccaaaggcagagtgaggatgcaccacatgtggccactgtgccttggaactccaagggccaaggtccctactgacctggagtccaaagtctcctgagtcctccctcttcttcttcctcttgatgctggcagggctgcaccccagaccccctctgcggaactgagtctccatccctcagattcccaaggctgaatgaaaaggcacctcagtttgagacggcgggactatgggggggggctgttctggggtgctgggtcccttcagttgtccctcag

SEQ ID NO: 480906 - DNA, 1000 bp, Homo Sapiens; identical to SEQ ID NO: 307961

SEQ ID NO: 480907 - DNA, 1000 bp, Homo Sapiens; identical to SEQ ID NO: 307962

SEQ ID NO: 480908 - DNA, 1000 bp, Homo Sapiens; identical to SEQ ID NO: 307963

SEQ ID NO: 480909 - DNA, 1000 bp, Homo Sapiens
atggtcatgctggagacccagctgagcagagtctacagcaggcccattggctgcctacccaatggtcatcctgctcctaccctcatttcttctttgttataacaaaatcatgacttcattaaatattggacacctatgaacttcatggacccttctgcagcctccctgacacgtactggtaagtctaagtcaactatagtagtttcattcctttgaccaatgatcgcctggggcttgggcatgagcggcctctccacctgagcctgagccacagctgccctctgcacctaccacgctgataagctgggccagggaaagctgcagcttgatggagatgagctgtgaggagctggtggctgggcggatcaggttattgtaacgggttttgttcagaaggtcgtccatcagcttttcctccgcattggccacgcggcagttccctgagaaaacacacagtcagacctgctgggcccttgtgcacctgacccccactgcagcctgtggcagcagggagagctgagagggagcacaggtgcccttagggctggctgaagcagcgaaggtgctggcaggcctgtctctccttgaggacttcaaattaaatacactcaacacagagctcagctgtctcctcccatgccatacttcttcctcctcctcttccctctagcagtgaatggcatcccactctacatatctggtacaaaagctgggtgtctcttcttgacctctcccttggttcatccaagtggccacttagtcctgtctttttttttatgagacagagtctcactctgttgcccaggctggagtgcggtggtgtgatctcggctcactgcaacctctgccacctgagttcaagcaattctcctgtctcagcctccagagtagctgggattacaggcctgcaccaccacacccaggctaatttttgtattttagtagagacagggtttcaccatattggccaggctgttcttgaactcctggcctcaggtga

SEQ ID NO: 480910 - DNA, 1000 bp, Homo Sapiens
gccaaggaatcagtttaacaaacatcctactcttgctgaaaataatttcttttcccaactcttctaggaataaaacacttttaatgtatttgtcaggaatcgacacttcatttaataggatttaaaaagtgacaatttaaagagcaattgagaagagtcccacatccatcatggcttgtgcttctaactaaaatcaaaggaatgaaagcagaaaaagcactgagaaaatggtaaaacgggtgtgtgtgtgtgtgtgtgtgtgtgtgtgagagggagagacggtgggggcggggggtggttcatagctgcttcaagtccaaagtgctcacaacggctcctgtgagactgccctgctgggtgctggctgcacggacacagctgctgcccggcacacaccctacctgccctacactctcagtccaccccaaatgaccctccccagagctgccagaaggtgactttgaaggcttttttccccaaaagctccaatgaagttgcctttctactctccaaaaaaaaaaaaaaaaaaaataataataataataataataataataataataatgaaaagtgaagggtgggggtgctggccacctcccatttctttgcctgggtggtggtgaccacggcgcccttgtgtcctttccattggttactgaggaccattgccctcatgggcccaggccacaggcacccacctgtcagcctcacctgccacctctctccatgttggcttgttgcccctggggctggcctgggcatgggggagcttatctccccgaccaggggcttggccatgtctccttcacaacccccactccccgcggactgagcctccactctctgctgggctgagggctctgtggtgcccaggagccctcccagccacgtgccagcccatcccatcatcagcacttgcttttagcttcaagtgtttaggtcgctttggtcctggtggcccaggggagaagtgctctgtaggaccagccaggctctgggg

SEQ ID NO: 480911 - DNA, 1000 bp, Homo Sapiens
aatgcatacagagtttttattgcagatgatgaaaaagttttagatatagacagtgccgatggttacacaatgttgtaaatgtatttaatcccacttacgaatgattaaaatgataaatcttatgtttatttcatcactaccaaaaggctgtgggtgcaggggtgctggtttctggtcctagcctaagagactggcagtttccaccttctatctcttgggacagtagctctgggagccctgagctgtcatgcaggaagtccagctaccctgagaccaccatgctggaaaggccacagggaggagctctgtggacagtcccagctgaaccttgccttccagctgtccctgtcaagatgccaggcatgtgagtaaagccatcatggaccctctagaccagactgcccaccagcagggtaccatctggcagccacatggagcagaagaaccgcccagctgagccacttccaaactcttgacccactaagtcatgatccacaatgaacccatcatagggatggttggctttgcagtgtggataatgaggatgtcatgtgagagacagctgaggtactgacccagggtgtgactgatgctccccatgtacccagagctcacttgtgaaatgaggaccatgggacatcatgaggatgagaggcggtgatccaggagtgtggacattcagccaatgcctgacagagctgggatataaacacctcagctccctctccctcagggaagactttgaggcgtgtgctccagcagctgcccacagtgggggtaggcatggagacacacccactgtggcccatcttcccttacccatctcactccctgggatggttaattttatgtgtccacttaagtgcactgtggggtgcccagactacacactgtgtctgtgagagtgtttctggattagatcagcatttgaattgtggactcaggaaggtggactgccctccccaagtggctgggcataatccaatccctcaagaacttg

SEQ ID NO: 480912 - DNA, 1000 bp, Homo Sapiens; identical to SEQ ID NO: 307964

SEQ ID NO: 480913 - DNA, 1000 bp, Homo Sapiens; identical to SEQ ID NO: 307965

SEQ ID NO: 480914 - DNA, 1000 bp, Homo Sapiens
aatttctgtatttttttctgtattgtatcttcatgggacattaggggttttctatggtaagcacacctatggttttggtaaaaacattatcaaatatatatccagacggttcttccctagaagaaaaacaagtctttacacctgataaaatattttgcgaagagaggtgttctttttccttactggtgctgaaaggaaggatggataacgaggagaaaataaaactgtgaggctcaaggctggtgttctccacttatttcagcgacaagttggggccaggcctcaggggcacgcctgggggcaggggagggagttcctgcccccaactgcaggacaggcactgcccaagtctgccctgaatccgaggacaccggaactctgctcatacaggcggctcggctggcctggcacaagcctcaccttctaagctgcgagccagaggccactgggttctctcacgtggtgtctgctgttacctctgagagctgggacataaccaaaggggggttagtgtgtgagagaagcaaggccacggcacctactgaccttcctggtgaagcggcgctgggcaggggctgctccctgccataccccacctgcaggaggggctttccaatctgagggaggtgcagggaacagggctgcctcccagctcccctgacagccactttcctgggcctgcatctcaggaactgctctgggacagctgccttgtgtccagtctcaggtcctggcaggccaccagctggtgcagcactgaggccagacacctatggatgtggcttgaagttacctgtcaggtgaaagggccagaacccaggcctctcagcccgggcccagccagggtcttcaagccccagagacccagccacaactcagcatctccacccactagagggccagaaatctccaccctcctagcagaagccagaagagcagggacccggagatcctcgagagtgagacagacaggacaggctcccgccacggggactgctcg

SEQ ID NO: 480915 - DNA, 1000 bp, Homo Sapiens; identical to SEQ ID NO: 307968

SEQ ID NO: 480916 - DNA, 1000 bp, Homo Sapiens
gatcccccgagacccccaggccgccgcgggcgccgcatctttccgagctccgggcgctcgctcccgggccggagccgcagcgacgctggcgggagcctgccagaggggctgaggcggggcttgccgctccccacctccctacgaggcggggtctacatgcccctctcgctgcaacgcggccaaccgcaggcgggtgctgacgacacctccacccccggctcgtaagctaatttgcgtcacatatggcgtaagagccctgtcggagcgggggacctacctagcccatccctcctccatcaaatagtaggcgcctcgctagaattcccacttggccccatccctgtagccctcttctaggatcacctctgtctccccgccccagggtgggtgaaaagggttaagttaagtggggggccaggaaagataggtgggtccagaacgataaacccgaagacaagaagcagaaaagtgggtagaataagtactcttactcattgtcattgaagatactgttctcttccttaagaaaaaatggttaggcatgcctagattccagttctagcagggcatctactaagggtatgaccttgggcaccttgtttaacttgtctgcgtccaagtttcctgatctgcaaagtggaggtgttaatagttactacccgcctcacacagtgattgtgaagattttgttcgttacactaatatggatcacttagaaggatgactggactggtgcatactacatgctccatacatattagctgtcatcattagcttttatttattttttattgagatggagtcttgctctgttggccaggctggatactggcgtgatcttggctcactgcaatgtccaccttctgggttcaagccattctcctgcctcagcctccctagtagctggaattacaggcgcacagcaccttgcccggctaatttttgcatttttattggagatgggatttcaccttgttggccaggatggtcttgaactctt

SEQ ID NO: 480917 - DNA, 1000 bp, Homo Sapiens; identical to SEQ ID NO: 307969

SEQ ID NO: 480918 - DNA, 1000 bp, Homo Sapiens; identical to SEQ ID NO: 307970

SEQ ID NO: 480919 - DNA, 1000 bp, Homo Sapiens; identical to SEQ ID NO: 307971

SEQ ID NO: 480920 - DNA, 1000 bp, Homo Sapiens; identical to SEQ ID NO: 307972

SEQ ID NO: 480921 - DNA, 1000 bp, Homo Sapiens; identical to SEQ ID NO: 307974

SEQ ID NO: 480922 - DNA, 1000 bp, Homo Sapiens; identical to SEQ ID NO: 307975

SEQ ID NO: 480923 - DNA, 1000 bp, Homo Sapiens
aagcttccagccccgagagagtaagaaatatggctgcagcagcgaattgcagcgctttaagaactgaagggggggctgagggcggagagagcataagaggcgtggcctagaagattgaaagccggacatctttgtgatttggttggttcaaaatttacccagtaaggacaaaaaagggaaatttcaagaaagcaaagacataccagaaagaacattaactggaagtagacttcatttctagaccaggagtcacaacttcaatgggttttccagttctcatctataacatggggacattgagtaaatcaagcaataattaatgctaaaatcctccataaactgcataataaatgtaaagatgttaattcagcttggttttgagaatgggggaagggataggtagagctttgatgtgttgataaagtatccaaatatatcattcaaaccagaatttgtaactcctccaccaaacttttgacccaaagaagctagaaaggagtaatacattgaggttagtaccatcttcaagggacttcccattccattatcccatgtaatagataatggaatatgtattgcatagataataataaaggattattcctgttttatacattaaaatagagtcctatagaggttacatcatgtgcccgaggtcacacaccatgattcagagtcaatgtagtttttactccaacactctaccttgtatggctcccaaccataagagaacggaagtgcttacgagtcaattggtgagcaagagagaaaaaggaaaggaagacatttcatagaatggctatttggttcctaaataatcaagaaagagtactggtttgtgacctgtttgtaattttttaactatgactccttaatctttactattttcctatttcctccatgaatctgaggaacccaacattggaccaaccatatgacacagtagtgaagttgaccctctgtcagtaactgataagtggtaggaagaaaaagctcatat

SEQ ID NO: 480924 - DNA, 1000 bp, Homo Sapiens; identical to SEQ ID NO: 307978

SEQ ID NO: 480925 - DNA, 460 bp, Homo Sapiens; identical to SEQ ID NO: 307979

SEQ ID NO: 480926 - DNA, 1000 bp, Homo Sapiens
  misc_feature (299)..(299): n is a, c, g, or t
  misc_feature (598)..(598): n is a, c, g, or t
  misc_feature (821)..(821): n is a, c, g, or t
ccctgctaattttttttttttttttttaatttttggtagagatgaggtctcattctgtcatctaggctggggtccagtgagctgtgattgtgccactgcagccttgacctcctggactcacgtgtagtcctgtagctgggactacaggtgcatgccaccattaataattgccacctggctaattagtttttttatggagacaggtctcactgtgttgcttagctggtctcaaactcctgggctgaagtgatcctcccacttcagactcccaaagtgctgagatacaggcatgaaccacnacactggcctgattttttctggagtaagatggagttctgtagtgataattcacattgcataaggtgaaaattgggaatttgttaggaaaaggtgagttacatttagaagttaaagtgtttaccaacattgatttagtttagttccttttgagaatctggcttagaaggacaagagtaagttatggttgcattaatatagtagggcacatgaaatgaaaccaagtactgtttgctttcctttgtttcagatggaggagatgtataagaaagctcatgctgctatacgagagaatccagtntatgaaaagaagcccaagaaagaagttaaaaagaagaggtatgtcgtctttttttttgtcttttcaagaaaacggttgggaatggttcccacgtggggcagactgttggtgtaattgtgcaaactcgatcactagctctgcgtgatgtggcagaagcgaagggaaccaggtttgcaaaagtaactgtggggatggaatgtgttacctcagacataacggaggnggttctttctatcttagtacagtctaagtactggttactgcatttttttattggctgacaagttgctttttgttgaattttcatgttttgaatctttaaatggaatagaaagtaataattaatgaacatgtaagcataaagtgatgtgatggcccacaaatacaatgtatagtaattaa

SEQ ID NO: 480927 - DNA, 1000 bp, Homo Sapiens; identical to SEQ ID NO: 119886
  misc_feature (508)..(508): n is a, c, g, or t
  misc_feature (523)..(523): n is a, c, g, or t
  misc_feature (539)..(539): n is a, c, g, or t
  misc_feature (541)..(541): n is a, c, g, or t
  misc_feature (550)..(550): n is a, c, g, or t
  misc_feature (552)..(552): n is a, c, g, or t

SEQ ID NO: 480928 - DNA, 1000 bp, Homo Sapiens; identical to SEQ ID NO: 307982

SEQ ID NO: 480929 - DNA, 1000 bp, Homo Sapiens
attcttagttcctcttgattaaaaatcggctaaatccggacgtggtggcgggtgcctgtagtcccagctattcgggaggctgaggcaggagaatggcgtcaatccgggaggtggagcttgcagtgagccgagattgcaccactgcactccagcctgggtgacagagcaagactctgtctcaaaaaaaaatcagctaaatccagccccaaaacatcagcctaatggctaccatcagcataaccagaaacattccaaccctaagataaacccctctctgaccagaaacatgccaacccccagatagcctcccttccgaccagagactttccaaccccacaataaacttttcctcacatgaaaacattccgaacctagataagcacccccttccaaaactcttaaatatccttagtctgtaaaaaaaaaaaaaaaaaagggctctctaacctaactcagccaaaagcccccctcaggttggttttctctaaaataaacctgtccttcaccgtcaagccacatttcatgtttctttccttttcctttttcttttcttttcttttctttttttgagatggagtttcactcttgttgcccaggctggagtgcaatgacacaatctcagctcaccacaacctccacctcctagttcaagggattctcctgcctcagcctcccaagtagctgggattacaggcatgcaccaccacacccggctaattttgtatttttagtagagacagggtttctccatgttgttcaggctggtctcaaactcccaacctcaggtgatctgcccaccttggcctcccaaagtgctaggattacaggcatgagccaccgtgcctggcctcctctttctttaattcttacaaatgcaagcttccagatcacacactgaacactaaccttctagtcttctcctaaacttcaaaggttgcaactattttgttgttctaaggagacatccccacatttcccagcatgctttgggaaaggagac

SEQ ID NO: 480930 - DNA, 1000 bp, Homo Sapiens; identical to SEQ ID NO: 307983

SEQ ID NO: 480931 - DNA, 1000 bp, Homo Sapiens
cttcttaggttctttattagtttttcagcacagttaactctttctacgttgactagagttttgttttacattttatcatctcatgacagcagccaccagaatacacaaaattaggctctttactttgtgcggagaagaaaataataaacattaaaagttcaccttgaccaaagagacaacctccagaagaacaccacacatgggaggacccgatgtacacacacacacacacacacacacacacacacacatataatgtatagatatttatagatacatctggaaacagcaaaaaacaaaattccaagatttgcagtgttatctacagtaagagggatgaattctaccagctttcaaacagtcacattcagtattcagaagaagcacatgagggggtagaactgggcagaaactaacacgccaccaggctagtcatggcttaagattatagaaggggggtgatgtgtgtagaggaaatacgcatataggtgtcctctcagcctcagaacacccgccacaacccttcccccgtccacagccctgcatgttttcactgctctctcccgttttggggtttgtgattattgatttagggtctgagacaaatggctctggtttctgggccgcaagatgctatggggtaaggtgagtggatggaaagcatacaacgcagtcctgggcttcaggggacagcaggaggctggggtgtaggggaagcctttctcttctacctgacccttgttcatgtccagaaccttcagcccccagtaagccccagcccaggcggctatggggtgtgggactgtagaagcctcgctgccttgggccagttgactaaataaactctctcttccttagtgatgcgtccgggacacactggcacagcctggccagagctctgcctgaaacaccacactgctactgatggcgttgccctctggggaacctgggggcaaaaaaggggtctccaggaactcagctacccctgcctctggccacc

SEQ ID NO: 480932 - DNA, 1000 bp, Homo Sapiens; identical to SEQ ID NO: 307985

SEQ ID NO: 480933 - DNA, 1000 bp, Homo Sapiens
ccaaagaattgtaaaatttattgtataagtattgcagcttttcagaatgtcatcattgccactaatgattactgatacacaacaagcagtttcttcaggcctgtggattggcatccaaatacagagtcttacgcagcggggacgtgggtgcgcgccccgcatgccacggaaagcttacataagtttaacttgaacagagcttgggaaatggggctgcaaaggagagcagttcccacgccaggaaccaacgtgaaagcattggaatcagcacaacagccatggaatcaggcaggcaggggaggacgggctgtgtccttctgagctctatagtacagcaagatttcaagcagtttccagaaaaacaacaacaacgacattttctttccttatcgacgggatattttatggttctggaagcttcgtgttgcacataggaaaaaaaatttctctgaaacgtacaattcatagggacgaccaatgaggacagggaatgaacccggctctcccccagccctgatttttgctacatatggggtcccttttcattctttgcaaaaacactgggctttctgagaacacggacggttcttagcacaatttgtgaaatctgtgtagaaccgggctttgcaggggagataattttcctcctctggaggaaaggtggtgattgacaggcagggagacagtgacaaggctagagaaagccacgctcggccttctctgaaccaggatggaacggcagacccctgaaacgaagcttgtccccttccaatcagccacttctgagaacccccatctaacttcctactggaaaagagggcctcctcaggagcagtccaagagttttcaaagataacgtgacaactaccatctagaggaaagggtgcaccctcagcagagaagccgagagcttaactctggtcgtttccagagacaacctgctggctgtcttgggatgcgcccagcctttgagaggccactaccccatgaacttctgcca

SEQ ID NO: 480934 - DNA, 1000 bp, Homo Sapiens
ttggtcccatcctttattcgagtttccttgccccgaccctgacgttggccagctaggtgcggctgcagggattcatggcagtacccagcttgcggcagtagcagaaggcattgaagaagcggcagtagcacgtggcacatgggtcacagcaaggcacctgctgtcccaggcaggactcatgcagccttacgcagcgacgtgaggagcggggctcgcggtcctgcaggtctagtacctgcaggggtggggaaccagcacaggcctctaaagacagatccagggatcttacctgtcccaacctgtgcaggatggcagtggagcatgggaaggggtggtcggtagtgtcgtcgctggtgagggagtttggagctggggagaggagctaatacccaatgccccctcccaagggccaccaccttacccttttccctgagcagttacctctgccaaggcctgagcctcctgcaacagatcctcttctgcctgttctgcagttgtcttcttcagtggggcccgcaggcccaggcctggggcagaggatgtgagggcaggaacccccatgcacaaagcacccacctcccaggggagggtttgggaagggagaaagagggtttatgccaggggagactatttgtggccagagggtattcaggccccgcccagtcccacccttgctcacactgacctgggagctctgggagcagggcctggtcaggccttctgatgccctccatgggggccaagcccatctgggctcctcgcgtggcaggcagtgccagcagcagggcacagctcagcaccgctgcggtcagcatggcctggctcagcaggaagatgtaccacttagtccctccttatccttggagtcccctctaggtgcccagatagagaccccacagagaggaggagtccctgcccaacctgaggactcacctctgcctccgggattcttgcctagagagttcccggccaccccgtgcccttggcttatatggcaggg

SEQ ID NO: 480935 - DNA, 1000 bp, Homo Sapiens
  misc_feature (24)..(24): n is a, c, g, or t
  misc_feature (73)..(73): n is a, c, g, or t
  misc_feature (82)..(82): n is a, c, g, or t
aaaaactgcagccaggactacctntggttaatcccatcagtttggacaggttacctttcactagcaacattanaggccccanattagaaagcaacacataggcatggtgaagtcaagaaaagggtggacttgaatgtttatttacaggatgctgcaagataggaaattccacatagaaattagaaacctagtcagaggacaagcttcatacagtatgtatgtacagttggaactgttcaagtatagtttcagtgtaaaaagtgctacagtaacaaaccacatttaagaaagagttcttagtagagaaacaataagacaaaataccaaacgtagtacacaacaaatttatgtctcagctacatgatctaaaagttaaaggtcccaggagccccatcctgaacttggaaagtgtagccttcagaggtagtttctggtacaacgttttgatcttcctcttcctggaaatatattaaaaaataagtataaaaatgatataagtattccaagcagcagcctacctgaagtctgtatttaatctctaggtcttgatctgcatattacacctttaatcctgtatgatattatagtatttgacatagaggagggagggtctctgaaactttgccaattcataaatgctagctactacagtaacacaaacaggccgagatttttttcttccccaaccgtcacttttcaataggaaaagactgtattaggcccagagcatggtgatgagtttggcctacttctctatcacctcctacaatgacacccgttaacttaccctcaagatattctaagattctcaaggttgttcatttgaaactaatctggtgacttttaaaatctcagtttaaaaagattttattaccatcaagccaaactagaggggcaaataagtacattatgtcccatgcacactgatattttactatatttaacaaagatatgacacttatttttaaaagggaaaaaaaggcttatggccttgacttta

SEQ ID NO: 480936 - DNA, 1000 bp, Homo Sapiens; identical to SEQ ID NO: 307986

SEQ ID NO: 480937 - DNA, 1000 bp, Homo Sapiens
caattctaacaagaatacttttattatacacgtatcatacacacaacaattatttggggaacatttacaggcagagagttcaattccaaatctccatttcacccacacacactgtactgcacactcaccttagggttcagcccaacaggaacgagacaaagttattgctttctgaacagagagtttcaattaaatagaatcttccaagccaagaacagagcccagcatcctcttaattcttaataccctgtatatatatgaataaaaccttatgatgtgttatagattaccccatcaccattaaaagttaatattaaaattggatcccatgtctcaaaaaagtcgtaagaagtgcaccagtatttacagaccccattaaattacgcataaataaaatctgtacactcaacgcactgtttcttaaaatacagaacctccacggggacttgggggtgacaagcagcaacaaattgcttcgtgcctacccttttcaagtttactcgaaacatctgaaataaatatgcaaataaagcttcagtaccttaaaggaacatgtcatttcaaagagtctcccatttgaagagttaactttcaaagttaaaaaaaaaaaaaaaaaaaaaaggagaaaaaaatcaatcagcaggcttcgtttctacaagtttcctaaaaccagaaggcccccgtttgaacacggggtttagagtgtgtcagataccacttattaactagttgctaagcagatagaacctttgcctcctaccagaggacttgatctctgaagaagctagatacacacttttctttttttcaaggtaaatatttagcggacacaaaaaccaaccattaccttaacactgaaaaaaaaggtattgttgatctgttgatctagggcacatcaatttgacatttcaatggctaagtgtgtgggtctgttggcccagggaatgtatttaaaagattctaaaacttatagcaccactttcagagaaggaaagaatgg

SEQ ID NO: 480938 - DNA, 1000 bp, Homo Sapiens; identical to SEQ ID NO: 307987

SEQ ID NO: 480939 - DNA, 1000 bp, Homo Sapiens; identical to SEQ ID NO: 307988

SEQ ID NO: 480940 - DNA, 1000 bp, Homo Sapiens
gccatggcagaatagggaactgggcagaatcataaggcccccaatccagaccctagctcccagaaaacattcatagacacaccctgggacagaggggaacccattgcctctaaaagaaggatcaagtccttggagaagtcattatatgctaaataaagatcctttgggccctgaaaaatcagcagtggtaatcaggtagtacatgctgtgggcctcaggtgagattctgagactcgctggcttgaagtgtgcattaacaaggagagaattcttctgcttgagaaaagaggaaaggattaaaaatgaatttgttttgcagctttatgtataagctcagccagagtgagaaagagcacctaaagggatcttggggtcccccactcaagggctttagccttggatggtatttctggacctgttctgggccagagaggagcccactaccttgaagggtgagtcccagacctggtaacattcatgacaagatgactgctgagttgttgggccttaagtaaacatcagtgataccccggctgtaatcttcatgagaccatggtggtggtggacaaagggcgagattcctctgcctggagaaaggggagggaagaaagggaagagcaagatactgtcttgtgattttggtgccaactaagccacagtagaatagaggaccaggtggctttctaaagttgccaattccaggccctggcccccagaaagcatatctggacccacgtggggttcaggaaactagccaccctggagagaataacataacactggctggcttgatcacctgttaattgtagagccctacagccttaagtaatcataggtggtagccaggtagtggttacagcaggccttggccaaaacccagtgctgtgctggcttgaggtcatccacactgcagtcacagtagtggtggccacagtggtgattgtgttactcatccctcggcttcaggcagctcagcacagagagagagagactccaattt

SEQ ID NO: 480941 - DNA, 1000 bp, Homo Sapiens
ggatcccgggcccgctccaaagccgccccgccccgccccgccccgcccccgcccggcgggtcccacgccccgcccccgcgtgacgctacggccccgcccgcccgccgcggacaagtcaggacttgcaggcgcgcgccgcgcccccccctacctccgcgccgggggtttccctgcagcgggggacggggcagggcctagcccaaggcaaggaggacccaggcgctgtgcggcggggtgtggggagatcgcccagacaccgggacagtcggacacacacactgactgggacccacagatccacacccccagcgatgcgtacacagaccgaccgacgggcgttccagggtccacaaagtcacgtgcaggcagagcccagaggatgtactcacagacacaaggccacagtctcgcaaatccacaccatggacaggggcatgagcacacacactcacatactgatggggctcacacttacacacacccagacggaaatgcacagactcactaacagggtcccctggacaagcagacggacacaatgacagggccacacacagttgcagaaacacccacactgatgatcacacctgggcccacaaactgtgttcacaaacaaccctaccgaacaggcacccacaccacacacacggtggtgcaaccacacagacataggcggagtgcttatcaggaaacacaaacttgctgataggcacaggggacacacacatacacacagacacctgttacagggatacctggatacacggccaaatccaaatcacactcccacagggacatacacaaatgcactcacacaatttcacagctaacacattaaaactatcagaaagtgacattcgcccgacacggtggctcatgcctgtaatcccagcactttgggaggccaaggtgcgtggactgcctgaggtcaggaattcgagaccagcctgaccaacatgatgaaaccccatctctactaaaaatacaaaattagccgggc

SEQ ID NO: 480942 - DNA, 1000 bp, Homo Sapiens
ttttttttttttttttttttttttttttttttttttttttttttttttttttttttttttttttttttttttaccaagttcataattttattatactctgaatagagatgatatttaaggagcagagaaaatgactatacaaaagatttatagaacattcatttacatactggatatattctttacagtatcagaaaagtaaaaatatgcactaacaaggcagagaagacgttacaaggtatttgatgctgagaataaatgcacagtgacttttaacatggctatagcttaacactggaggaatacaacaatacgttcttttactgagtagttagtaggaccctggctataacatgcgttgggcacagttcgtgaactctccgcatttactccccagggcagtacgtgcctgtccagcgggagccctggagacaaaatgcctggaaacgttccttttcctgtggccctagagccggtgtccacggtgggggctctctcacggtttctgagcccacagtacaatctgtgatgacacacagcttgttctgtttaatgcacatgtaacacaaaaggaagaaagaaacttcctataccagctcttcagaaatcgtggaaacttgcttcctttggttcctcagagggagctatctgcttggagcaaattccccgatgcccttgaccacgtttaccttgtgtaaaaatcacacctggccaatgagttcaaaaagcacgtttgcagggcttcctgaatgccgtcgaggcatggcttcatgagggccatcgcgggcaccccgatgtctctgtgattccctggcaggctgcgtttctcaatactgagaccctagtttgctctgacttctaaatgagctctctcatccttcatcagaaggataaggaacctggcctgcactctttgggttaaacatgggtagagaccgtctcaggatgaggacctcttggggaaagtacaaacctctgctccctgtggccacattcctgc

SEQ ID NO: 480943 - DNA, 1000 bp, Homo Sapiens; identical to SEQ ID NO: 307989

SEQ ID NO: 480944 - DNA, 1000 bp, Homo Sapiens; identical to SEQ ID NO: 307990

SEQ ID NO: 480945 - DNA, 1000 bp, Homo Sapiens
agcctatgctaaattatgggagctaaggaatgactagaaagtggaatttataattaaaagggaagcaaagtgtaaaaatttggaaatttcatagcctggccatgtgatagagaaggaaagagcatttgtaggcaaggaatccaagagtttgaggaatctgagggtgctacagagcaaccattgctaaagagattagtgtgactaaaccagagccaagtgttactagtcaagacgatgtgaaaaaggccctgaaggcatttcagaaaactttgaggctgacccctccatcataggcccagaatcctaggatgacagaatggtttgggtagaggacaggcctagagactgctcccctgtgaccagtctgctgcttcctgtatccccaccactccagatggcacagccatggctcacatggcctcagtggccccaggtgtgagtcatgtcacagctctggagggcataagccataagtcttgctggtgtctacacagtattaagtctgcaggtgcccagaatgcaaaagtcatggaggcttggcagcttccacttagatttcagaggatgtattggaaagcctggatgcccaggcagaagtctgctgcggggcagagccaacacagagtgtcctctctggggtaatgcctaggggagccatgggattggggctgctgctgcaaggacccaagaattatagtcatcagcagtgtgcagcctcagcctggaaaagccatgggcattcaactccaacctgtgagagcagccagtggccttgggagtagggctgcttgagactgtgggagtccactcctcataccagtgtacccaggatgcaagacatacagtcaaggattattttggagctttaaaatttaacatctgtcctgctgggttttggacttgatggggactgttactcctttttttttggaatgatttctcccttttgggatgggactgtttatccaatacatgtaccaccattgtatcttggaaggaa

SEQ ID NO: 480946 - DNA, 1000 bp, Homo Sapiens; identical to SEQ ID NO: 119887

SEQ ID NO: 480947 - DNA, 1000 bp, Homo Sapiens
ggatcctcctgccttggcctcccaaagtgcaggtattacaggcatgagctatcacactcatgcctattttctcatttcagtcgcaagttctgtgtgggtaaaagcaatgcgtatttattctctgacttgatagccttgttactcaaaatggggttcatgcacccacaacataggcctcctgtggaacctgtttgcaccagaatcttaggcggtaacccctgacctcccgagtcagaatttgctccgtgacaagatccctggatgatttctaaatgcattaaaggttgagaagtactgcttgagcatacctgttcctagtgaatcagaccaaccatggaaatcattattccatctctctaatttggtgagtttcaatcctaagtgcgatttggaagtattcaaggaactggaagggaaggtattgtgatgttcggttctgttccccagagagtccgcttaattcatcttatgagtcttggccatcactttttaaagcatcctggatatacactaatgtacagctggcgttttgaaccattactctccacacatttcccagtgggaactgtgttttctttttgacagaagcaaaccacggagtcgccttgagatcagtcaaaacactgagtaatcttagagtggagaatacctaaaatttctagagacaattatattattgttttcccctaaatgagtgagttacttgagaatatggtggggtattcagtgggggctattggcaaacactgttggctgacttcagaatgggagccattcagcagcagtttcatctcccgtgttaaactgtgagcacaagaggataagagctggaactttcttcatctctgtaatcctcatgcatgaatggatggatgaaggaatatcactgagaattcatgtaaagatgtgcagatgtgcagggaatattgaactgaaatttaagagggctggattcaagttcagcttctatgtgaactctttcagtgaagaaggtcttata

SEQ ID NO: 480948 - DNA, 1000 bp, Homo Sapiens
gatccattaaaaatgtttacctggcctggtgcggtggctcacgcctgtaatcccagcactttgggaggccaaggtgggtggattacctgagcccaagagatggagaccagcctgggcaacatggtgaaacccctctctactaaaatataaaatattagctgggtgtggcgacatgcgcctgtagtcccagctactcttgaggctgaggcagaattgcttgaacccaggaggcggaggttgcagtgagccgagatcatgccattgctctccagcctgggcaacagagtgagactccatctcaaaaaaatttaaaaaaaagtttatcatcaggctcttcattttttggctgttgatttttttccttattttgagagtaggcctcaaagagcaggaaggctattcttgattaggcgtacttcacgggcacagtgacgcatccactgcctcttttaaatctcatctgagtccttatttttatttttttaaagatagggttgcactttgtcacccaggctggagtgcagtggtgcaatagcccattgtaacctcgaactcctgggcttaaacagtcctcccacctcagcctcccaggtaactaggactacaggtgtataccatcatgcttgggtaatttttattttattttattatttttttttgagacggagtctcactcttgcccaggctggagtgcagtggcgcgatctcggctcactgcaacctccgcctcccggggtcaagcgattctcttgcctcagcctcccaagtagctaggactacaggcacgtgccaccacgtctggctgattttttgtatttttagtagagacgggatttcactgtgttagccaggatggtctccatctcttgacctcgtgatccacctgccttggccccccaaagtgctggaattacaggcgtgagccactgtgcgaggcctaatttttaaaatttttgtatacagatggggtcttactgtgttccccaggctggtctcacac

SEQ ID NO: 480949 - DNA, 1000 bp, Homo Sapiens
ccgcagctcctgacagaaccagaaattccagcgcaaccgaggaggcgggagagaaagagagagagacagacagagacagagctacgcacagccagggaggggagggggctcacacacatgggaatggaaccccccatacacatgcagtgggcaggaggcagtaattcaataaacctaaactgagcccatcttcacagctttctttgcccctgcttctgttcccaaccacctctgtctgcagccagtcaccctgcagtctcctaactgcccccttttccctgcagagttcgaggaagggctgctggacagatgtcctgccccaggaccccatcccgcgctggtggagggtcgcaggagcagcgtgaaagtggaggctgaggccagccggcagtgagggttggactggtgtcttcagacccaggacctcagacttctggctcacacagacccccacgctctccatccccggaatctagtcacaaccctggatccttcctctgcccttctcctgcctccccacctgctccatgggcataagactgtggggcttcaagcaataacaagcagaggcctggagagaggacacaaggagggtgcgtggtgccctcacccctgcccagagcgagggggcaaggactctgcctccagggcatctggggttttcccctccctcacacaacacactcccattctctttaggtttgcaccagtggtgtgagcagttggactcagtttggacaagggggaaagggggacttccctgggaaggtccagctaaaagtggcaacatttgcccccagaattgggggcctgggaacactggacctgctccttctcccctctccttccccgtttttgtgcttctggtttgtttctttaattaatttaacaagtgctgcagtttgccctcccattcccatctatcccccaagtcctttgcaatttcttccctgccctacataggggcggtgggtgtgggatcccttcactggccccctcg

SEQ ID NO: 480950 - DNA, 1000 bp, Homo Sapiens; identical to SEQ ID NO: 307993

SEQ ID NO: 480951 - DNA, 1000 bp, Homo Sapiens; identical to SEQ ID NO: 307994

SEQ ID NO: 480952 - DNA, 1000 bp, Homo Sapiens
aagcttttaaccaggtaaggcctaatgcctgcctctatttctgcatcaaagatatgcctttatctgacacagaattaaactttcatgtataattcggctgtaaatcctgttatattagctaatcctgtaagatcggctaaaaaaaataactggatatttgttcattttacccagcctgggaatcggcaatttcccctcatgtaggatgctaaacccatcagtcattgcacagtctcctctggaataactacatttgcagggatttcagagtaaagagaaatggtgtcttacctaagtaaattcccttgctttgtccagccatctctgtggaggctgtccagtcctcatgataggatagagaagggagtacactttaaagtataactgcaaatagaggagaatttaaaaataaaatgtaagtatttgactttgttccatttaaattatttcatttagacactttgactcatgtaagtgccattctgacatgaagagtggaatcttcatctcactacaatatgcaagtagggacagactgtttttcaaccagagttcattatggttgaatagtgctagtttaaattgtccaattggtttgtgtttgctgagagatgtgcctctaagtattgcttaagtagaaaatgtggtctctggataggactaatgaaatgagagttaagacttgtgatgcatattgtcaggtgaatcacttatctctgggtaggtaggcctcactggatttcttgtaggttatttctaacagttgggattaaatttttgaaaaatgttttgaaattattaagatgaacacagcaatattgtattactcagcattctctagagggacagcatacacacacacacacacacacaaacacacgcacataggagagtttattaagtattaactcacacgatcccaaggtccacagtaggccgtccgcaagctgaggagcaaggaaagccagtctgagtcccaaagctgaagaactttgagtcc

SEQ ID NO: 480953 - DNA, 1000 bp, Homo Sapiens
  misc_feature (680)..(680): n is a, c, g, or t
tatcaggaaatagcctttattacaaaaatctgcatgtaaacaagtagctaccgcactgaagagcctccctccagggcaggcacacccgggctgtgaaaaaaggcagagtcctctcccggcacgcaggcctgcccggcggctgcgctgcggctgcttgggacgcatatgagcctgcgcatgcatctctgtgggcccagccctcactggcccctgagagccacttcgcagggcagcactgtctatctgtccatgaccatgaggttgggggtgcccggctggcagctccgagggacccagagtctgagcctgctctgaggcacccggggcagttggctgggccagcccaccaacccttccgttcgtctcccaccatagtgggagcgggtgggacctagagaaccgagaggtcgtggcaggacttggatttggcgcgaaaggccatcttgcggctgttacgagctacgatgcggcccaagaagcgcttcgcctttttgccaaggctctctcgcctccgggtgcctgcttgccgtcgtgcgttggcttctttgctgtccctgcgcaggcgtatctggcgcacgacaccttcaaacagcgcctggacattgtggtgcaatgccgctgatgtctcaatgaacttgcagtcaaagaccaccgcgcaggcccggccctctgtgtgggtngggaaaggcaggcaccagtaaacaaagggtgggtgaagtaggagtcccctccaacagtggccacccatggaagctgccactcgagaatttgcaaggtcctccccggaaacagcagagaccccagctcctgtactgaggcagagtcctgcgtttaaggagcccccaaaacagtggccctcaaaaggagatccatttattgaaataatttgaagcctgatatttaaacaaagtacgacagtagtaaacacaggaaaatgagaactatgttggacaacttagtattttattttattttattttatttttctgagatagagtct

SEQ ID NO: 480954 - DNA, 1000 bp, Homo Sapiens; identical to SEQ ID NO: 307997

SEQ ID NO: 480955 - DNA, 1000 bp, Homo Sapiens; identical to SEQ ID NO: 307998

SEQ ID NO: 480956 - DNA, 904 bp, Homo Sapiens
ttttttttttttttttttttttttttttttttgggacagagtttcgctcttggtgctcaggctggagtgcagtggcgagatcttggctcactgcaacctctgcctcccgggttcaagcaattctcctgcctcagcctcctgagtagctgggactacaggtgtatttttagtagaggtggggtttcaccatgttggccagcctggtctcaagctcctgacctcaagtgatctgcctgccttggaatcccaaagtgctggaattacaggcgtgagccactgcgtctggcccaaagtagttttaatttaagtagcaacagcttaacaatcaactagctttaaaaaagtgtctttaagcaacattccaggcaatgttaccttttattcattgcaaaacagctaatccccatgttaaccttagaaatctggagagaaacgcaaaagcccctggagactgtggcagctgccaggacctgtgctcttttgtccccctaccctcctgttgtgatgtgcagcattgcacaacacaggcccggccggggacacggtgcatggcagagtcattcccactgcactgaggcctgctcacaagcaagttgctactggcatggctgtggggaccaaaacaccttaagtaactgactcaaatacaaacctcggcaatttgttgccggaaaacttgggagacatttttgatctctgaatttgcaagagaggaaatgttctgttctccttcactttccactcacccgtaggtgcagtttggatggcacaggtggcacacatggccggcgtctgcgtacttccagaccagggtgttgttttctcccatgactcctgccgggcaggtcttgacgcagtgggggccgtcaatgtagtgggcacactggatacagttgtctggtcc

SEQ ID NO: 480957 - DNA, 1000 bp, Homo Sapiens; identical to SEQ ID NO: 308000

SEQ ID NO: 480958 - DNA, 1000 bp, Homo Sapiens
caaggctgccaagagaattcactattagttccagcaaacacttgaagatggggcccctgtctccagcctctgtgggaggctgcaatagcaccagttagcaaacctggatgggttttacttggactaactccctttcctgtttttttttttttaattttgtgctttcctgatgctactgaacccctgtttaccacccccattccctcattctccttttaaaatgcccagtcacctctgcacaaactgaagttgagttcagttcatgatgaactcttttccccactgcaataatatactcctgattaaaatctgtcctgaccactttaactagtattggctttatttaccttcaataatcctcagtgcctaaatacgtgcctagactgtaataggcactcaaatatttgttaaatgtaagaatgagtgaatgagtgaatgaataaatgaatgaatgaatttggtctagatagacctggacttattaagggatgagaaatcttggactactaactcacctatgtctttagttaattcacttgtaaattgaaggctactgatacccaccaagcagggtgctgtgatgattacaggtaaggaatgtagagcttctagcgtggcaccacaaatacgacacccaataattaataggtatcactgacactgttgtgagcatatttccttgaataaaaggacaaagtctattcacgcctctgttttaacatcagtaatctctgtgtattgttttataaaaagtgtgttctccaaaattctttttttatttttttaaataatttacatgatactcaaccctaatgttctccaaaattcttaacatgaggtcccaaaaatgagttgctctcatgatttagcaaactttgagcagaaaaaatgatttatttaactgagcaacatttaaagactccttctttaaacacttgtgacttcaaataaccaaagcccttatatattacacagctgaaaaactctattttatatggta

SEQ ID NO: 480959 - DNA, 1000 bp, Homo Sapiens
atctggtttggggttcactttaggttccaagggcacttccaggtatcttgggagttgtgaagcctggtcttgagctcaggaaagaagctgggctaaagacagagttttaggagacagtattggtatcataactgactcagggagggaatgaaatgccatggaaaaggttatacagagaagaggatcttattcacgttgattgggtatgttaatgttgctaccccttgataatagtaatagctggcatttattaaggattttctgtgtaccagacattgtcctaaatggtcaacaggcagttccccacctaaacctgccagttacccgtgaggtaattatagtgctgttaagatctcctggtacagataggaaagtcagccctacaaagattgagtaagtcacactgagttctgcctgactccagagttcctgctctttaccgctgagattgggaggagcatgtggggctggaaaagataaatgcccttggtgtccttttctcttttcactctcagtggttaaaccaagatgcaatcagtatatgagccacctctcagtgtccaaagctagagctggccaaatggagcagatggccaccctgcttactgtgagtgttccctagtcttggccatgatggtggcttggctgttagactgatcaaaaattgcagctgggggtaacaattcatccctcagaggttcagaattagcatcactaaagttagcgacctttaaaatcaaaggaggtcctgcagtttagttccctttggaccaaagtcaggtctggcccttcagaaaaaaatccattattcagtgcagaaagctttcttcaggtagcactggaatcacaatataaagagaccaaaggtaagctagatgaaaattaagcagcattaatgaaacaaagagacttctgaccataatacaaagcagggtccaaaaattctactgctataaaatagggagactgtcctaaatgactttcaaggacccttccaatt

SEQ ID NO: 480960 - DNA, 1000 bp, Homo Sapiens; identical to SEQ ID NO: 308001

SEQ ID NO: 480961 - DNA, 1000 bp, Homo Sapiens
ctagattttaggggcagatatttccattggcacaacagccctcaaagcgctccaaatatccactggcagattctaccaaaagagtgtttcaaaactgctctgtgaaaagaaatgttcaactgtgttagttgaatgcccacatcacaaaggagattctgagaatatttctgtctagtttttattagaagatattcccgtttccaccaaaggacacaaagcgaagccaattatccgcttgcagatcttacaaaaacacgtttcaaaactgctctatccaaggaaaggttcatctctctgggttcaacgcacacatcacaaagaagtttctgagaatgcttctggctagtttgtgtgtgaagatattcccatttccaacaaaggcttcaaagcgctccaaagattcacctgcaattgttcaaaagagtgtttcaaaactgttgtatcaaaaggaaggttcaactctgtgagttgaatgcacgcttcacataaatgtttctgagaatgcttctttctagtttttatgggaagatatttccttctccaccatagccctcaaagcgctccaagtgtccgctggcagattccacagaaacagtgtttcaaaactgctctgacaaaagaaagattcaactccgtgatttgaatgcacacatcacaaagcattttctgtgaatccttccgtctggtttttatatgaggatatttccttttctaccatgggcatcaaagcgttccaattatccaattgtggattgcacaaacagagtgtttcaaaactgcttcatgaaaaggaagattcaaattcgggagtagaatgcacacatcacgaagaagtttctgagaatgcttctgtctagtttatatgtgaagatattcccatttccagcaaaggtctcaaagcggtccaaatatccccttgcggatcccacaaacagagtgtttcaaaactgctctacggaaaggtatgttcaactctgtgagtttactgcaaacatcctaa

SEQ ID NO: 480962 - DNA, 1000 bp, Homo Sapiens
cccttcccccgggactgtggggaggagatgcagaacggcgtcagcacctccaggaccaccaccatcttcctcaacggcaaccgcgagcggcctctgaacgtgttttgtgacatggagaccgatgggggcggctggctggtgggtggcagccggaagccggggggtctgcacggggtggcacagggcagggctgctgtgccaggagccgcaggccgacggtgcccccgcctgcttcccaggtgttccagcgccgcatggacggaaaaacggacttctggagggactgggaggactacgcccacggttttgggaacatctctggggagttctggctgggtcagtgcctcactgggggctagggggccagggaagagatgggggccctgtggacaccaggacgctggtaagagcacacgtgtccctcccaggcaacgaggccctgcacagcctgaccaaagccggcgactactccttgcgggtggacctgcgggccggggaggaggccgtgtttgcccagtacgagtccttccaagtcgactcggccgctgagcactaccgcctccacctggaaggctaccatggcaccgcaggtgagggccggggtgggaggcgcgggagggggcaggaggcgggaggggtcaggaggcgggaggagaggccctcactgctccgtccgccctctacccaggggactccatgagctaccacagcggcagtgtcttctccgcccgtgaccgagaccccaacaacctgctcatctcctgtgccgtctcttaccgtggggcctggtggtatcggaactgccactatgccaacctcaacgggctctatgggagcacggtggaccaccaggtgagaggctgcacggggggtgcagctcagagctgcaggcgggtgggtctcagcctgcctgggtgtgacacgcaggaggggacacgttacccagccgctcagtgcctcagggcccttgtctgtggcgcgaaactgtaaggccaatttc

SEQ ID NO: 480963 - DNA, 1000 bp, Homo Sapiens
gatgctttcagtttaatagctgttttaaatttttttttttttttttttttttaggttttaggctgaagacgtaaagcctgctgctcctgggtatcatttctcagcttctccttacagctatagtactgagtcaaggacgtctttaacgtcatggacggctcctaggacagccacagaaaaaaatggggtaaaggggtaggaagaaaaaaggaagggaaagagagccagggaattggggaaggagaggtaggggaaggggaaggggaagggaggcctggaggtgcttacacagaagtcagagggatggaggttagattcacaggagccccaaagaccaacctctcttccccaccttggcaggggcagggggcaagagcaataaaaaaaaaagcaagttagaccccaggaagtatcaatatcagacaagaatggcaatttaaatctggatgaggaattggagacatttgaaagcacaaagtgaggggtcttcaatgggggggctgtggcagtttcagatctcatgcaaggggtggagactgaggctggtcctgagggaggagtggggacatatactcacctttacccacgctttctagatcttcgactgcatcttttcctagttttccgagtccccccacagctttttttgctccgtctaggcctttttctagggtggattcagaaaagaagaggtcatagaagcagaaaaactacttcctttgtaggagagctcccccgcttcctaggcaccatgggcacccctaaggtgaagtggttttgctgaaggaaccaacttctctgtcatgggaaggttggtaggccagtattagctgcaaaacctatggcccagaaaccctgtatgtagaagcaggtgtgcaccccaagccctccctaggaatatgggtgtagctgtgtccctgtgcttgtgcctgtgagggcagactggcccccagatatcttgctgtttcatgcatcagaattctataccaggcattgggaa

SEQ ID NO: 480964 - DNA, 1000 bp, Homo Sapiens; identical to SEQ ID NO: 308003

SEQ ID NO: 480965 - DNA, 1000 bp, Homo Sapiens; identical to SEQ ID NO: 308004

SEQ ID NO: 480966 - DNA, 1000 bp, Homo Sapiens; identical to SEQ ID NO: 308005

SEQ ID NO: 480967 - DNA, 1000 bp, Homo Sapiens; identical to SEQ ID NO: 308007

SEQ ID NO: 480968 - DNA, 203 bp, Homo Sapiens
cctgccctgcttgtgactgcaccaacctacctttagctcctgagtcatattttcaagaccatacagcattttatatggcgcaggcagcggaccagtgaggttgatgctcatgaccatctgctccaggcgagccaagtcaccgagaagaaggccagtgcactcatctccacaaactgtgaaagagaagtgacaaagagtagtta

SEQ ID NO: 480969 - DNA, 1000 bp, Homo Sapiens
ggcagggtgaacaggatcattttattctcatttatgcttaaaataaagatacaattcaagttttacaattcagtatgattagacgtgatttataattttaacaatttaaaaaaacaacagaaataaagaactagtacaaactttaaaactaccagagcaaagagaactacctttctgatcaaaacatgtgccacagttaaacttccttagaaaactttttaagttttctcagctaaattttctttaaaaaggtttgtgaaaagcctttaatcataaatatttaaactgtttttgtaaccactaaatgccttcaccaactcattaatccaatgttttctaaattcaggaaccagtgaccaagtggcctgaaacatgtaagccttgatcttattcttccagctacaaaatactaatattttaagaaaacaacaaaatattttctaagcacagaagctttctgaaaacttcaattaccttttctggctcagtacctaactgaaatgttcaaatgttcacatttgcacacacgaaaaaatttgagcagcatactacgtgggtgtgagaacctgatgaaaaataagattggaaaaaccccctacactgtgttccacttacatgatttaaatatatagttatctttcatataagtaaaaaggtaaactttagaacagcacagaaatacaaatgtatttagagttttacaaaatatattcaacccctcagacatgcacaattttttaactttggagttaccatacaagggaactagtttcccctccttcataatgaaagcaggaagtcatgtgtacaaagtcattcatatgaaaagaataaacatccacattccttttctttgtccttgacaaatatttatggaatgccggaaattatggaaaaacaattccaatgttacgaagtccaaagaactggaatgagaaaactcctcacggcacattatgctgcatggaatgacaatcatcctcggggaattagggcagca

SEQ ID NO: 480970 - DNA, 360 bp, Homo Sapiens
tgaggggggtcatccatggggacgagaagggatttgactgtaatgtgctatgtacggtaaatggctttatgtactatgtactgttaagggtgggtaggtttgttggtatcctagtgggtgaggggtggctttggaattgcagttgatgtgtgatagttgagggttgattgctgtacttgcttgtaagcatggggagggggttttgatgtggattgggtttttatgtactacaggtggtcaagtatttatggtaccgtacaatattcatggtggctggcagtaatgtacgaaatacatagcggttgttgatgggtgagtcaatacttgggtggtacccaaatctgcttccccatgaaagaa

SEQ ID NO: 480971 - DNA, 1000 bp, Homo Sapiens; identical to SEQ ID NO: 308008

SEQ ID NO: 480972 - DNA, 1000 bp, Homo Sapiens
ctgttgccaggcacctatggaaaagtctatctgactgagccgctcagtgtttaaaacccctcggctgctgctcatccctgacaggccctaggctcttggcatggtgctgcaggctcccttggagctaacccttgcccgtgtctccagcctccaccctgcccacccactccctgcccctgcccaagtgccaccttcatgccttgctcacactatcccttctgcctgggatgtcctcaaccctttcactccgccgccccgttctccctgtcttcaaaccatactttaagtggcagcctagagataatgtcataagacaccaccccccagccaccacccccaatacaactcccactcccaagctagatcagatgcccccagcacattttatgtatttttctgctcatggatttatagttttgggtctccccacccacccatcctcaccagatccttgaggggtggaattgtgtcttattcatagcagcacaatgactggctcaatatttattcaagccatatctatggtttgcaagaataaatgagaggctagaggaagtgaatttggaagcactgcccttcagtgtcaaagacctggataggtgccaccttacccaggagcaggacgtgagagaagagcttatggcaagctggggcagggagtcccatcagtggtgaccaaacctatgggtccatcttccagaggctcaaggaactccagggtgtaaaactatgtaaaattaagttacaccctggagtcacagccctccagcagcatccccctcccactcccagcctgttgcagccaacaagacccccacagacaaaaacagctctctcctgtctcctgggcagcaagcttggagacatggccagttctttccctggctaagggacaggggcctggatcatctaattcctgaaggcagcactaccaattgcaagggcccttggctcctaagctgtttctccccctccacccattcccagagcttcccacctt

SEQ ID NO: 480973 - DNA, 618 bp, Homo Sapiens
  misc_feature (203)..(203): n is a, c, g, or t
tttctgtaataatttaggctctgagggccattcagcctctgttgcaactactcagctctgtcactgtcccatgaaacagctgtggatgattaaacaagtgggtgtggctgtgttccaataacttcagtgacaaaaacgggtagctggccagcaggctgtggttcactgaccctgtcttagactctacaagttaatgtagagtnctgctagaatatgcatctggcagccatcaggccaggaccagactgaatggcactcatgggttatagggactaccttgacaagcacagcggctacaatacccaggaaagtgagcaacaggagaccgagtttttctttgttgaaccgtttcaagagaaaaaatttcccccaatccacctttgactggctgttgggaggatatctgagtttgttagcaccttctctctttaaactttttaataaacagggacgctgatgagaaaaagtatcaaaactatgttttccgtgataagctcccatcccactggaacctgaaataaagggaacagacaaaacaagcttcactgtagatgatgcaagctacttctgtctaacaacgaccgggaaagctcacatgcactccctgctgcctgggaa

SEQ ID NO: 480974 - DNA, 1000 bp, Homo Sapiens; identical to SEQ ID NO: 308011

SEQ ID NO: 480975 - DNA, 1000 bp, Homo Sapiens; identical to SEQ ID NO: 308012

SEQ ID NO: 480976 - DNA, 1000 bp, Homo Sapiens
gagaattctcgatcttttttgaatctttgttcttgagtggttatgaacttacttagggtagaacaatgaccagctgaatgtaaataaggaagaagagaggatgggaaacagctagaaaacaatcaaataaatactaaaatgtagccctgatacatttgcaagtagaattttatggttagagcaatttgacaagcactcagtaaatatcagccactaattcttgagaaacgcatctggctgccaataaacattcctaaccattatcaatcttttagtcacttacatagaattaaaagtttagggagaaagcactattcaatttttctagttttgaacctggagctatttattgcttggtgtggaacatcatgattaacaattccatgtgtgggatatgtcttcccagaaggaaattaaggtcctaattttgtttaaaaagtaagaagacaaggtgttagccaagtaacacttcgtcttgttagacttgtagctgtcccttacaagtcaaataagagaagatgcatcaatgtgaatctataaaaaggaatcaagcaccttcagagatagaaaggtaaagtccctctgtgtccacagggcatgtcctttactcctggggaaataagaagtctaagggaaatagtcagttgtctagaatagccagaggaaagaatacatgaaaatcaatgggatatgaaaccagtgaagaggacaattgggaccagataaaggaaggccttaaatgtcagttagggtgcttgaaatttagttacaggaaattgagaaaccaaatttaaaattgaaaaatctgaggaagaagaatgttatgtaaagcatgtaatataaccccttgccaagtgtccttagctttcttgtctttccagtaacctctttgaaaatgttctaggtcaaagttttcccatgatatttcaagtcaacagatcatttgtataagggtaaaattcacttgccataatgggagaaaaatacacatgcacatgac

SEQ ID NO: 480977 - DNA, 1000 bp, Homo Sapiens
ttttttttttttttttttttggtgtggcaacacgtttaattctgtggccaggctagcctgtctccaaggcctggtggacagcacgtcaccagaggctgccgcaggagcaggcagggccagccctgcaagaggagtgcaggcaaaggcgggggctctgaagtggctgctggaggcagcaggccccgggctgggagtgctcagtagccgtcgttagcccaggtgacctcgtagtcggggtacttggctttgattttctcagttgaaatggcgtgctgggcaggaccataggccatggaatagccgtacacgtgaatcttcttgtcctgactctggtgggagatgcgcccgccgcccagacactcacagtcgcagccttgcttctgcatgtcgcccgacactttgtcgtagatgtccgcatggtactcagcccacttgtagccgcgcacgatctccttgctctctgcagccggagccccggagcggggagccgagtggactcggatcaacacatacttgaagacgccgtcggagtcgatgtccacatcaggaatgagagcgagctcgtgccgaattcggcacgagaatttatttgtgtctgagagccacgattgagaacattaaaaaggtcctcctgggaatgtaacttgggggaaatgtggcgagagggcaggactcggcagcccatgggcatgccacaagatgcgcccaggcgctctggggtgaactctgctgtgacttcaggccagaggtgtctgcccccgcagtgccctgacagctgagtggtcggaaggccccggctgggaaggattcatttggaatctttcttcttcttctttttcactagcgtttcttctagtgtagcgtcctctgctatctctactggtttttgcagctttttcttccctctcctctttttgggcttcagggtgaagtcccggccctcaggcggctgcacatggtcccctgcatcctgagcagaggccttggaactctggtccca

SEQ ID NO: 480978 - DNA, 1000 bp, Homo Sapiens
tttttggagaatggtattagaaactgagatctgggtagtaggcatgctcattgctgctggggggttgtggcttccaggacctctaaactgacggaacaagaagatctatgtgtacagtaacccagggatgtatgtatgtctgtagctatttctatacttaaccatctgtgtcccaattaagctaaacatgattcattctgatgccaacccccatccatcatgccatggatcgctctagacttcttcccttgtaacctcccactcaaacagtgagaaacctttgcccagtatgttttgagtaacctcactggagttgcagtcccactagatgaatgccaacccatttgttcatttaaaaggactttggaaccatagagcaatggctgggctgggtctgccacgctcatctcactgaaacatttgccatgaaggcactgccaagaaactctaggaccacagggtcctggtgctgcctcattactgaccatcaagctgcttagtgcatctggttggggcattaaaaaaaaatccacacgtcactccaaggttccggattaaagttaaaaaatagccatgaggtagcattatcccaaataaagaatctggcacgacttggataagtgcgatccgttatttctttttaaaaattgaaatccagaaacagctaaaagagcaagaaactgaagcaaaacaaacccaaaaatacagccaagaaaagatgatggaaagcacaaagagggtgggaaaggaacgcagcaaaattaaacgaagctacagttcttgggaaggttctccgagaccagatggcagaagaaatgatttatccctccatgtatttctgcaatactgaatgttccaaaataatatatggatttgggataaataggcagttaggcaggctctctctctctccctgtctctgtctctctcagtcttcccccacccctcttggctccagctaggtgaaggagaaagcagccatattataaacagtctggta

SEQ ID NO: 480979 - DNA, 1000 bp, Homo Sapiens; identical to SEQ ID NO: 308014

SEQ ID NO: 480980 - DNA, 1000 bp, Homo Sapiens
accgcaattcccaaaatccactacgctagaaccatatacatgcatacctataaaaagcctatcaccagccctccgtttcaaaaatccgcccgcaataaccccccctaaaggatctggtgttgtttggtaaaaacgagctggcgaggccgggtgcggtggctcacacctgtaaacccagcactttggtaggccaagggggcctgatcacctcaggtcaggagtttgagaccagcctggccaacacagtgaaatcccatctctactaaaaatacaaaaattaggccgggcgcagtggctcacgcctgtaatcccagcactttgggaggccgaggctggtggatcacctgaggtcagtttgagaccagcctggccaacagggtgaaaccccgtctctactaaaaatacaaaaattagctgggtttggtggcacatgcctgtaatcccagctacttgggaggctgagtccgaattgcttgaacctgggaagtggaggttgcagtgagccaagatcatgccactacactccagctgggtgacagagcaagactccctttaaaacaaagaaacacaaaaaagagctggggagttctcggttttattcctggctctgctacttccttgctgtgtgacctccattatgttacttgaacatctgtaaagtagagctacccacctcccaggacaaattaagatgttgtatgtaaattgccctgtatggaccagacctgcattcatccactcatttatccagcttttctttcagtaaatgtatttatctccggcactcagcatcaatggaatggaatcggagatgccttcctcctaggtgggagtgaggaacactcctactcccctcccctacttccaggtcccattttcagtgcccaagatccccctggtattccgaggacacacccagcaggacccggaagtgcctaagtctttagtttccaatttgcggatccactgccctctgcttgcgggctctgctctgatcacc

SEQ ID NO: 480981 - DNA, 1000 bp, Homo Sapiens; identical to SEQ ID NO: 308015

SEQ ID NO: 480982 - DNA, 1000 bp, Homo Sapiens; identical to SEQ ID NO: 308016

SEQ ID NO: 480983 - DNA, 1000 bp, Homo Sapiens
gagctcctgcccccaggtcactcgccctggggccacatcagaacccgcccatccccagtcccaggaggaagacccgggagtaggttgtgaaacggagtctagagggaacaagacgctcacctgggccacagaacaatagaaggggaggtgggggcctcccctgggaccgggtcccgatccggattagatccgtggggcaggattagccctgttggtcccacgaagcctgggccactggtgcggtgacggtggtggggcgggcttcggaatccgtcaggagggaagcgcgcccgtgggcgcggagaggaagtaaacccgcgcgtccacctcggggacacccccgcgctcggtggcctttgtccggtgacgctgccagcgcccggagcaccaggggccgaagggtccacagagcagccgcggacccccggaaacccattgcgaccggccccaggagacccaccaccaggctcccactgtgccgagcttcccgctcgcccggccccgcggtaggcaaagcacaatgttcccctgaggccacgacagagccggcgtgcgcagatgcccaaaccccgcgtcggggccagcgactctcgcgccagtaggcccttgacttggatcaagacgggggacgggggactcccaggacgcgagcagagtgaacgaggacaaggtgatgctccacgcgcttctactcaagtctggtccggttcggcctggtctgggccagccgaacagccacccaaacactatcacagcttgcccttccgcttgctctggctgcctgcagacttggagccattttaaggagaaaccacctggccacgcccctagagaacccgagaagccaatccacgctcggccacgcccctctccgcgcgctgcgagagccaacggtcgcgcgggtgacggttagggcggggcgtgcttccgcgtctagccggagaaacttgagccggctgccccgcccacggtgcccgaagccccaaaggctggaattagg

SEQ ID NO: 480984 - DNA, 1000 bp, Homo Sapiens
cccccaccttccatttctctgatctcagctggaattttgaggcagtcatttgccctgtccttgctgtccagtggctcggagagtgactttaaagggcaaggatgcttgatactgatcctatcccagccttgactctggtccttaaaacacttccccagcctggtcatcatgaagacctgtggagggagcttcacagtaatccccactcccccaagatcagatttgacacatccagctggtgagggcttttccagacatttactgtctagactggctacgggattcagcaggaccatgcccctccctgcggggctccagctagatgcaggctgggcttcccttcagcccacctcatcctctgcccatgattccctcaagccagcccaggattgcccatctttctcatccaagataattcatcctagtgtctcagatgttgtgtcaaacttataatctctggccccatcccagctctcacaacacccctgtgtcacatgaagctcttcatctgctgagtttagtagtacgtctccctttccacccagcctgtggaagagaagaggccagcgtgaactgggagaaggaattagaggcatccaggggagacaggcagaagggaaagcagggacaaggttggaggtgggaggtctggaacacagggcactgagggtcagatggagcagaggggtgcagccaaggggtagagaggtctcggctccaggcgcagtcaaggctggcagcgaggaggggagaaagtcagtggtgggtctggagggactaggtgggatgggagagctagtgagggggctggtgaccactcagtcagagcggggcccaggggagcctcaccatccgggtgctgacggatgaggagttttctgatttcatcatagacgaagatgagaatactgtagggaatggcacagagccaccaggttatcctgtagagagcaagagccagtcagcatggcaggagagagagatgccagaggacaggtgc

SEQ ID NO: 480985 - DNA, 1000 bp, Homo Sapiens
cagctgtattcccagctactcgggaggctgaggcaggagaatggcgtgaaccctggaggcagagcttgcagtgagccgagatcgcatcgccgcactccagcctgggcaacagagcgagactctgtctcaaaaaaaaaaaaaaaattgtaatgaatcctgaattactatgagttgaatacttattacatagtaagtgttcagtaagcgctagctttattattgttgtgattactttttctaggttgtaagctgcttgaaattgtgaacaacacatatgtcaaatattattaagcaattagtacttaacacaagtttattattacccatttatataacagttacaagtagtgataagaatgccagaaaaagaaacacattgaaattaagattattgcatttggctgggtgcagtggctcattcctgtaatcccagcactttgggaagccaacgtgggaggattgcttgagcccagttcaagaccagcctgggcaacaaagcgagacctcatctctattattaaaaaaaaaaaaaactattgcatttgattctggtttcattatgttacacttctttatttccttcaagttgagagtcacacttatgcagttttttttctcctaatgtgactttaacattcttcttgtaaaatatcactcatttctgaaacttatttgtttttttttttgctgggaattcaaactcaaatgccaccattatttttaagtgtcatctatgtgccgggctctgtgctaggtacttgaacatacctagctattatctctctttcatagattaaaaaaaaacaaggttcagagaatccaagtgaatggctcaagatcatccaattagtaagtagtagctgaaagaatgacaaataagtcttaaccataaaccagtgagaaagaactttaggagcaatatgatcaaatagtatggaagaatacgcagagagagttatttgcttttcttcaaaaaagggtggggaagagagtcagggaa

SEQ ID NO: 480986 - DNA, 949 bp, Homo Sapiens
ggtcacttacaatgtattaggtcttgtgctgggcattttacatatattatctcaattcacacgaaaatctacagagtaacgacttttactgtcatcactgtgcgaatgtggaaatgatgaccttgacctttcaccagaggtcatacagctcgtgatggagaagctcgactttttactggctcttacctacctcgctacctttagaagacagttattaaaatctttatgttttggtgcctgcttttgaatctatgctacttatggttcgatattcaccttccacacagttggtggaaaagaagcagatgtttcgggtctccagagggttctcatgggtgaagtcaggggagcggctctggggttctgactccccagtcaaggatgagttgtccacctgggatgggagaggggacgcgttgtaaggtgagcataggaaaaaaggcagatttatttacaaaaatagtatgtcttcatctggtcaccaacatcatcactgacagactgagagaaacaaatttacacatctgttgtctctaacatcaaatctgcacttgtaacttctcaagattctgagtaataagcttatactttctctaacggcccaggtgtctaccctgccatgagatcacgcttgggtccctcacatagctttcggcatcccctcaccttacatccttgtgcagagataagccggaggtcagcagggactcggtctccacccttgatttccaccaggtctcccaacaccacctcttgtacattaatttgcatcttctctcctcctcgaattaccagagcttgctatgagaggatagtgcaggatcatttccaaaacttttggctttcctcatcccactcttagcctaaaaccttctgttattggtctccctcctccttactcccctttcttactgtcacccaccacatcattcttgaaggtgtctttggc

SEQ ID NO: 480987 - DNA, 1000 bp, Homo Sapiens; identical to SEQ ID NO: 308018

SEQ ID NO: 480988 - DNA, 1000 bp, Homo Sapiens
ccagatctcacccagacccaccctacggaggaggcagcagggtttgaggagtagtgaccacggaagtctggccgtcacctgggaagtgtaggtgataggagccactggtaaacagaactgatttatttataaagttcacgctcccttgaagaggtgtgccccacacaggcttctccctagcagagcagcagtgcccacaaacccaccccagggtgggctgtcacgggggcctcacgccagggaccccgcccctcagggactgctcgtgtccagatcttggccagcatggaaaactccagatagtgggggcaggggtccaggtcatctttattacgccccaggtcaagggttctttgtacaaaaataggtctccgtttgccagcagtgtccctccagcagctcaagttaatgtgtagaaaatggattctctgtgcccttagaaaatcctctcccctccggaaaaatctccaagtgttggtgccccccgccccactgcagtcgagaagctgtggggaggggcggcgtcggaggaagccgccagcccttatggggccagctccaagcccgtttccaccgcggcattggtcaggctgggccggacgaacgaggcggcgtcggcggtgcggggggtggtgggtgggtccccggctcgctgggggcggagcgcgggccggtccacctggcgggctccccggcgatgagcgcgccggccgctcgctcggcttccggggctgaggctgcggggggaaggtggggaaccaaacgcgcgtcaacgcgggcgcgggcccggggcagaccccgcccgggccggccctgcccgcacctcccccaagcgaactcggcagtttcgtttgctcggttggttttggagtcttgagtccgtgggtgccgcgactcggtctgagacacggcgggggcggggcgggcgctcggagccgcggtgagtcagggctccgcgcccgccgactcatttctgccgccccggcccgggagcgcgatt

SEQ ID NO: 480989 - DNA, 1000 bp, Homo Sapiens
tgctgggtgctgaaagctttgggggaggcaagaagcagatgactggatcaccatcctccagaacctcagggtctgatgatgatgatagtgacagtgacagcagctaccactggctggcactttatcccacattggccaggctctgcactcagcaccttagtgatgtcacctcagcgaatccccaccacagcccgtggcagtggctcctatcatcatctactttggcagatgagaagacaggctcagaaagagttcatgagctcaaggtcagggaggtttgctgacatcagagtcctttctcttaagcaccacttcaaattgtctcttatctcccaaacagaaaaccaaaaaaaaaaaaaaaaaaatctgaaggggcacagacacacgcagtggtcccagctgggcaggaaggtctaactcaccgagccgcatgtgggatgtgggctggaacacaggtgccaggggcagctgccacaggagccctggcctggatgcctttggctccccagcacctgcggggtgtgtgagaccaagtgtgtccgggaccctcctaggcaggctccacaggtgccacccacctgcctgcccactcagctgcccactcaccatggcggtcctgccgctgcagccagcagtgggccagctgcaaggccaaggcggcgttggaccgctggtgctccccctccaggcccagggtcagcggcggccccccttcctcgagggcctccagcatcggacacaggtatagaggacactaggggagacaggcaggagcgggtcagcagaggccctccctgaccacgtcagcccttgcatctctcccctcccccagccaccaagccctgctcccagaactgagatgtgttccagcaggcctggcagctggcccagcgtcctcactgcacagatgggcaaactgaggccccagaggatgcagtgcctcctcaaacaggagggacacaaacccaccctgccgctgccccattccaatcagacttac

SEQ ID NO: 480990 - DNA, 1000 bp, Homo Sapiens; identical to SEQ ID NO: 308019

SEQ ID NO: 480991 - DNA, 1000 bp, Homo Sapiens; identical to SEQ ID NO: 308020

SEQ ID NO: 480992 - DNA, 1000 bp, Homo Sapiens
tctagaggagccatctggtttaagaaggcacattgaatgctataatatgctgtaatatatgagggaaacagactttttatactatcaagcctttcatgaaaaaatttcatgaaaaaataaacaaaatcattttagcttttaatcttggaactatatttagtataggagtgattcacaaatagcagagttactctcccattcgaaggggttatcagaatctctggaagacacattcacttttagtattaagtagagggagcttgaaattttgcaaggattttagggacaattctataagtgacataaatagaaaaaaccctccaaacttggtaaaataataaattatcccatggtgttgccattttaactttgatatctgtattaaaatgaaacttcagaactccaaacatatgtcaatattttatagcatgaaaccccaaggaagtctaactaatagatgttttacgtagggaaaaggtgaagactacaaactatttatttgcttggtttgtttgttttttgaagatcagtatactgcattgagcacactctacaaggggaaatattttcatgaaacctggttgcatttaataaaaacgtttatttcccacactgcagcccatgaccttccccagaaaatattccaatacgaaccaactgccttgataacagaacacaaacctcctaggactatagcaggactttgtgagaaagaaaaccattgcctctctctgaatccaatcaaaacctgaatgtactgtataaaaataaaccaaggtcatcattattccttgtcattgtgatttggcgtgccttcaaattatataccctgtatatttcaaataactgcaccgcctccattaactgagtttgacatcactttaatcaatgtatcttttcagaatgaaaggcagaaatgtcaaattcctaccattataaattcttttaactctctaatctgcattaaataaaaggttgtctttgagaaataataaatgct

SEQ ID NO: 480993 - DNA, 1000 bp, Homo Sapiens
tatgcttggagtcaaactgtaaaagatttgaagatatttattcatgtcatagtcccaggagatcctgagaacacgtgctcaaactggtggtgctacagcttttggtttcgtacgttttagggagacataagccataaatcaatacatgtaagatgtaacattggttccggaaaggtgggacaactcgaaggtggggtggggcttccaggtcataggtggattcaaagattttctgggccgggggcagtgactcacacctgtaatcccgccactttgggaggctgaggtgggcggatcccttgaggtcaggagtgagagaccagcctggcaaatacggtgaaaccccgtctctactaaaaatacaaaaattagctgggcttggtggcgggcgcctgtaatcgcagctactagggaggctgaggcaggagaatcgcttgaatcttggaggtgaaggttgcagtgagccgaggtcgcgcccactacactccagcctgcgacagagcaaaactccatctcaaaaaaatttaattaattaaaaattaaattaaattaaaatactgtaaaatacttcgatatctttcagggcctgccatctgtcatgtcggtatcctattgctacggagagtccgcctagacagtcttaagtctgttttgacgttaatgctggtccgaattccaaagggaggaggagggtctagtgaggcgggtcccacccggcctttcccatcagagcccgaactcgcggttcaggttccctctaggacgcccttggccgagaggaggcctccaatggctggctggggggcttagaattttatttttggtttacagcgcagaagaagagcagtgaggccggggcgcgggtggggagggcaaggcggcggctcaaaaaaaaagccagcccctcgcggcccgacagagtctcggcgccccgcgggtcggtggagcctcaggggtgagcgcaggccggagacaggggaacccgccgcgggacagggga

SEQ ID NO: 480994 - DNA, 1000 bp, Homo Sapiens
  misc_feature (48)..(48): n is a, c, g, or t
  misc_feature (135)..(135): n is a, c, g, or t
  misc_feature (176)..(176): n is a, c, g, or t
  misc_feature (178)..(178): n is a, c, g, or t
ggccctggctcttcctctcccttccagtccacgtcgtcgacgagtganaggtcccgagggcggcgactgcaagcgcacgccgttccgggactaccggggcaactctgcgccgaaccctccaacaggcgcgcgggnacagatagatacgttccggactggccaggggacccgtcagncnagcctgcccagctcccttacaacgggttggaggtggcacttactgcggagattgtggattagctccgagtggctggcgccgccggatttccaggccatcgctaagcacactcggagcaggtacagaaccaccttcagcgcgacgacggtgcccagcagttttcccaagagtgagaccacctcccacaccgtcaccgccccgctcgcgtccccgctgtagctgccgctgttactgccgtcgccgccgctgccgccactgcgcgctcccggcatcccccgcggcacgatgcgctctgtgacgccgcggcttagggtgcggccgggtggggcgagggagggggaggcgtgtggcccagccgcccgcccctgtggctgctaccgctgccaggggactgcagggaggccgggctgagtcagcgccacttccgctgctgcgtgtccctttctgaggcctcggaccgcaccgcttcgccctgcggcccggctcggtagcctgatcagtcgcgttcccggctgtgtctccggtcaccgagcgggacggcgggatggcggggtcgatctgtgcagacgctgctagtggttccgcagtcgtcgctgggtcacctgtttcgagcggcggatctgctcctatagatgtccagattgttagacggtgggcttcatccgtcctacctcgcccaacccagttgactaatatttgggtcggtggagcccgaataatacaataagaataaaacccaacgacaaaggccctctctaacccgagtacaccggcctctggctttgtgacaagcacgtcactgttaggctaagcagagacttt

SEQ ID NO: 480995 - DNA, 1000 bp, Homo Sapiens
ctgatagctgggattacaggcatgcaccaccacgcccagctcatttttgtatttttagtagagacaggttttaccattttggccaggctggtcttgaactcctgacctcaggtgatccacccgcctcagcctcccaaagtgctgggattacaagcatgagccactgtacccagccagtttttctaattaagttttaatctgtctcctccactaggccatgagccctaggaggagattgtctctagagggtatcccctgtgcctggcacatgcatgcaagttatgatttatgttgatgaatgaatgaatgaatgaatgaatgaatgaatgaatgaatggtggatgggtcctctgaggctctagaaataggggtgagaggccagccaggtgtagcatgaagggctggacaagaagggagaggccttctgggataagatgggaaggaggctgtaccccacaccctgaaggtgtctatgagttcacatggctcaggaatggagttttggggccctagatgtagacagctgtggcgatggaggccaaggttttggcctgctgtgggggttgcattcacctccccatctccacatgacgataccccagcatttacgaggcagctctgctgacctggcccaggcaccgtggtccccaacttcaacgcatctgaagcgttgcccagggagcgcgttagaaatgcagattccctggccccatcccttgaagactctgattctgtaggtctggggtgagggggggggcgctgtaggttttgcctaaagacgagtctaaatctggcacgcaggttaaggatgaccattcctaaggcaagcaggtgacactgtcggcaaattgaggtgagactttttctgacccaccccgataccggagggatggctgggctctggtttggatacagacagaatgccagggactacacctgcttctcacttggaacttgggtgaaacctctcaggaagctgtcattcttctcctatacccca

SEQ ID NO: 480996 - DNA, 1000 bp, Homo Sapiens; identical to SEQ ID NO: 308026

SEQ ID NO: 480997 - DNA, 1000 bp, Homo Sapiens
  misc_feature (133)..(133): n is a, c, g, or t
  misc_feature (199)..(199): n is a, c, g, or t
cggccggcggcagcggtgcccgggcagagggacccgggtggcgaggaagagggcgcctccgtggggttggggggaatcctctgtagtccaagccctcacctgggccttccagcccagggcaccaagtctccantccctactccccccgaggctttcggatgcccccgccagcgtctcggagtttcgttcaagtcccggngccctccaccaggacactgcgccctgcagcccgcagtagccacccgcctcccccggtgtcgtcggggtccctggatctcacctgggggcgggggccggccctgcccaccatcccgagcagcagcacggcaaggcgcagcgggccgggggcgccggccatggcggggagttcaggactgggccatcgctgccacctgcggaaccgcgtgcggagactgatcccgggctggtggcgggcggtgggggaggagccggcgaggggccgccctgcccgcgggaggggcctggcagggtcccggttcttccggccgccagagacccctgggcccgccccgccgcacccctctgccggtcccgggccaggagatagcgggcactgctctccgagcgagcgcgctgggaatcaggaagcgcaggaggcgccaccagctctgagcgccgacagtcgctggccggctttcagcgacaagccaggccctcctcccaccctggcaccccggacctcctcccgggtctcccagctgaggaaagctacagcaacccccgcccattcagggtccctcaaaggaaactgaggcctgaggaatggacgggacttgtccaaggtcacacggcttggcaggccactcctggaaagtatcctcagagccaggggtgactaataagaacttttttttcccaggattaccccttcccaggtcctcttctcattcccatgttctgtcctgaaggcaggcccaggatagtcaaggttgggggtggggagactgacaaatggatccacagaactctgacagtcgca

SEQ ID NO: 480998 - DNA, 1000 bp, Homo Sapiens
acggcccgggctggtatttttgaaccaaccagaagaacttgagttctggttaaagctagtctgacacacactggatttatccttttaaagtgcttcatctctgggtagtttgatgttaatgtcacagtgtcacttaccatctttcaggatggtttctctctctgtgccatctatcttctgccggccaattaggaaactggtggtgtcagcaaagtagatgtaattggtttctgcgtgaaagtctaaagcacgagggtttaccagattttctatggggatcatgtattcatcagctatcttggtattcaagtccattcctctaacaattcctgggcgtcctttcccataaaagaggaacaactcattctttggtcctgcagaggaaagattacaaacacaaacaactgatgctgcttaatcttctttacactgcataatgccaccgtttaactggcacaattagcgttttttaaattcaatgctaaaaattaaactctaaaatatgccaaatgtatcttgatgcaagaaggccagctaattgcattactttaattaaaacagaaattacttccgcaaatgggttatatgtagttaattatccctttgtctgtaactgtctggatagcaaaaacatgacagatcattagataacttgtaacttgtaaaaccggcatttattaaaacatcgggcacatttaattttataatgtattataatctatctaacattttctgtcgatactaactgtaccattcattatatttgacaatgctaaaaacttcagaaaatttaagacacaccaaccccaagtttgcatctacaaattgtcagaggcaaacaaagaatcatatagtatcactaacttgcatgtgaatatattacagttgcccaaacatgtgacttattctttttagaaataaaattaaataccagttatagcatccctttatcttcaaattttaattagaatgttagaggctgatgctgtctgcagtaact

SEQ ID NO: 480999 - DNA, 1000 bp, Homo Sapiens
  misc_feature (271)..(271): n is a, c, g, or t
tcaaagctttaaatggcagtcagcatcctcctcataatagaaataagcaatagtccagtaacatttaggaaattagttgaaaataaatacatataattctatctttcttttctaagtcatcttcatttaaattttagggtggaggccttatctacggaaagagaaatgctgccagctggtttggcatgcttatctctctcgattctgaatttccagattctgtattccagattgcctggtttaaaaatcccaaatctcagaaataaataancaaataaattaattaattaattaaattaaatcctaagtctgacatgttggctctgtgagcgtaagcaagttaaaaacttctccttgcctcatgaatccaatgcggagaacattcatagaattatgctagccccattgatagttctccctaaatgttaactactattattatacatgagcacatctgccaaaaatataagattactttttacaaaggtgagatacagattcagcctgagccaaaaggactccacactcagggagacccaatagaagccaaaagcaatgttcacttacctgtactccaacaggaaaacttggttttgtggtcacacaatcgtatggtaccattgcaacctttttcatcactaccatcttcacagtctttttctccatcacagcgccacaaatcaggaacgcaattaccatcagggtggcactgaaattcatttccgttacaaccagcaggagaatgaatctcttaatttgaaatgaggaagagagaagcggaggggggcaagacaggagagaaattatgattttacttgttggtagtttttatttcacatttttttctttcttcaggcattattataatgctagagagaatacatttttactttagatggttaataagtataaatatactctagtattttctaattcatttaaataacattaatagtccgataaaatgatgtttcttgcctcccctaaaatttctgaaagt

SEQ ID NO: 481000 - DNA, 313 bp, Homo Sapiens
ataactgaggttggatcagtgggcaagttcaattcgatacctgagagcgatttgcagccatttgggttatcaggttgtatttcatacccatctgtacagaggcacttgtaagtcccgtatgtattgatgcattgctggctacagggaaagcctgaagagcattcatcaatgtctacacatgttttgccgtcatccttcagttggaatccaggccagcatttgcactgggaaaagaaaaatgagcataatcaattcatatcattgtcactgtcttttacttttggatatctctttagcattaagcaagaaaagc

SEQ ID NO: 481001 - DNA, 954 bp, Homo Sapiens
  misc_feature (502)..(502): n is a, c, g, or t
  misc_feature (641)..(641): n is a, c, g, or t
aattttggaaaagtgtcagaaggcaatactttaggtgtagattcaattttccaggtctgggatataaggaactctaaattctaaatttcaatatttgccagtatactcacgacagtcatcaggttcatcagatccatcaccacagtcatccacggtgtcacatttccaccagaatggaatacatttgtcagttttgcaacgaaacttaaaaaagaaaaaaagaaaaaaaaatgttgaagaacccagtgcatatataatggataatttaaaatttggcaacacagcctagtctacttttttgctgcagatgtgaacaatggtgattttggaaaattccacaataggaactaaatacacaaaaagccacaacgtgatcttccaggagaggatactgctcaggaaaacctcttgagatgacctgcaaacacagacaatctctcacatttacatgttttctgcagagctacttggtttttgtggttggttagttggcttgttggtngagatagggtctcgctctgtcgcccaggctggaaggcagtgatgtgatctcagctatctggaacctcaacttcttgggctcaagagattctcccacctcagcctccagagtagctgggactataggtacatgccacctngcccagaaaatttttatattttttgtaaagatgaggtttcaccatgttgccaaggctgatctcaaactcctgggctcaagtgatcctcccacctaggccacccaaagtgctggattacaggtgtaaataaatcacggccccagccctaaagggctacttgtacactcagcagcagagatgagtagttgctacagagaccctgtggcctgaaaagcctacaatatttactatctggccctttacaggaaaaatttggcaaacactaaatagggctaaaagcttcaggaattcaggaagagatccagcccggccg

SEQ ID NO: 481002 - DNA, 1000 bp, Homo Sapiens; identical to SEQ ID NO: 119888

SEQ ID NO: 481003 - DNA, 662 bp, Homo Sapiens
cggccccgcccctgccctgcgccggagctggctccgtctgcgcctcagcctcggtcccgcctccagccctggccccgccccgccgctctccccttctccgcccctgccctggctccgcccccgcctgcccgcgcaccgcagaaggcctcctggaacttcctggacagcttctcgatgacgctgtagctctccacgtaatcgacgtgttcgtcctgcggctcgctggcgatctgccgcagcgtggccttgtccacgctgcccactccgatggcgaacagctcgacgccgctggcccgggcccgcgcagacacgtcctgcacgctgtcctggggcctcccgtctgtcaccacgatgaccacctgcgacacgcggggcggtgtgacaccgggctcccggaagcccacgggactgtccaggagaggaggctgaggcccggagaggcgggaggactgccgggtcgcacagccaggcggcacccgggggaagaggacccggctggccgaagaggagacccgtttcctctgactgagagacgtggctggggggctttccatctgcttcgcctccctcgggcaggcagctctgagatgcccggagggatgtgatgcccatcgccaaattggggtctctaaggtcagggccatgccttcccctcagactga

SEQ ID NO: 481004 - DNA, 1000 bp, Homo Sapiens
attaaccctcactaaagggatcatggcagcatgaattccaactcacttttttacaactccaacttctatgtttatctttgttactttcacttttttacaacctggccagaggcattttttaaatcaggcccaatatcagtattctttttgtgtgtgccaattttgttatcacatccctatgaagttgaaaaataaagttaattttgaccaaaagacttcatttgtaacccatgatgttcatctgtgtgtgcacaggattcctgagtgcctctgctacgagttactgttcacctctctgtgctcttaagttcttgaatcactagactcccctttgtattgggcagaggaagaaacatcaggaccctccagaaaacaccaaggcaagggtgaagtatggcaaggaagagcaaggcaaagtccttctgatgactcccgtgttcaaatgtgagattgtcaataatctcaccaagtttcacacgtatcacttcctcctattcatgaggcaatgcccttgcccttttgtccttcagctttccattttgaattattttctctttatttttacacttacttgttttgagacaaggtctggctctatggcccaggctggagtgcagtggtgctgccatcttagttcactgcattctctgcctcccggcctcaagccatcttcccacctcaggctaatttttttttttttttttttttttttttttttttttttgaaaccaaattttcactcttgctgctcaggctggattgtattggcttgatctcagctgattgcagcctccgcctcctgggtccaagcaattctcctgcttcagcctcccgggtagctaggattataagcatactccaccgcgcccagctaattttttatttttagtagagacagggtttcaccatggtggccaggctggtcttgaactcctggcatcaggtgatccacccgcatcggcatcccaaagtgctgggattacaggcgtgagccactgcg

SEQ ID NO: 481005 - DNA, 1000 bp, Homo Sapiens; identical to SEQ ID NO: 308031

SEQ ID NO: 481006 - DNA, 1000 bp, Homo Sapiens
atcacgaggtcaggagatcgagaccatcctggctaacacggtgaaaccccgtctctactaaaaatacaaaaattagccgggcatggtggcgcacgcctgtagtcccagctacacgggaggctgaggcaggagaatggcgtgaacccgggaggcggagcttgcagtgagtcgagatcgcgccactgcactccagcctgggcgacagagcgaaactccgtctcaaaaaaaaaaaaaaaaaaacaacacacatcgcttgtgcctgtagtcccagccacttgggaggctgagacaggaggattgtttcagcccaggagttcaaggctgcaatgagctatgatcacaccactgcactccagcctggacgacagaacgagaccctctctaaaaacaaaacaaaacccaaatttattattttacagttctggaggtcagaggtccaaaatgggtctcactgagctaaaatcaagctgttggcagggctgtgttccttcctggaagctctaggggaaaatctattttcttgacttgctcagctcctagaggctgcctgcatttcttggcttgtggcctccttccatcttcaaagccagcagtggctagtagagtctttctcagatactgtcctgggttccggctcatctgcctcttccccattcaaggaccctcatgattatattgggctactcagtccaggataatctctttttgagtccgctgatgagcaaccttaatttcatctgtaaccttcattcccctttgccatgtaacaaaacattcacgggttccagggattagggtgaggggcatcattctgccaaccacacatgacccagcagacagaattaggatgagactggaatgtagtccagcagggcagagaccaagcctagtcctctgttcacctctccatgccaagcatagtttacaggcgctcaggaaatgcttcttgaagaagtgaataggtaggagtgcacgtctccttgtaccaacttgtctgaaa

SEQ ID NO: 481007 - DNA, 1000 bp, Homo Sapiens
atagatatgattatatatgaatatcattaatcattaatttgtagcaattactctttattccaatattataataatcttcactctacaatcataacccaggaaaaaccaggccatacagagataggagctgaaggggcatggtgagaagtgaccagaagacgagagtgtgagccctctgtcatgcccagacagggccactagatggttccttggtctagcagtaatgccagcatctgggaagatgcccattaccaagtggacatggtctagcggtagcatcaatgccaaggaaaagcacctgctacttagcagaccaggaaagggagtctccctttccccaggggagtttagagaagactctgctccaccactcttgtggagggcctgacatcagtcaggcccacccgcagttatctggaggcctaaccatctccctgtgatgctgtgcttcagcggtcatgctcctgtttcactttcatattctactctgggcacctggctctgccctctagatagcagtagcaaaattagtgaaagtattaaagtctttgatctttctgaaaagagcatagaataaataatggcataagctgtactctctctgccttggctgccaaacagggaagggccccctgtctggtggacacgtgactcacgtgaccttatcaatcattggagatgactcacactctttaccctgccccttttgccttgtatccaataaataacagtgcagccaggcattcggggccactactggtctcggcatcttggtggtagtggtcccccgggcccagttgtcttttcttttatctctttgtcttgtgtctttatttctatgatctctcatctctgcacatgtggagaaaaacgcacagaccctgtggggctggccactaccctttttagcatccattgagatgattatatggattttatctttcattctgttgatatggtgtatctcactggttgatctgcatattttgaactatccttg

SEQ ID NO: 481008 - DNA, 1000 bp, Homo Sapiens; identical to SEQ ID NO: 308032

SEQ ID NO: 481009 - DNA, 1000 bp, Homo Sapiens
gtattcttcttcaatctcctgtattggctttgcattgagtggaagctcagcaaaccttctttgataactgaacccgtggttgcaatggggatgtccttgctgctaggccgcaggaaggaaagctactgaggtcctacttccagcgactctagggaccagcactactgcgtttcagggttttgtacgattcagtaagctctcatcccattttctcaaacagcatgcataggtgttgggacatcttccaattctgtattcttggctgcgacatttcttccggcaacgggcagtcccataaccacatattctgtccaattcaaattcgcttctcactagataacaggatatggcactgtcattcattgcttactggcaccaaaaggcaaggctttggtagaaggtgttttcggagggggatagagaatgctagtgcatggtggtagaggttttcctggacccccatcctcctccactttcctagatgattgatttgaccttctgattcccaaccagcatggattttatttgaaaatgtacatcattccatgtcacacttattttcaaaatccctacaagtttactattgttttctttattaaatctctccaagccccttacttggtctccaaagcaatcgtgatctgatcttgggccactttttcagactcatgcttttccactgtggccctcactctgtccatgaaactctcgccggcttcccttctgttccgtgtgagcttactctttgctatcctggtaccttcacgtgcactgtcccctctgcctggaaggtttttcttccttcccataagtgaattctttgaacttttatgtctcaaccttaagttcccaatattgggcaaatctttctctgtcctcttcgtgtattcaaatgccccaaaagtatttttctccctatgcatttgttattcttttatatcacctatcgcaagttgtagttatatatctatgtatctatataggtatatatatatataca

SEQ ID NO: 481010 - DNA, 1000 bp, Homo Sapiens; identical to SEQ ID NO: 308037

SEQ ID NO: 481011 - DNA, 1000 bp, Homo Sapiens
ccttcttttttgtaaggaagaatggagaataagaatgtgtgtgtatgttcattttggtaaaaaggaatagaaaaaaataaacctgaaatgtgttactatggggatgggtgaaaatgggatggaagagacaggaaagacaatgagaatatatccttattcacttcctataccttgagtataactttttgaagagttttaacttttgacctatgttaatgctttacatatttaaaaataagtttaatcaacaaaggtagaaaaataaagtcctaaagttgaatacaaatagaaacaaatctaattatataagaaattacagaaaaaataattcaggtaatttttgaacacagtacatagtgggtcataggctaaggacaaaaacaaatccaaagaaatcttcaattttatttagcaggtttgttattggtagaaatactaatgtaattctaaaactatcttatatttattgtagaataaaacaaataagtaaatatattaaagttgctgggaactagggttctccctacaggaaaggaagatacaaatgtggaaaggaggaagattcctatggtgttgcgttgagactagactatcagtatgattttatgatataagaaacatacacatatatttcctaacactatctattaaaaagaacctaaaagtagtgacactccagtagctcatctagtgtccagatttggtttctaaatatcattccccactaaaagtgggactccttggataaatagctgatttcagataggggacaaggaaatacattattgtgccacaaatatcttaagttccaaaagtgctcttatgctgaggaagacatgtcaaaaagccacaggagacagcttgaagaggctcccaccgaccacatttgggaaaacgttaagtatcataaagaataatggtaataacaaatatagaagcccataatgatactctcttttatatttttataagagagggaaaacaattagcaactggtgaa

SEQ ID NO: 481012 - DNA, 1000 bp, Homo Sapiens
tgtaatcccaacactttggtaggctgaggtgggcggattgcctgagctcaggagtttgagaccagcctgggagacatggtgaaacctcgtctctacaaaaaatacaaaaaattagccgggtatggtggcgcctgtggtcccagctccttgggagactgaagtgggaggatcgcttgagcctatgaggtcgagtctgcagtgagccgagatcgcaccactgcactccagcctgggtgagagagagagaccctgtctcaaaaaaaaaaaaaaaaaaaaaaaagaagaagaagaagaaaaagaaaaagaaaaatgctcaaaccagtttgctcagaagtccgagagactatttagtcttcagacagtgtgctttcatggtgatggaagtgacaataataaaactagggacagaagttaaaatgtatacttgactggtttccaagttacaagcaaataaatacatgtaaaagaaaaagaaaaacaaggttcagacttactttaaaatctgctaattgttggttgatgatttccacttcggtccccactacccactggagggcctctgcctcctctgctgctgtggtcgcgtcattgagtcctttcaatttcctgtagaagtcctctacacggcctagtgtcagttccagctgttcctgacgagctttccccctctctgtcagtttgccacactgtttgttcagggcttctagctcccttttgagacctaacaaatccagagtcccctcttcttctagcatatgtcgacactctgcttcagaggcctctatgtctaatttgaggacgtgaattttgttaaggaatagccggacatcctcgatttgggactggaggctatcagtgtctctgccaatagcacccatgccatctagctcatcatccaggtctgccaattgagagaacatctctcggacccggcagtgaaactggccaatcccctccagcttgttttccatcatcacacaaccactgttcactctttgct

SEQ ID NO: 481013 - DNA, 1000 bp, Homo Sapiens; identical to SEQ ID NO: 308038

SEQ ID NO: 481014 - DNA, 1000 bp, Homo Sapiens; identical to SEQ ID NO: 308040

SEQ ID NO: 481015 - DNA, 1000 bp, Homo Sapiens; identical to SEQ ID NO: 308041

SEQ ID NO: 481016 - DNA, 1000 bp, Homo Sapiens
acgcgggggagtgcagctggcaccatgggtgtgctccagagcaacttctgcttgctctgagccccctgccctgcctcccctttcaccatgtttcctctgacaagattttaagtacagcaattcaagaagatttctcctcctaaacgacatttatctgaagtctattgcctcttgattgctggaaaagaatcttaaaatcatttcaaaagtaacttataaacaaacttattaaaagtgatgaaaggagcattgaaattaattagcactaatttttcactgtgccaaagtgtgcagtgtccttcagaggaaacaataacagatctggtgagtgtgccatgccagtggggagaattgaatgtccctcatctccctctttccctagggacattagtcatgagtgccgagtgtgcggggtcacagaagtgggtctttctgcatatgcaaagcacatttctggccagttgcacaaagataacgttgatgcccaggaaagagaagatgatggaaaaggagaggaagaggaagaagattattttgacaaggaactcattcagttaataaaacaaaggaaagaacaaagtcgacaagatgaaccttccaatagcaaccaagaaataaactctgatgacagacgaccccaatggagacgagaagaccgaattccttaccaagacagagagagttacagtcagcctgcatggcatcatcgtggacctccacagcgggattggaaatgggaaaaagatggctttaataatactaggaaaaacagctttccacattctttgaggaatggtggtggaccaagaggacgttccgggtggcataagggtgttgcaggaggctcctcgacttggtttcacaaccatagtaattctggaggtggttggctttcaaatagtggagcagtagattggaatcataatggtacaggaaggaattccagttggctttctgaaggaacaggtggcttttccagttggcatatgaacaacagtaa

SEQ ID NO: 481017 - DNA, 1000 bp, Homo Sapiens
gaattcacagagaatccaaggagtggtcagagagctggaaggaacaggtgatgggggtgttttggaggagggagcttcataaaagaagaagtaaatagccgggtgcggtggctcacgcctgtaatcccagcactttggtaggctgaggtgggcagatcacgaggtcaggagttcgagaccagcctggccaatatggtgaaactccatctctactataaatacaaaaattagccgggcatggtggcatgtccctgtagtcccagctactcaggaggctgaggcaggagaatcgcttgaacccgggaggcggaggttgcagtgaaccgagatcgcgccactgtactctagccggggcaacagagtgagatgctgtctcaaaaaaaaaaaaaaaaaaaaaaaaaagaataagtaaagctgagtaatgggtgcccagaggtttactactgatcagtatactgcttttgtttatgtttgaaaatgttcataataaaaggttaaaaaataaaataaaaaagtgaaaaaagagggtaggttagggtatctgtcttgagccttctatcaaaagttgtggttctggccgggcacggtggctcacgcctgtaatcccagcagtttgggaggtcaaggcgggtggatcacttgaggtcaggattttgagaccagcctggccaacatggtgaaaccccatctctactaaaaatacacacatacacaaaattagctaggtgtggtggcaggcacctgtaatcccagctactggggaggctgaggcaggtgaattgcttgagcccgggaggtagaggttgcagtgagctgagattgcaccactacattccagcctgagtgacagagaaagactctgtctcaaaaaaaaaaagctgtggttctatatctcaaaataataaaagccatatatgacaaacccacagctaacatcatattgaatggggaaaagttgaaagcctttcctctaagatctggaacaagacaaggatgctca

SEQ ID NO: 481018 - DNA, 1000 bp, Homo Sapiens
gacaggtcagcaaggttcaatggctcaagccaggcaacaggtcatctgcttcctcctccctacctactgggtaacctgggcagggcacccacctttataggtctctccatctataacctgaagcaaaacaccaaacaactgtccttgcagatgtcgcgtggcaggcctggtatcagcaagctctaaggagtaggtgccagctcagtccctgtaaggagtgtcctttaagctgactttcctgttcatttgacactgagcagcactcctgtcctttaagaaaaatgcccaacaagctgactcaaaaataacagatgccaatttgcatattatttcacacatcatttgcatgctgttcatttagtatcatcaaggctctgctcagaatacaactctggttaccctgtgcccagggcttgtgaaacagatatggcttccacaaagggcaagccctgggcacgtccctcccctgcccagctgctcttgctgcctgccccctggcacctggctgggaacgtcacccactgccacagccctggtgctccaagcagggtgaaggggcagaaagaatctttagaattctagaaagcaccctgactcaagtcttgaaggggaaattgtgttctcttgacgacgcatcaggcaagctgtggcaatgcttttcttccctgcttctgtcccaggtcagcttcctagttcggctctccctgtggccctactctctcagcctttttctgcctggtcatcgtgtgtccccctgaccttcctccaggcctctcagcctctggcctggccccacgggtttatttttgttctctctccacctgtccgatttgcatgtccacacccggttagctctgcccagaccacaaattgctaactgagtgtagaataacagggccccatggggtaagaaggctccagaagtccagcccaggccaccactgcagccctgccctccggagaacagcccacttcctttttactcacagagattcaccca

SEQ ID NO: 481019 - DNA, 1000 bp, Homo Sapiens
gaagcaggtatagaatgttcaccgggcatcaaatggcaggatataatatggcaactgcaaggggaccattatgaatagaacaggagcaagtgtgggcacagaagtatatgagactagagaagtaaactaatttattaatatcattattgttgttttcaaactttctctttccagcctatcttaaaacagttaccatgctttattgaggtgtaattccagtatcatacagctcactcaaagtatcagttcattgatttttcatgtactcagagttgtgcaaccatcagcactattaattttgtaacatgagtatgactctaaaatctcaatacccactagcagttattccacatttccgcctaaatctcccagcagccactaatatgctttttgtacctgtgatttggctattttggatcaaggttcatccatgttccacatgaatcagtacttcactccttcactcctttttattgacaaataatatttcattgtatggataaaccacattttatttatccatctctatcagttgttggacatttgggttgtttacaccttttggctaccatgaaaaatcctgctaatgaacattcatgtacaagtttttgtgcagcgtatattttcctttctcctggatatatgcataggagtggaattgctggttcatatggcaactctaggtgtggtctttggagtaactgccagactatggttcaaatgattgtacttcttacatttccaccagcagtgaataagggtcctagtttcttcacatctttgacaacattttttatctgtcttttttgttatagccccccaagtgtgtgaagtggtatctcactgatttatttatattttcctgatggctaatgccacacagtgtatagaatttgtaaaatcaggacagcattgccaggtagtcttgtaagccttttacctgtgttaactgtaatccttcaacagtctcacaaaataggtactgttatcccaatttcat

SEQ ID NO: 481020 - DNA, 1000 bp, Homo Sapiens
aatcctggagtagacacaatcatctgaagtatgtatactgaaaaagcagttgcttaggaaagaacccccggaacactgtccaaggaggagtgggggagagtatgggaagagaagcctgcaaagagatgcaatcatttacagaagttactgagactgccaatttactaccggtctctgctacaagtccatgagctcccaaagcagggatcctttttcataaccctgcattctcgcttcctagctcagtgccaaccctttgaattttcactgaactgaggagcttcctgagttacccttgtataccccaacctacaaaatgtctaagcattccctaatcccttactaaatttagttaattcttactttacctccccttctgctcaccaaaggctagaataataccaaatactaagcttatttttagagaaaatctagcaatcatctagatttccttatttaactttgatgctgctattctgactgctctcataactgctagtgaaacactgggtgtatatagataataggaacaaagaaggaaccaaaattgcaatgaagataaattactttgtgtgcatttacaacctgaccaccatccaattatacttttaattaagaaaacatgttttaagctgcattatttcagattatcagtgattctgaaaattacaagtggcagggtgcaggaccttaagtcaaatagacgttaagttcaaaccatcagtccattcgtcactagctgtatgtcttcgggcaaattattttacctctcagcctaatgtaataatgcaggtaacactgctcacgcggtgtgttgcacatagcaaacacttgggaacagttagctattcatcgtggtacattaaattgcttttccccaagagccactttatttatttattttgagacgaagtcttgctctgttgcccaggagtgcagtggctcgatctcggctcactgcaacctccacctcctgggcccaagcgattctcatgcctca

SEQ ID NO: 481021 - DNA, 1000 bp, Homo Sapiens; identical to SEQ ID NO: 308044

SEQ ID NO: 481022 - DNA, 1000 bp, Homo Sapiens; identical to SEQ ID NO: 308045

SEQ ID NO: 481023 - DNA, 1000 bp, Homo Sapiens; identical to SEQ ID NO: 308046

SEQ ID NO: 481024 - DNA, 1000 bp, Homo Sapiens; identical to SEQ ID NO: 308047

SEQ ID NO: 481025 - DNA, 1000 bp, Homo Sapiens; identical to SEQ ID NO: 119890

SEQ ID NO: 481026 - DNA, 1000 bp, Homo Sapiens; identical to SEQ ID NO: 308049

SEQ ID NO: 481027 - DNA, 781 bp, Homo Sapiens
catgttgccggtcctcaggcgctttggtcgcttcttccgggcgggaacctgccgtgtcgcaactcgcttccggtggacaagcggcagatagcggaaagagccgcttcgtttcctgctaggcctgaaaggggcggggaaaccgtgccccggaactctgagcatgcgcagattcccgccgagcttgcgcagattcccgccgagctcgcgcagattccggccgagcatgcgcagattctctccgagcatgcgcagattcccgccgagcatgcgcagattcccgccgagcatgcgcacattctctccattccgccgtagtcgggagcgtgtggtgtttgagccgcctgaaacactagtacgacagatttacttaaagattcacttaatcacttaaagattcacgtcccttttctctcattgagaataacacctaaggcattttgtgtcagagctctggagttagatttcttttcttttttttacttttttaaaaaatcttttttcctttaatttcattttttcatttattttttataacttttgatttttttttttctcatcacttgtgggtttttttctaccttttatttttggttattgtggagttagatttcttgagtattaggtatgaatgcagaaagtcactaactctctaaaatgactcagtttctctaaaaagtgataatgaaacacttcaccgatgtgataaccttagagccaactggggaagaagagtaggacgtccccaggagcacaaaagtagaagggagattctactctgcag

SEQ ID NO: 481028 - DNA, 1000 bp, Homo Sapiens
gtcgacctgcaggtcaacggatcacaatatgtcgtctgttgttacttcattggaaaatgtaacgtcttgggacctattgatctgaagtcttctgaggcacatgacctcagaagaattcttcaacaaggtggatttatacaaaatgcaggggaaataaatgaggcaatgtggtgctgagtcaaagggtaacagaggaacagtcagtgacagcgcaggcagacgatacctctttctcataagtgcgagtgtaaaccgcagtgccctgggtgagtgtcaggatgagtttcccatcacttagctctggcacaagtgtcctctcttgcccgttacacttctgcaggtgaaaaagtttgcttccatccagtgtcacaatggacttgacctttttgtcatctgctgttgtctcatcgaaccccatccccagcttaaagctgatctctgtgttcttgaacatgctctgtgtttttaaggtgataatgtccccattctttttgatgattgtggtaggctttgtcatgctagccacctgcctgatagcaaaacttgcaccgattaacttcatgtagtcatcaaaattcttgctgtctgagagcttccaggtgcacaggaaggcatctaccatggtgatgctggcctagactgagaaagaagctgtgagagagcaggtgtgcaaggagttggactgccgatattggatgcaatttttggtgccttaggaccagttgaggcagtggcactaaactgtgctaatgctcattgtatttttccccaccagacagtggcaatataatttgtgagtatcgtcttgcttcaactcatccgtcatgactttctcacagctattaaaacatgttttacaagcagaaacttacattttagatgaataaatgcaggctcctgaggaaaggcacttcatgattgtttgagctgtgagctcaactatctgcttttccatggaacaccatatttgtttgaaaggccaactgatagacaggctgtg

SEQ ID NO: 481029 - DNA, 1000 bp, Homo Sapiens
aagctttattgatgcaagtgagggaaaaagctgaggtacacatgtcgggttggaggggcaggatggcccccaagtctctgtcctgatccaaggctgtgtcctgctaggattccccctcctcctgtttcctctccttctcgtgctgcttctccagtggctcacacttatcctagaaggcagcggggaattggggtgagggagaagcagaggcatggggacagggtgggaggtcttccggggagagggcagaatgagctctggcctgtggaaccagctcaaccagggctccaaccctggcactgtcacttcccagctgggtgatcttgggcaagtcattttctgtctctgaacctcagcttacttgcctctacaatgggagctcagacccttaagaaccactggcatttactgagcacatagtacctgcagggcccttatgctgcagctcctgaattcctcacaaccaccactactatgcagatgatgtaactgaggagcagggtggccttgggacccattcgaggctccctagccagacagtggaggtgccaggctgtggatcaagtgagctgactacagtggttgcgttcataagccctgtcccaggatcctggggctggggatggggcaggaggtagttcacatccctggtggtcatctcaggtggcaaatggaaggaattgtttttctttgaatagtcatggaagtactgcatgtatatattttaaaaattggaaccagctcatcggtgctgtgatttcacaggtattagggcacagggccacaccaacacaagtcttccaaacacaggtttaaagaaaagtgttaaggagctcattatacagtaattttcatttgtagcaaaaatcgggatggtgactgtggccgtgctgcagtgtgggtgacattgaaaaccacagtatcaattccccactgcacgggtattaaaaatgagcggggagtggaggttggggtgaaagcctggggtttgggacgcgtc

SEQ ID NO: 481030 - DNA, 1000 bp, Homo Sapiens
cagtcaagcccatcctcagccctggctcaggaacaggtgtgggtgggatgggcctgctccttctaggcctcacctgtgctggagatgcagctgcttcctcactgtctgattcctcctcactgctctcagagtcttcctgcttttcagctttcacctgggtgactgtaggccccgtcttcccagggagtactggagcagtcccttgccccaaggaccccttgacaggcactgaggctgctttcacctggaggcctttccccacagactttgcctgggatgacaaggggaagagaggtgtctccaggagtccaaaggaccacgtaggggcgggccctgaggcccgcccagaaaacacaggcctcacctgtcccacggttactgcaagacctgtcttctcttcctcactatctgattcctcactgcttgaagaatcctctgctggtctctgggtgcccccagccacagctggggatgagcctgctggagaagtcgcagttcctgctttccgggggggttgggtgcccactcgcacaggggcgaccttggcagatgcagtggtattggttttctttgggcaggccttggtctgaggaattttcagagctggttttgcctgaggggacaccaaagaaaggctggagaaggttcctgaactcagagtcccccatctgttctgccccaccagccaaaacccatgctctgcctgagggagcacagctccccgggggtgctgactgtggtgtggcagatcaggccatgtagcagcctccttccccaggcctcacctgagctgcagtcatggctgctggtgcctcctcactgtccgcactgtccgacgactcctcgctgctctccgagttgtccatgggcttttcagccttgacctggacggctacaggccctgccttctgagggggccccttggcaggactggaggtgggtttggcctggaggatgttccccaaggacttttcctggagtgagatacacaggatcggga

SEQ ID NO: 481031 - DNA, 1000 bp, Homo Sapiens
ggtccagacctgcttgtcccttttttagaaaacacttttaaactttttaaaaattttaaaccttttttcagcagatatggagagagctgacaatcaattcacattttttaagccattttagctaaactgtcattgtgcatctctgaggttccctcatggagctccacagatccatttttagggaagggattttggctcaaaacgatctgaccacctctgccctgtccaccaggataagtgacacctaggacccaggaaataaatgccgatgatttgtgtgactggtttaagattatttctccttaaccttgcaaaaacaggggttgggccttattttccccaagtccacaattagccggacttcgcccaggcttctagaacatacgattctgagaagatgctggcgttctgcagaggccagcaccctccaaggccagtgtctgatgagccctcttccatctcatctgctctcaccccaactgccagcttcaggaacccaaaaggaagctttactccttaaaacctagagttaggaggggctgagagttcagggaatgtttgagcaacaaccagagaagccttatttcttctggaaggaggacagcctctggacccctcttggcccacagcattgggatctctggcctggcattcacagccacccttaggctcaggccctgctgctgagcaggctgacccagctccctccatgctcatcctgcccacatcggcccgcccaagaccaccaaattacatgccacctgctgcatgccaccagccatgggcttctttattgagcaccagattttcagtacaagttgccacagaaggagggtttcagattcaaccatgcccatgtgcaagggcgctggtccctggccagggcacataatcagagaagtgacgcggccatgccgaggtatacgtgtgtgcagaaatggacacatagggttcaggagcatcagtaactgactattgagatcatggtcttcttggaagg

SEQ ID NO: 481032 - DNA, 1000 bp, Homo Sapiens
gggcccgggaggcgctctatctcctcagccctcaccctgaccgagcctcttctctaccgggacccgccttcccttcccagcctctcacctgttcctgctatcagctgcgccgctgcggccgccgcctctgccccgcaggttccgctccgctccctctggctccccaagccgacttcagcccggctgctgccctggcccactccccggctccctccttccttccctccacctagcaccggaagccgcgacggcgactggagctgtgcggcgtacccccacccccagcccgggatacttcccacctccccgatcgcgcgagagctgcgcggtagctagcggcagttctcgcgagacccatcaccatggcagcggctgcagcaccggcagccgggcgctggagctggagtcagggcgggggcaggtgtgggggctgtgggcggcggaggcgggagccgtgaatggggatgagacagtgaggactgaggtgagaatcccaagctccagggttgtgcctggaatttaaggactgaggcggcaagttggctgcgtaggagacgggctgggctgaggggcccaggggctccttgggcaaagccagcatcgggatatgggtgaacagtcgttgctgtggcatgccttacccagccagacttcatctttatttcttaatctgggctagctgccatcccctgaaagccctcaccgcaccattgttgttgctcactattcctgagactagattactgtggggtctgaatcaagagatcctttcccataaggaagaggaaggagagtgatgaacttaagaggctaaaggaaaacagctggactctgagccagttaagttggaacttgaaagacggagagtggaaacctaatattcagaagtgtggtttgaggaagtgtgcctagatgagtagggattttagtatcccaaggaaaggtgaaggactttgcacccatatttcttgcttcctacccactcctacttccctcacac

SEQ ID NO: 481033 - DNA, 1000 bp, Homo Sapiens
acccaaccttcgaaaaaagtcccccatcaaccatggctcttggttgcagctgttttatttccagcatgttcccaacctggtgaccctccacagtccagcgtagagagatgggttagatcggcccacacctccacctgtccctaagttacctcagttgctgaaagctaaaaccttgcgcgcaagggcgaccttccccaggagggaggagagacgctggaagagcagccaagcctccaagccagggccggccgggatcagcagaggtgcaaagtcccactcagacggacccagcccttcccctcccaacactcatcccttccctgctggggccggggctgggctcagtggcccaggaggcgcagcatctcctgaggatccaccagcttctccctgggcttccccgtgccctggccccgggccacctcctcggcatccagcttctcccagtctgagaaagagactggccggacccctgaagcagaggggagattgtcaacacctcctccttcaggggtcccagaacagccccctcccaaagagtgaggcccagagaaggaccacccaccccacctcccaggacctcagcatcggggcccagacctcggctgctgagcagggcctggatggctgcgtagccaggcctggggccagaggggagcaacccagccttcaggtcctgcagcagcatctggccggtgaggaagctgtcagtcatggttgtggctatgacacctgtaggtcctctcttcacccagccgctgcagtagaggcctgagagggggtaacaaaaggggaagggagggaggtggctggataccaccctggccatcctgtgcccacaatctacacccacgtgcacgcacgcacacagacaccccacgcctcttggcagactgtcggctgagcctgctgtggccgctggtccactgccctggattcttctctccctgtttttaccaggccgacccccttacacctcagtttccctgtagatgagggg

SEQ ID NO: 481034 - DNA, 1000 bp, Homo Sapiens
gtgaatggttgaagtgagatagaaggttgctattgttttaaaaaaccaaagctcacaaaaccaagctcacaaaagcactttttatttgaggcaaagagaagtcttgctgaaaggattccagttccaagcagtcaaaactcaaccgttagtggcactattttgacctggtagattttgcttctctttggtcagaaaagggtattcaggttgtactttccccagcagggtagaaagaagggcaaagcaaactggaagagacttctactctactgacagggctcttgagatccaacatcaagctagacacgccctcgctggccactctacaggttgctgtcccactgctgagtgacacaggccatactacatttgcaaggaaaaaaatgaggcaagaaacacaggtataggtcacttggggacgagcaggcaaccacagcttcaaaactcttcatggaaggggtaatccttgtgggaggtacagctgtcaggagaaaggagaaaacagttgctttttgaagaggtgattttgactatacccaactcccaacagagaaatgatgtgtctcactgaagaaataaaatagaacctcagaggcaacaagctagttctgagtgtgcagatgatggttctgcagctgggggaagcaactcaccctccagacccctctaccactactgtcatcaagcagcacatgtgtgagggacaccaccctccccatgtgcccagcactgtgcctgggccgtgcaggacggcaacacgatttctgccttccagtaactcagtctagctggcaggaccagactgtattttgtggtcttaaacatcttgtgtaataatatgagaaggcaggccagacacagtggctcacgcctgtaatccaggctgaagcgagaggatcacttgaggctaggggtttgcgactagcctgggcaacatagcaagatttccatcttaataaaaaaactttttaaattaaccaggcatggtggtgcatgccca

SEQ ID NO: 481035 - DNA, 1000 bp, Homo Sapiens; identical to SEQ ID NO: 119891

SEQ ID NO: 481036 - DNA, 1000 bp, Homo Sapiens
  misc_feature (100)..(100): n is a, c, g, or t
cagtgctgctccatagctcacctactggcctctctcacgctgaaatctacagacccacactgctgctaatctagatcatgattcctattgcatctggaanataacggaaaatacttctgacttgcgaaatttggtggggcagaccacatctcagcaatgtggctgacttacaaacagaggcaaagtcccagtgctttgatcagattacaacagttctgggatgttgctgcgtttgctcagtacacaactccgggaaggtcgcgtgttgggcgcccgctggaacagggctgggggaaagctgtgggctctaggtccctcctgcctgcatcctccataccttgcagttgatcctggtggcacttcttgaatcagcagtcccagggactccactggaactctcagcctcatagttgtatgtgtacttccggaggtgcttgaatcgggtcgcatcttctaacgtggggagaaatacgtcagccacatagcagaaatagctctcccaaggacagccaattctgggcagagaggggcagtggcatagagaattaaaaatggtaattcaactcaaattattttttaattgactttatacttaattttcctttatagatttgacttctccattatgtttttgctgaggctaatgtttaattggctggcatgtcttgaatatctcatctgaggcacaggaaggagtgacaagtgtcaagtaatgggctcagaaaatctgcatgagagaccctctggcaaattaagagatgacaacattacgcaaatagtactatctctaatgcttttttagcttgaacacgccgtaattccgtgactctaagactaccaaatacttaaggcaaagttcattaagcattaagcgtaactaacttaacaaactcctagaaaagaatttctggaggtttccactgtagttgagaggaattttctgaacaattgaagaaaaagaacatctgggtcctgagtccagctgcagtgatgacagacg

SEQ ID NO: 481037 - DNA, 1000 bp, Homo Sapiens; identical to SEQ ID NO: 119892

SEQ ID NO: 481038 - DNA, 1000 bp, Homo Sapiens; identical to SEQ ID NO: 308059
  misc_feature (954)..(954): n is a, c, g, or t

SEQ ID NO: 481039 - DNA, 1000 bp, Homo Sapiens; identical to SEQ ID NO: 308060

SEQ ID NO: 481040 - DNA, 1000 bp, Homo Sapiens
cgcttatcgacgccctaaacttgtcccgaccctcccgttcgctaggccaaagtctcccctgctccccgccaaaggggttaagtagtcgcgcgtcccgggtgcgcacccccttccccactcccaggtccaccccgccgcttccccgagatccagccctggactagcccgacggcgggtccaccaaggattaacttgagaaggaagtcacggagcgagagagcacagcgagggagagaaggaccagagcgggagggtaggagagactcacgctggatgccctccaggccagaaagagagagtagcgcgagcacagctaaggccacggagcgagacatctcggcccgaatgctgtcagcttcaggaatgcccgccagcgcgaccgcctccacttatattaaacgcgtgcccagccaatcaggacaaggcccgcaggacctcacctgtctccaagccagcgacgcagtgccaggttagagagagggactttccgttttcagtttccttttcttagagtctcgtgatgtttaagaaggcatgcactagactgggtgagtttgctgtctgtacatcggcgccctccggatctggggtgcgcgccccagcttgggacaccggcgctcattctaggacttcaggctggaggcacattaaggctgccccctcgctttgcagactggccccagagatgctaagtgacttgctaatggtgcccccgccagttaactgctcggacctgcatttttcattcgagaaaacggaaacccagaagattaagatctttgaatgctaggtagcagaaggagaacttctgtttataactacagcttgggaattcctgcagggtttctccattctctgggtaagaaaaatagtcccaaaagcatcctgaggacagctcagagaaggtcctagtgaatagtactttcttgcttcttgtatccttcaggaaaagtgtttggaaagttctgtgccaagaagttcctccctatgtccttgctgt

SEQ ID NO: 481041 - DNA, 1000 bp, Homo Sapiens
aaataaagggctaatagtggagtgagatataagagataacacatcaagttttatgatttatttaacttgtgaaaccaaaataaaccagattaaccacaaccatgccttactttatcaaatgtataagaagtaaatatgaatcttatatgacaaaatgtttcattcattataacaaatttccaataatcctgtcaattatagtttctaaattttcccccaaattctaagcagagtatgtaaattgaaagttaacttatgcacgcttaactatcttaacaagctttgagtgcaagagattgaagagttcaaatctgaccaagatgttgatgttggataagagaattctctgctccccacctctaagttgccagccctcctagagctacctgtggagcaacctgctcagatacatcaaacatggagacagcactcaaagtagaattataaagacgatcatgtccatgttaacattattataaccctacattttgtgcataaagtgtaagtgtataagcatatcaatattaaaaagcaagcaagcagaatttgaattcactcaatccaaatgcggcatcttcaaacctgaaaagaaaagaaaaaggttagcaatgaatttattttatttggattgcagatctcattaccaaaactgtctaatttctactgtgtagatcacctttttaaaagaagtagctgcagacagttctccaaacccattataaagagtatatcctgttagtgtatccctttggtgctcccaaaatcttagaagaaaaaatgctgatatgatgttttggtcaatgatggactgtatatatgacagtggtctcataagattaaaatagcatatttttactgcaacttttctatgtttagatacacaaatacttaccattgtgttacaatgccacagtattcagtcaagtaacaggctgtacaggtttgtagtctaggagcaataggctataccatgtagcctatgcgtgtagtaggctacaac

SEQ ID NO: 481042 - DNA, 1000 bp, Homo Sapiens
ccacctgagtgagagtgagactccatctggaaaaaaaaaaaaaaaaaaaacaactcaataatcaatgttgctgtgtgaattacatgccaatatagaaatagtaaagcaaatgggaacagcttgtggggcggtcagggtatagctaataaagtgacccttaatattggagtaaagctttcccatcataaaggcattaggaagtgtttggtgtatttgaagaacaaacagcaaggagcctggggtgtggactgcagtaggacatgaggtcacacataaagtgggaagatcatgaaagctatcatgaggacttttgatttttttgcacgggagtgccatgatcaatttaataggatcccttggactactgtgtggagataaaactgttgggtagcaaggacaggaacaaggttttcttgtagagacaatgctgacctttggcccgaaccctttctctccttcccaaattagtcatgtttaaggattttttttgtttttaggtctcactatgctgcccaggctggcctcaacaaatcctccagcttgtctcccaaagtgccaggattacaggcctgagccaccacacccagctgaacagttttagataaaaacctaattcatgcaatgatcaaagaactgagagaataagtacattttatgctatctcaaattatattatttctataatcacattttgatgcctttttgctggttagggcatttggtttgctttaaagtacattagcactgtaagatgacaaaaaataacagaaggtctatttgtttttgttttttttttatttttttcttcatttattccttcagttgaacaacctctacacaattaaaatgtatgacttaagatcttttctttttttgtgaagaaatttaggtctcaagaacttttatgaacttgctatgagtacttcctggaaatcaattaactgagtcttttgaaacccctagagaagataggagaaaattggttcagaacgagcattta

SEQ ID NO: 481043 - DNA, 1000 bp, Homo Sapiens
ccttggataggatagtgatggaggaaaatgttgacattgactatatactctcacctagtattctgtgtaaaatcatgtttccctaaagaggactctgatttgtccagttgcatccttgcaacttggcacaggttggcaggtaaaaatgacctttctgtagaagtagaagcctattcttcacatgtaagttttgattactattttatcacatcttaaatatataaatctcaggctgggcgtggtggtgcacgcctgtaatcccagcattttgggaggctaaggcaggcagatcacctgaggtcgggagttcgagaccagcctgcccatgaagaaaccacgcctctactaaaaatacaaaataagccaggcatggtggcacatgcctgtaatcccagctacttgggaggctgaggcaggagaatcacttgaacccaggaggcagaggttgcggtgagcagagatcgagccattgcactccagcctgggcaacaagagagactatctcaaaatctcttgagtatcagtttattcagacatttttgtagtttaacacagctctggcatgcccccagctcaacaaactactccaggaatttagctaaggatactctttattcaagcagtagtgcttttcatttagatattactttctgaaagcaagagtagattaatacagctgagagtttttagcaccttcaactcagctattagcaaatggtaggcgagataccaatgactacaaggaaaccaatataaactacatttgcctatcatgggaaaaggtaatttaacaagaaaatcatttaaaaagtacttttgttttttgatacagggtcttgctgtcacccaggctagagtgcagtggcacgatttcagctcactgcagccttgacctccctggctcaagcgatccttccaccttccacactcccagcttcccagctgggactatatacactctccaccatgcctggctcacttttgaatgtttttgtagaga

SEQ ID NO: 481044 - DNA, 1000 bp, Homo Sapiens; identical to SEQ ID NO: 119893

SEQ ID NO: 481045 - DNA, 1000 bp, Homo Sapiens
  misc_feature (74)..(74): n is a, c, g, or t
atccatagttttttggttggtgcaacactattagttacttctcaggcttgccttggggtgtgccctacggcttnaagagacctctttatggcagcatttaacatacagcttgtaaatgctggtgaaacataatctcagcaacactgctttaggactgaactattaatacaaatttttgttattgataccttaaggaactttttacttctgaaccttgactccaggtaccacggggccattacaaaaggcttaaaatatgaatctggttatctcaccaaaaatcaattaattattttagaagacaacaactatactcaatatggatgtaggcagaagcttaaaagacctactgccacattaatttcattacctttaagatgctacagatagatagatagatagtatatcattttaaagttgtttcctaaaatgttaagatgtcaatggcaactggattctacatcctggtttctggaaaaatgcttatcttagaattagcaaaacatacaagtagaataattaacaatatgccttcagtatcccaactacccagaacagtggttctaaaactaggttgcagtttgaaatcactttaaaaccccaggggatggggagaaggcagcacaggccatcaatttgggaaaagctcttcaaatgatcccataattaggatagggtatacaagtacattatgttgcaactaaaaagaacaaaaacatgaaggcaattttataactttatttgatctgacgatcagcgattagttctcatccacattgactgtctgtagatctgtaaaggaagtaacagtcaatttacatacccacatcacatttcatatttcaactctaaaaaccttttgtagacgggtctgggcattctattttccacaacctttttacatcccagatatggatcagttttgcattctttagcatcttcccacaccaacaatttaaaaagggtacaatgacgtgtgtcacccctagcttaacagatg

SEQ ID NO: 481046 - DNA, 1000 bp, Homo Sapiens; identical to SEQ ID NO: 308061

SEQ ID NO: 481047 - DNA, 1000 bp, Homo Sapiens
ctatgaaacttgctgacgtaaaggagataccataataaggatcaaagggatattaaagtttcaaatagaagggccattcctcccaaaccaccctgaagtctcagcccacaaagagaaggacattatgctccaatgcagcggtagagctgtcaccaaaaaaattctggccatcagtgaccaccaactgtttcttcagaaaaagtaacccactggctgggtgctgcggctcgcaccttaacaccagcactttgggaggccgaggtgggcagatcacctgaggtcgggagtttgagaccagcctgaccaacatggagaaacctcgtctctactaaaatatacaaaattagccaggcatggtggcacatgcctataatcccagctacttgggaggctgaggcaggagaatcacttgaacctggaaggcagagggtgcggtgagccgagatcctgccattgtactccagcctaggcaacaagagagaaactccgtctcaaaaaaaccaaaccaaaccaaaaacaaacaaacaacaaacaaaacaagaaaaagtaatctgctaaaaactatagggtccccaaataccatacagaaacaaaatctgtatactaacacattacaacagaaaaaaaaaaagtcatacatacagcgtcttttcatttttattactcaaaaaagtttcatttttttatttagctttctgactctgtgcttgtgccttcaacactttcacaacgattttctgctcctcgataaggaaagcacgcttgatcctagaaaggaaaataccaaattaatcatttctttaaaatgaacttcattttttatttagcacagagaaggcaaacatggtaaagaaccaagcaaagcaatcagggaacccaggaaactacaggatacacaaatacagagtaaaacttaaaaggtgaaattcatttaaagcaggataatccttcaatttcatgccagtagttatctgtcctccttctgagtcaagataaacta

SEQ ID NO: 481048 - DNA, 1000 bp, Homo Sapiens
gccccttctcctacgctaacccacttcccctacatgtgaagacaaaactgggaacttgcccaacatcaaccgcatcacaagctttgaaactagcaagcaaattctgtgaagtgttccccaacaatcaccaacagttcaccttccccagcaacccgtcagcctctggtcagctcccgtcccacctgtctcttgcctggcggggtcagggtcccagggccagcaggcagggaaggcccccacctccactcggcgcctgccctgcctagcaatgaccggctccctcccacccctatatgcaaacaccggcttacttggaatttccttctggttttgacacagtttttccaaaaataccactcgtctctcccctgatgacagaagtttctggtaaagatgtgtgttcactactgtagaatagtactgagaggccagggaccactagctggtaggcactcccaagtgagtgagcctcccagggaaggctgcatgtttagagcaggggaaagagtcaaggatgagagacccccacacaccaattgtaaagcgctgatcctgtttatttggcaggaaaacgagacaatccagcagcccaggagggacaggtggacttaatcctcctcctcgtcgtctccagccccagccccaccctggcccttcttggcattcttcctcttcacgcggcccgggcggccacccccgtagggagagcgcagagagaagtcgatgtgcttctgggaatccaggcggacaatgaaggacgggatgttcaccacctgcttgcggaccctggaagaagcgacaaggtgaggtggactggaggagaaacggacgctaaccccagctaccgcaccactctttcctctccacccaccccgtgaggccgccacggctgcagacaccaaggcgctgcaggaagggtgcacctgatcctacgtgcgccctccggggttttagggtatcaccttaatccccaaaaatgcttcagatgactttctcaacc

SEQ ID NO: 481049 - DNA, 1000 bp, Homo Sapiens
ccgggtaccgagctcgaattcaaagtgaactttcctcagaaaagccagagtacatgaggttgacaatttcaatgttaacacacagttccaggttatacacacttcagaaaaattctctcagagctccttgctttccatgagggtactcaatgtcactaccatgctaaggtcaaccagctttagctataactaccaaaccaaccagtacgggagaccctactccgagattctcaatcaaggtttaagacgcaaagaaaaaccttggtatagtcttcaaaaccaggattggccaagtatatggcctcacaacattcttttaacggtacctttatccaagtttaaaatacaccaaacaccagccatggcttctctcactgcgatttctagggactggggtgcattcaagcccctctcgctcctgcacaaaaggccaggaatggtggctcacacttgtaatcccagcactttggaaggctgaagctggtggatcacctgctgtctaagttctagaccatcctggccaaatatggtgaaaccccatctctactaaaaacacaaaaaaattgccaggcatctgtaatcctagctgcttgggaggctgaggcacgagaatcgctcgaacccaggacaaagaggttgcagtgagccaagattgcgccattgcactccagcctgggcaacaagagtgaaactccgtctccaaccaaagaagtcaaacgaatgtccacaagcattcctgggtatcataacacttgtcccacatgcaagatatgatcctggcccaactgtgtactttctactaacctgcccagcaagtctactcactgtcctttcatagactgcaatctattaaaaacacaacctctctctccagattctaggctagtctagtgagggataaatgcccatagctaagtaatcctggccatcaccaacactgcatggcagacctatctttgctaaggctgtccaggtttgaattgccccatgatgcagtcat

SEQ ID NO: 481050 - DNA, 1000 bp, Homo Sapiens
cccctccaccaaggttcccagcttttccgttcactttgatcctttcttgcaaaaactgctcctgtagaaatcattaaattgaccaatgaagtgacaagttcatctgtctcaacagaatattttatctgtctcccaacactgaactaatatcattttttgttttggttttggagacagagtctcaccagcgcaatcacagctcactgcagtctcaacctcccaagctcaagtctcgacctcccagactcaagtgatcctcccacctcagcctctcaaagtgctaggattacgggcatgagccatcccacctggccccagctgactttacaattttttttttttttttttgagatggagtttagctcttgttgcccaggctggagtgcaatgggcgattctcggctcactgcaacctcgcctcaggagttcaagtgattctcctgctccgcctcccaagtagctgggattacaggcattcgccaccaggcccagctaattttgtatttttagtaagaacggggtttctccacgttggtcatgctggtctccaactcccgacttcaggtgattcgtccacctctgcctcccaaagtgctgggattacaggcgtgagccactgcgcctggcttaaccatttttaagagaaggggtctctctatgttggctagattggtctcaaattcctgggctcaagtgatcctcccacctcagcctcccaaagcgtggggattacaggtgtgagccagcatacctggccctaatatcggtttcttaaatgttcagtcttttttaaaaatggtaacaaatcccatttacatacatactatgagacaacatcccagtgtaaacgtacttgactacttccacacaaggccgactgggcctcgccacgaaaggcttagaaggacaacactagacaggaaacccaaggccagacttttacaagatacgcctgtaatcccagcactttgagaggctgaggtgggtggatctcctgagc

SEQ ID NO: 481051 - DNA, 1000 bp, Homo Sapiens
cctttatagggatccatcctgaacaaacattaaattcccaagcgttgtacaacagacagcaagcattccactgaaacacccagagactgaggatgcattttgttttttttggaagcagggttttgtccaggctgaaatgcaatgcataattaattacaactcctgggctcaagggatccttttgtctcagacttcccagtaggcaggaccataggagtcagcctacttttttttttttttttttttttttacagagatgggggtcttgctatggtgcccaggctgctcttgaactcctggacactcaagtgatcctcccaaagcatagggattacaggcaccccacaacaaagaattacctggccccaaatgtctgttgtgttgaggtcaagaaatggacagaaacacaaactggcttatatttagacaacttacattaaatataacttctgccaaagtataggtagtctaagaattgaaaatatcaagacctttacaagtggttggcacctggcaggtatacagaaccactgggtcacataatccccagaggcaacattcacacagcgatagcagtagcactactaaaaggaaatggtgtgaccatcaatttggtgcttaaaaaccattctttttactgcaataaaacccaacaataaatgttagttcatgtcttttattaactcatacagttacttgtcttctggtttgttgaaacagtaagtcagacaacatttgccacaataatgtctgtcaaagtgacttgccataaacaccccagcaccacattcatcagaagggcactctcgacgaaggcgactaattttgccattctcatccacctgaaaagcacaaacctgctgttaagataattttacaacacattctgaagtctaatttaagtgactcaaaatatttaagcttttaactgtgtaatactggtggttttggtgcttacaaaccaaagcaccctaaattctcaccagttatcattgctaca

SEQ ID NO: 481052 - DNA, 1000 bp, Homo Sapiens; identical to SEQ ID NO: 308063

SEQ ID NO: 481053 - DNA, 295 bp, Homo Sapiens
tctacttcctgcttctcgactttgctccagcagacccctctgtctcctttccactttctcaaatgtgaccatctctcatctagtatcatcacttctcacttctgtctttccttctggggttatacccgcttcttcctttatttcatgagagtttcaggagggagccgagaagacctgtgaagcctactttagatacacacacacacacacacacacacacacacactttttatttaaaacaaaactacatcaaataaatatatacagcgtttatggactgaattgtgcatccctc

SEQ ID NO: 481054 - DNA, 1000 bp, Homo Sapiens; identical to SEQ ID NO: 119895
